United States Patent Application Publication US 2025/0297208 A1 - sequence listing, part 9

SEQ ID NO: 1566 - DNA, 53541 bp, Xanthophyllomyces dendrorhous
acacacacacacacacacacacacaaaagccttgtcagaggctgtctcggaaggacaagtagagcgaagaaggaatctgagtcgtcctggacagtgatccagcagccgtccatcatactatcactgcttctccctttgtatgtatgttcgaagttctgtgtgagtattgatcatgaatgaatcaatcggccggcttgatgtgtctattccgatggtgtgccgtgcgtgttcgatcagattcttccctccgcgcgctgtctcatcttgaaagagggtactcgacgacacacacacacacacacacacacacacacacacacaccttgtggaacccacatatggcacagacagcatatctacacatacgtagcacatgcacgcgcgcacacacaaataaatatatatgtacagatgaatcactcacgctgaggacggaacagcgtgcttccgaaggagcacgtcgaaatcatcggcagaaacagagaacggtggttgagctgtacctatgccgagaatacttggaggactcgcggtgggcatggtatgagaggactgaagagaacacggaggaagagagcggaactaagagattgaccggatagagaggagatggaaggttagtgtgtctgaatagatcgaatcactttctggtcgatctctcttgagtcaaaagaatatgcaaacccagagtcaattgtaacgcttcgaatggatgcccggcaggccatgacgcgtgtgttggtggacgagatggtcatgatgcgttctcgtcaggcttcgatggcttcatctttatgtctgaacaccatcacattcatcctctgaacagcgttgtctcatagccatggccatcctagcttccgtccctttgctccttcacactcttcttcttctgcctccgtcattcaaattcctgcttgatccgcctccgtctccgcctgccgtccgacctctcgtcagatcttacgccttcctccttctctctacccacctggcctgccttgttcttacattctcactccgacctggctcggttattctggcccggctcgccatcgcactcgctgtctatcatttcggacccatcggtcgagcgtggggtcgattgaagaacggagagttgacaggagagatgggtggtccgggcgttcatctctgtctgcacatactcgtcctgggagctctgtgttgggaaggttggagatctggcttgggcaatttatgatatatgtactcggcgaacaggtcgatcagaaatctgtgtagacttttcttaacaacagatttgacagaacgccccaatagtctggcatatcattcgtcacacccacacccgcgtctacagatagatcgaaatgtcatgtatcccgcatctgtctcaacctgaccttcgtctcgagcggacgacgagagatgacttctcggacttgtatctctttccctcgttgctgctgctcagacttttcggccatagaaggagagaacaggtcgtactcttgcacgagtcgagcgacaaacagccgaagaaaaagttgctgttgagcgtcgacctgacggatcagtcttcaaggaaaaacgaaccaacgaagagaaaagaacttgagcagacaaagaacaaagatagacgtactgcgaatcggatgccaaagcaagctctggtacccaatgaaaacgggtgactgccaaccctgctggcatcgtactctccgctctctggatctagccatcggtctagattaaaggtttttcccgcctcgacctcggctccctttccggtcgcatctaacaataaaacgatcgacgtgcctttctttatcggatactgaatagcctccgccgaatctgtggttgaaaggaggaaagtatcccgaatggcctcccgagaagtcagcgggattgttcccgccagtcgaagggattcggaaacgaatgatgaaagaacaggaagagatcctgcaaagagtatgcacccagatataccgaaaagcgagtaccgagacataagacatcaaacgggtgtaaaaagaaaaaggagaaactacaaaggaaaaaaaaagaatggggagaaacgaacgcgacagccccatgatctctgcataagataattcgggttgagaaggaagcatctccagctcttctcgaatcctgcgctgtgtgtctggattgaatatcagatggttcagaatccagcaaagctgggaggccaccgtatcgtctccggccagcagaactgcatgcaatttgttagtccacaggatgagatggaatgacatgcatggaagagttgttcatcgaggtgaaaagaatatgacatacgagtgaagagctcgtctcgaacttcattcgtggatagcccattagtctgatttcttctcagacattctttcatcacactccacggagcagccattccatctaccaccatgggcacagattcatcttctgccatacactgatcgatctgttgccccatccatctaaaaagtctaaatcttgcatagtgataccgaatattaaacgtccgtttgaatggtgtgatgatgggtatcggattcaatgtcttgaggaattcggaaatgggatcgaacgcgaggagatagatcagatgcaacctatgtcagtgattgtgtttgggactatagagtcgtataacgatacccttattcttcgatagactgacatcgaatacaacttctatccaactaacgacctggtgagcttgttgcgcgttaccatcgctcttctctaaaacgcccagatcggctccaaatataaagcggagcataatctctttcgtcaagagtgagattgatctctcagcatccatgagagggcctcctttgtcgttaccggcctcagcgtctggaatggatgaccatagcttgaacagccggtcgatgctggtatgcataatgggcatggcatgtttatcaagcgaggacgcggtgaacgacgggacgagcatcttcttgtgcgccgtgaaagtcgaatctgatggcagaaaagatttttacacaaaaaggatgagcagaagatgtttaagaagccttgaacgatgcatgccatgagaattctcggacgagacacgtacctgagttctgacagagcatgcttccttgacccaacacacctcgaaagacgcccataaagaaggaacctctgtcgaaggaagccttccattctttatcggccaggacccgttcgatccccacacgatcacataccagcactagtggctcgccaaaaatggagatctggcagagtgggcctagggatcgagcgaactgagctagaagcaccgacggggaagaagtcgagaaaaggaaggtcagggcatctccaaaaatcggaagtgatgtctttggacttggtatccgagagagagtctgatgtgaccgggacttcctgagagtgagtgccagctgaacaactaaaataaccaagaagcagccaagaagagccagtggtgagaagaccattgatcgtccagaagtgatcgttgagttctcaagcgggaatgttggcagtagaagtgtcgtcatgatggctgggttagggttagtttacatcaagcagtgcattcacgtgattagccacaatcctgtacaacacacgtgacgtgtttttttctaagccctcctttcctttcgtttccattcctttctttcctctctcctttctttctccctctctcctctttcttctccttcttctccttctttttttccctctttctgtacaaactcaaaactgtaaaaacctcgttaattaagaatcccaaaactcgcattatgtcagtttttttctccttctcccgaacatgtcttcatttctttcaagagtgatctgcttggaaaggaaaaaaaaacttttctctatgtccttttttctccttctttatgaagttgcaatgtcgctttcggatcatcctggcttgaaaaaacctcgcggtatacgtactggtgaactgacgaaactcttcgccttggtgtttttccatcggcttacgaccgttgcgatctacagccttggacgattctcatcttgtgacaaggactatctctcaggactattcaggacctaagagatctgtcagtgaacttttttctctctttctcttctttcctctccttctttttacaccttcggaggatctctccttctcatttcatcaccaaagccttttctcggctcgatttgcaacgattcaagtcatacaaataaatttcgaaaaataaaaaaaagaatatgattggaaaaattttactgacaaatttttgctcgtcgaactccgatgtatcggacattcgccgataattaattttacccggtaaaagctctttcgcctcttctttcatcacacttcacccacatcccgggtttccgttctcccaagaggagcatcgtcttccttgtcagtcctttcgttcccactgcgacctgcttgtcaaacactcctgtagctggatccttgtcttgatcttctctttggaggaccgctgctgacctttgccactttggacaaacaaattcggctttcagcccacgatataacttttgtctctttccgctcttttctttgaataaataaaaaagacaaaaatgtctgcctctccttctggtcttcctcctatgccggctcccccggtgccaagctcttcggagtctcaggctccttccgctcctgtcgctggtcactcggccgttaacgctgacgagcccgtggctttccccactggcgccgtcgccgtccaccctcgatatcccgtctccaacactgctaacgtcgccggctcttctgacagccagcttttcccgcctgctaccggtcgaggactcacttcctcgaatgagacctccggagccgaggcttgggaggatgaggaggctgatatggtcctcgagctttcggacggaaccgctttcgagggtcttggatttggtgcctctgataagagtgccggtggagagtgtgtcttccagaccggtgagtttctattgttccttctctatcaaacaaaggaatcgaactgaccttctggtcttcttcatatctcgataggtatggtcggttaccctgaatccctgaccgatccctcctactcgtcgcaaatcctcatcctcacctaccccatgatcggaaactacggtgttcccgctcgaccgtcatcccttgatcctgtggatgtcaaccttccgactcttccggtcgagttcgaatccagtaagatccacgtcgctgctctcgtcgtcggcgcgtaccacacttcgttctctcactatcttgccaagtcttccctcggcaagtggctgaaggatgaaggcatccccgccatctggggagtcgacaccagggctttgaccaagaagattcgagagaaaggagttatgctcggtcgagttttggccaggaaggactttacgccttcaacccaggagaatcgaggacgaagcttgattgcctcgatctcttctctcccggaacgacttctcggagacgcctcgaacgcttctcccactccgtccccttcgaggcagccctcgtcggagtggagggagaagtaccaggttgtccccttttcggatcccaatttccgtaaccttgtcgccgaggtgtccgtcaaagagcccattctctacactcctaagggggtttctggagttgagcccagtgttcaccccagagagggtcgacctttgagggtcttggctttggacttgggaatgaagtacaaccagatccgatgcttcaccaagcgaggaatcgaggtcaaggttttgccttgggtcagtttttcctattcctcccccaccccttcccctttgtctcgctcgttcgcgattgaagcagccgtacttaacttgtcctgttctctttgtatttgacaggactacaacttcaacaagctcgagcaggagccgtatgatggtctcttcctttccaacggacccggagacccctctattgtctctgccactatcgataacatcaaggaagccatcactgctgccaaggttcccatctttggtatctgtttgggacaccagctcctcgcccaagcttctggagcgaagacctcgaagatgaagtacggaaaccgaggaatgaacattccctgcaacagccgagcgtccggtcgatgctacattacttcccagaaccacggttaccaggtcgacgtttccaccttgaccgacggatgggaggagctcttctacaacgtcaacgataactccaacgagggtatctggaagggtaaggacggtctcccgtacttctccgttcagttccatcccgagtcgtctcccggtcccaaggataccgagttcttgttcgatgttttcatcaagagcatgaccgattgcgccgaggccgagaagctcgtccctgttcaaatgcccggaggtgacatcgaggagaatgcgtcgaagaaccccaaagtcaaggtcaagaaggtcgtggttctcggatctggaggactctcgatcggtcaggctggagagttcgattactctggatcccaggccattaaggcactcaaggaggagggcatctacaccgttcttgtcaaccccaacatcgccaccatccaaacctccaagggattggccgacaagatctattaccttcctgtcactcctgactttgtccgaaagattctcaagtacgagaagcccgacggaatctacgtcaccttcggaggacagaccgccctttccgtcggaattgccctcaaggacgagttcgaggagctcggatgcaaggttctcggaacccagatttcgaccatcatcactactgaggatcgagagctcttcgccagggctatggaggagatcggagagaagtgcgccgaatcggccaccgccgtcaacttcgaggaggccgctgtggccgccaagaacatcgggtacccggttattatccgagctgctttcgctttgggaggtctcggtagtggattcgcctcgaacgagagtgagctcaaagccttgtgcgacaaggctttcgccaccagtcctcaggtcttggttgaaaagtcgatgaagggctggaaggagatcgagtacgaggttgtccgagattgcagagataactgcatcactgtctgcaacatggaggtttgtcgttgttcattttaaaatccagtctgtcagcctttgggctaatcgaaactaatcaccggttccctcttttccagaacttcgaccctcttggtgttcacaccggagattctatcgtcgttgctccctcccagactctttcagacgcggactacaacatgctccgaacgacggcgaccaacgtcatccgacacttgggtgttgttggagagtgcaacattcagtacgccttgaacccttactccaaggagtactgcatcatcgaggtcaacgcccgattgtcccgatcttcggctcttgcctccaaggctaccggttacccgctcgccttcattgccgctaagctcggtcttaacattcctttgaacgagatcaagaactcggtgaccaaggtcaccagcgcatgcttcgagccctcgctcgattacatcgtcgtcaagatcccccgatgggacttgaagaagttcgccagggtttcgaccttgctcggctctagcatgaagagtgtgggagaagtcatgagtatcggtcgaaccttcgaggagaccattcagaaggccattcgagccatcgatgattccttccctggtttcagtaccgttagtgtttatcccttgcttgttctgttagtcaaatgagagcaaacatgctaattaatccttttacttaacgcagaacgactacgtggatgacatagactccgagatccgaactccctctgacaagcgactcttcgctatcgctaccgctttcagccgaggctactcagtcgacaagattcaccagatgtccaacatcgacaagtggttcttgacccgattagagcgacttagcaagatggagaagttggcttcgtgagtgattctccgtgcagtttgctcccgcttgtcctttatatcttgttgacgcctatttattttctatctgtagcacctactctccctcttccgttccctctggtttaatccgacagtgcaagcagctcgggttctctgatagacaggttgccaagttcttgggttccaacgagctcgccgttcgacgactccgacaggacgccggaatcgctcctttcgtcaagcaaatcgataccgtcgctgccgagttccccgcattcaccaactacctttacaccacttataacgctaccgagcacgacatctcgttcgaggaccacggagtcatggtgttgggatctggtgtgtaccgaatcggatcctctgtcgagttcgattggtgtgctgtcaccgccatccgaacccttcgaaagctcggtcttaagacggtcatggtcaactacaaccccgagacagtgtcgaccgattacgatgaggccgatcggctctacttcgagaacatctcgctcgagaccatccttgatatctatgatgccgagaggtcttccggagtcatgctctctatgggaggtcagacccccaacaacatcgccctccagcttcaccgacagaacgtcaagatctacggtacctcccctgagatgatcgatactgccgagaaccgatacaagttctcccgaatgttggacaagatcggagtcgaccagcccttgtggaaggagctgaccagcttcgatgaggctgaagttttctgcaacaatgtcggatatcccgtccttgttcgaccttcttacgtcttgtccggagccgccatgaacgtcgtcttctccgccgacgatcttgcgacctacctcaaccaggccactgccgtctcccgagaccaccctgtcgtcatcaccaagtacatcgaggaggccaaggagatcgagatggacgccgtcgccagagacggaaagatggttatgcactacatttctgaacacgtcgagaacgctggtgttcactctggagatgctaccctcatccttcctcctcaggatcttgacccggagaccgttcgacgaattgaggtcgccacccagaagatcggtatggcgctcaacgtgactggtccttacaacattcagttcatggccaagaacaacgagatcaaggttatcgagtgcaatctccgagctgcccgatctactcccttcgtttccaaggtgaccgacatcaacgccatcgagcttgctaccaaggtcatgcttgacttccccatcactccttaccctgaggtcaagatgcccaaggattacgtcggtatcaaggtcccccagttcagtttcagccgacttgctggagccgatcctatcctcggtgtcgagatggcctccacaggagaggtcgcctgtttcggaaaggacaagtatgaagcttacctcaaggctttgatctcgaccggaatcaagatcccgaagaagaacattttgttctccatcggatcttacaaggagaagatggagttgcttccctgtgttcagaagttgcaccgaatgggctacaacatcttcgctaccgctggaacgtctgatttcatccaggcaagttcttttccttatgtttcaaactagttcattcatatctgatgttttctcccgcttgtctacaatcctctcgttcaacaggagcacggaatccctgtcaagtacctcgagtacctggaggaggatactacccacgacgcccagaagtctgagtactcgttgcagcagcactttgccaaccacctcatcgatctctacgtcaaccttccttccaagaaccgataccgacgacctaccacctacatctcgagcggttacaagtctcgacgactcgcggtggacttcgctgttcccttggtcaacaacgtcaagtgcgccaagctcttcatcgaggctatcgttcgaaacccctctatggagatctccagcgtcgacttcaagacttcgcacgagacctacagcttccccggattgatcagcatccagacgtttgttcccgaggtcgctaaggctggctccaaggactttgccgaggtcaccaaggctgccatccgaggtggtttcaccatggttcaggtccttcctcagggtgtggagtctcagatccacgatgaggcttccctccgagtcgctcaggctaacgctgacggacaggctcactgtgattacactttcggagtttctgctaccagcgagaatgcttccctcatctccgagagcatcacctccggtgcccggtcgctcttcgtccctgcctcgtttgcttctaacaccaacaaggtcgcgaccgtctccggacactttgctgcctggcctgctgagaagcctatcgtgacggatgccaagactaccgacttggcttccatcctccttctcaccagccttcacaaccgaagcgtccacgtcactaacgtcaagactcgatctgacatcgagctcatcgctctctccaaggagaagggacttcccgtcacctgtgatgttgccgtgtactcgctcttctttgcttcccaggatttccctgctgccacctgccttccttctaaagacgatcagaaggctctttgggacaacctcgccgtcatcgacaccttctcggtcggaagcattccttaccagctcggtcttgacctcaagcaggtcgtttctcctttggctggtatcgaggagacccttcctttgctgctctctgccgtgaatgacggtcggttgactttggaggacattaccttgcgactccacgacaaccctcgacagatctttgatcttcccgagcaggtctccacctctgtcgaggttgacaccaacaggagcaccgccttccctacccccaagcactggtctcctctatccgagaagatcatgttcggaggtgttcaccgagtcgtccacaacggacaggccttcttcattgacggtgtcagtacctccactcctttcggacgagatctttccggagaggcttcgcctcgaaccaggaacctcggaagccgagcctcgttctcccgagctcgaccgaccgttcagacatacccctcgatgtcttcccccaagattagcggtcgatcccccgtcctcaagccttactcgccctctcctggccaggtgtctcgaatcccgtcgttccctgacctcactgctgtctctactcctcggtttggtgctatccagcctcacccatcgttccaccgacgacacgtgttgaccgtcaagaactacacccgagaggatctccacgccatctttagtttggcctccgagatgagaactcaggtcgagcgacacggaagcgttgacacgctgaagggccgagtgatctgcaacttgttcttcgagccctcgacccgaacttctacctcgttcgaggccgccatgaagcgatgtggaggagaggtaacctcggtgagcgttgaccgatcatcggtcactaagggagagtccttggccgatacaatccgaactgtcggttgctacaccgatgccattgtccttcgacacccggctatcggatcggctaaggctgccgctaagttctcgcccgttcccctcatcaatgccggtgatggtatcggagagcaccctacccagagtcttcttgatgtgtttaccatgcgagaggagcttggatccgttaacggtatcaccgtcacgatgagtaagcctctttctttgtctttgtcttcgtcttgttgttctgcaatcaagattttttctctttactaataagactttcttctcttttacttcttccttatccagtcggagacttgaagaacggtcgaactgtccacagtttggtcaagttgctctcgctgtactctgtcagcttgaactttgtgtcaccaccttcgttgatgatgcctgagtctgtcaaggctgaggcccgaaaggccggagtgtccgttcacgagtgtgttaacttggatgaggtcatctccaagtctgatgtgctgtacgttacccgaatacagaaggagcgattcgagaacgaggcagagtacgaagccgtgaaggacatgtttgtcatcaacaacgaggtcttgactcgagccaagccgacgacgatcgtcatgcaccctcttccccgtgtgaacgagattgacccggaggtcgactttgactccagggccgcctacttccgacagatgcgacttggtctcttcatccgaatggctctcttgactatggtgttgggttaaaaggaggaacgaatttgaccaaaagtaaaataaattaaaataattcattcgcatcttttcaagagtctttcgacttgttctcttctttcagtcattcttctgtacttccttctcattcgctattcgcctcctctttctattctatcattatctgttcccttcatccttggctctgcattcggaacgttgttacaagcacctagattttctccttttattctatgatttatctttcttccgaactgatccgggtcttggttcaattcatttgcgagcatctgaacaaagagcaatgacgagggacatggaaatacaacacacaacagtaagggagaatgacgaatggcgttttaatcgactctataaaaaccccaaccgagcgaaccctgtgacatctcccaaacgaccttcgccgcgccctcttcctccctctcggaatgctctctgacggatccgagcgcaacgaacaaaggcatgaaatgatccggttcaggcacagctttcttgtagtttggatctcgttggatctcttcgatcttctcgagcgcgtttgacggtcggaacgctcggacgagattgccgactgagcggatgaaaggaggaccgtacgtatcatttttgcctgtgaaatagtctcgtagattatgaaccctggcgtgatttcgttttatgatgacaaatttcgagtcgagtcgagtcagcatctgatagcaacaaagacgagaagaagaagacaacaaccaaaaagttgtttctcacggttgaccggatgcgatgatgatgacgccctgctctcgaagtccgtccagtgctttcccgagtttgtatgagctcaccaatgatccatctcctggaagagagatctgaaggattgggaaggactctttggtatgatttggaaacatcactttgaacggaacccaagctccatggtctagacctcttccttttccttgaatgcctacatagtcgatcccagctgaggtcagtcgatccttaacggcagagacgagccaaggagcggaacgatgtggaaactgttggacgtagtagtgagcaggaaagccataaaagtcgtagatgagaggagtctcgagcgcttcgtttacttggtgtgcatgtttatgaacataatgtttagtaagtggctgcgtgcttgcggagaagaagaggtctaattgatattaaaaaaaaaaaactaggtgctcgagcaaaacattccagacatactctctacagcagaagaatgctcttgaccttcccaatgagccgaaacgaccactattccttgtggctgaagagcttgaatatcttgacctatggcttgccattgtttgtaagctcccgagaccgtgtcaaacaaagtgggcggtccgcctggaatgattgcgtgagaacataagattgggctgaagtgagttcttagttctgtttaagggaaaaaaaaagaagaaaagcgacaaagaagagagagagcgcgcgcgcgcacgcctgaccgtgagaaataaagaacgaaggcatcatgttgataaccttggatacgaattgtagagccatctcgatgtctgtgctgatgagactcagaacgaaagggaatgagatttgaacgagtatataacttttgaaagtttcagtaagccggcggcatgaccgaagttcacattacgcgtgggaaagatgacggtgacggtgaagcccgatcgttggataatcattgttcatgattacataattagcctcttacctaagctacatgactccacctaagcaagatcgccaagagatttcccacggacccggccgagcttccgggccggttggagttccagaggacaaacccgatccggcgatctcttggtaaggaagaagcattgggcgctggacatcgggtgctgggtgttgagaggttgagtgtcgagtatcagatgtgagcgttactggaacagctgatcagttccagcttgttcgtcgaccagcggcttgatgcctagcaccagtatatgtatgtgtctgtgtttctttccttttccatgaaggcaacagattgagtccggtagcaaacaacgggatcaaccataacatgttcaagaggcagaatggagaaagaaaaacaagagggcaaagactgagtgaagctggataggatcctggaactgaacacgacaagcgagaaatttgttgtcacctccttctctctcaatcgacggtcatgtgaagcaacacctagctgtaagtgctccaattcaggtgagtcactcttgaatctcccacatgtacaaacacccacactcagacacatacaccctctctcattttcagtgttggcctagttgatttccgttgtggtgatgaaccaggagaaagtccgatgaatgttcttggctagatatgtttcctttcggtcctgcccttctgcagtctggtgacgcatctcttgcgtccatccgtcattgatctcccttcttcacattcggttgaagtttcgcacggctttcgtcacaaggctgctcttcttactcctaaacttgtttcagtcaagttgagccgtcgtcaccgatcgatcctctctaatgaattcttagactccaaaccagcgacatacgtaaccaaaggtgaccgtaccaaatcttgaagaactagtcaggaggctgtatggacaaagaatcaggaggaatagggaggattcagtcagaaagaggaaatcaaagaagcataattcctcttcaagaatttgtataaaggaacgacgagaatgggctgaatgttaacctttttgtctctcattccaatccttcatactctcagcaaggcaagcatattccaactagacccaacaaccatgctcacttcactcgctctcgtcctctttcccgctatggccctcgcggcgccaacgttcgtgacctcgcctcaacacatatctccaggaaaggatagcaaattggtaagtgtgtgcgtgattgagaaaatcttggtcatagcagcttaccttgttcgcactccttattcgtccatagtgtttggccgttgccaatcagggcgccttcaagaatggagatgctgtggtgtccgtgtcatgcgacacttcgtataccgatggccgacaactttggagagtctaccctggagactctcagatccaattgatcggttcgaacttttgcttggacgctggaacagacaactcaaacaaccagcctttgaagatttggacttgctacccaggtctataccagcagcagtggtattatactgatgacaacagaattgcgatcaccggaggcaacaagtgtcttgatctcggaccgaacggtcctcagacctatcagtgcacccccaacaatgacaaccaggtgagccttgcgcataattccaacattcttgtgtttaaattggcggtaaaagtcaccactggacactgacagcgcagtccttttcatcggttttttgaatgcttcttcccctcccctttcctcaaaataggtctggtacactcctggtacagtggctccccctgtgagcagcactaccgtcccacccatcacgtctacgttagttccctcggtgacaacctcggtcgctcctccggtctcgtcctctgctagtccttctccccctctcggtggacctagcttggtgattcacccgaacggacgaactgatttctgtctggaggctgtatctgcgaacaatgtcccggtcgagggaagtctcgttcaggtcaaagtttgcaccgggcgatccaaccagcgatttgatatttaccgaggggataatctcgtcaggttatcaaactcgaacttgtgcttggacgccgggtcaaacatcggaaacaatgtggcgctcaaggtttggacgtgctaccctggattgaagcagcagcagtggtactacaccaatgacaacaggatcgcgatcaccggcggaaaccagtgcgcggataacacgaacgggatcttgagctctgcaaacacccttcaaacctatcagtgcatcactgggaacaacaaccaggtctttaccgtgtccaactaaaaggagttggcagggttgttctgttcggctctactgtatcacactttcttttctcactgtcttgtatcactagtctatcttttcactctcatagccttatgtgtcggttaagccttcattcaagaaccattctgtctatccttccttttgcttttccaaggacagtgcacggagtttcctttctctctcctttgctggttgatcttagtttacgtccatcttttcttttctaaagaaacgaatgaaaagaggacgtccggatgtatatctactctccaatctatgccatcacgctatctactgatgatcggatgttaaatcataaatctctcttttctgctacctcttcatggatctgaaaagtctctatctctccgatgtgaaccatgttggtcttgctgtcaaatcctcaagatgagaagggaatactctcttaatctcagaagtcggcctttaagtcgctacagagtcagacgaatctgagcgaggatttggagttctgtattttcatcgcctgtcgtgtcctcctacctcagcgttctcttttaaggaagaaaaaaaagaagaaagatagaaaggaagatctctggaacaaagcctttgaagaatccaaaaaaaaactaagatcggttgaatttgaaagcgtgatacttcatgtttatctctgtactgtctggaaagacctatgtgcgacctcaattacgaaggatcaaaccgcctccaccctcatcgcaactccattcgttttctgttttaatctttgggctttcctctggacgcgaaggcttccattccccatggtctaggagcatgagcgaggtccatcttgaaggaccacttcattcggataccgttttgaatggccagaccgtgtctgtgtttttgaatcagcgagagaggaacatgaggagtcatagtatgaagacgaaaagagaagaagggaggtactagcagttagtgatgatcaacaaagaacaacagaggaaaaaaaaggacgaaccctctgatcttcttcggcttcttgggttctctagcaatgaaccgggggtcaaagccctgtctgtacttttcagtgatccattgaacatatctagaaaacaaaaagcaacgcaccaaacatggacgtccttcagattagtgtatagaagagagagggaaggaaaagaaagaccagaaaagaggtattgagaactgacttgacgtccttcgtgacgagtccagcctgagtccagccctctgcctttctagtaaagagctcatcccaggtgacctctcctttgactttgttcttgagatttcgaccggccgctcggaagaacgctgccggatctgttatcgggcctgtgaagggaagtaaagaatgagagaggagcgagaggtatcgagcgaagagagggagaacagatagaagaaatccaaagcaaccacgatcagagaactcaagcttttctcggcacaacaaatcatccagaaatgacttacctttcggttcagggatctgtctctttactttggacccgatgacgaccggagggagttcttctctgatggcctggtcgatgtgcttgaagatctttgttgaccgtgcctggagagctaccggagcagttgtatggaagctgcgtgagcagaccaggcgagaggacgaggctagcggaacaatatggcgagagagggacattgacaggatctctgggctgagggttgacgacgacgacgacgaggagagagcgaacggagagagaaagagagaaagtagaaggtgaggagagagcgtgtgcgtgtggttacacgtgtcacgtggtgtgatggctacattcacaagtcaacatggttacgattgattgatcgatcgatcgatcgatcgatcgggtaagccatcttgccgctgagtacaaagcaagcgcagaggacgagacagggcgtggaagggagcaagaggggaggaggtagagggaagcaagaaggcagagtgaaaaagacatagtagctgagagaaaaagagcgtgtgtatcttgcttcgtctgtgtagacgatcttatgcgagaagctctcgatgggaatgtgcgcgcaaagagtgcgtagcgagagtgagagcatacatgtcattgacgccagccagagcgctgaacatgatcatagagaagaagaaagagcggagtgcgtagagaagcaagaacatactcatacccacactcccataacgagctttccctcgtttgttgtctgatgtctggtgtctgtcgtctggctctggctccagctccggctctggatggatcgtacgatgtttgcgggggaaaagactagacaaattttgtaacgatcaattagaaatatcaaccgattttcctaatgatttttcacccaacactcgaacacaccggaacactccactacttctttttcttgttctcattcttcctctaccttctccccccgagtgtttgaaacgttcacctcgactatcggcttcgactttcaccctgatcattagttctactctcttctttatctttcgatatcatctcgggccaatttagtcttcaacaggcacacgagcgagtccccttctcttccttttttaaccttcacgctttctttcctctcttccgatcaaaacaaacacatgggcaagttcgatatcatcatcattggtgcaggcatcgctggatcgtatgtgtcgttttgtcttgttctagttctctctttcatctatcacattctcacgttcttcgtaatatatcatacagtactctggcgtactcccttggccagtccggccgtcgcgtactgtgcatcgaacgagacttgagcaccccggatcggatcgtcggtgaacttctccagccgggaggttgtgcctcccttagacaactcggtatgggagactgtctcgaggatatcgacgccgttgccgttgagggttactgcaccatggttagtccctcctctctatgtcatcagtcttgttctttcttgccggaccactccgaccacgtgccctaataagtacaacttacacgactttttgatcccatacttaatcccaaatagtacgacggccaccaggtcgaaattccttatccgccgtgtccatctggttctggctcgtccgccggaaagactccatccggaaggatcgaaggcagatcgtttgttcacggtagattcgtcgacaagctcagagcaaaggcacagagctcaaagaacgttgtcatgcttgaaggtctgtcctgtcattcttgtctttgcactcgttcctcttaacttatccaaaacctctctcaattctttctaggcacggtcaaatcactcctcaactgcccggattcctccagagtcattggagtctctgcttctatgaagtcggccgccaaggacaccccgccccaatcgttctacgcaccggtcaccatcatcgccgatggctgcttctctcgcttccgaccgacgaatgcgcctcccccggttgtcagatctcactttgttggtctcgttcttcatgacgcgcctcttccgatcccaaaacacggtaacgtccttctcggctcttcctttggccctgtgctcctctaccaaatttccaccagagagacacggatgcttgtcgatatcaaaggcaagcttccctcgatcggatcgggtgcgctcaaagagtacctcgaacagaaggttgttcccggcatgccttccgagatggaagcctgcctgaaggacgcgttggacaagtccgagcaaggaggagacgccaggctcagagtcatgcccaacagctggctccccgccagacagcagtcgaccggcaagaaagaggacagagagggttgcatcgtgattggtgatgcttggaatatgaggcatcccctcaccggaggtcagttctttcctcttccttcgtctgcctatctccttgccctctccattcttttcgaatctcacctcacgatcatgcttttcttgatactacacaggaggaatgacggtcgcgttccatgattgcgtccatctcacaaacatcctcgccccgtcaagctcactcccggaccttgaagattggcacgagattgcgcccgcacttagaaattggtactgggagcgtaaaaacctttcgactgtcgtcaatgtgctttccatcgcgctctacgatctctttgccgccgatggtgagttgtgttgtttttccgtgttgacgaggtcagcaattcttactgacttcctttttcttccaaattcactcagatccaaacttagaggttcttcgacagggatgtttcaagtactttcaactcggcggctctgctatcgctggtccggtctccctcctctccgcccttgcacccagaccgctcctgctgttctaccactttttctatgtcgcgctgtacagtatttggtgtatgtttttccaccctcaacccgtccaccttcccagccgtgatggttcgtctcttcttctttgtcttccctcttctcacagccaagtctcatccaactgtatcactcggatctaactcgtcttgttcttttctcttttaataggcacgtcgactccgctcgaggaaaaacagttgatggagggcaaggaaaagccacagatcgtttggaaaaagccaagtgtgacagagtatccattcctggttgtcaaaagtttccttgtcgtgagttctgtcctgtttttttttccttctgtgtgggtgtactataactgactcgatcgtcaatcccgactgaatcttgttctgtgttcggcgcgagtacagttctggacggcctgccaagtcttgttgcccgtcatgtgggacgaacttcgataactttcctttctttgctctttctttcgttctcaaggaccctatctttgtttcttgtttctggtctcttttcatttcttaatctctaacctccgatctccgatcttttccgtattttacacgcaagaccaactcacttcccctctcttctctgggccatcgctatactccttttgctgtttcgctttctgttctctatccattctcatacctcgcaaaagggatcgatcccaaagtcgattctgttcggtccgtcggtccgcccgtttgtttatctatccatctgctctactctaccaacatagatctagaagaccagaacttgtaaaataatagtaatgatactttcttccaaccagtacagaggaagaaggttttgggggtctggtctcgattggaagggggttgcgaaatccagaacgtcaacgctgctctcggtgttgatcgagtcttgttcattgtcatatctccactcttcgtcctccgcaacctgatctctgacctcctttcgccttgttgtatcataaagacaacattccagccaggcagatgtgcaagaagaggacagaataagaattcgaattcatgtcccatgctcgttccggatctcttttacgattacacatattctacatgcacctgactcttttctgaaagatgcgctccaatctcttcacttgactatctaccaagacggtcaatcgatcagttcgccaggtgatcagaaacagagaagactgaacgagacaaagaagaaaaggcaaacaaatgaaacatacatctaatcgtaatctcttcctttgcctgatcgtctctcgttcttcttttcactcctccgatctttctcgaccctcacccgtttcttctgagcgacgatcagcttctgaaccgtctgtgactgagcggtcgtcgtcggttttggtgagagcggtcttgccagactgagtagatgcgtttgaatctatcggatcggttcgttttggtttggtatgtcgacagaggcaaatacaaaggtggttaacagggcagttctcggtacacagattagagggaagaacgtgaaaggacgaaagagtttgggttgatagccgattcaaccgaggcgcaccttgtcgaagcaatcttgaaggttttcggattgtgtacggtacgaagaaccggtgatgagcagtgaattagacgaagccgcgtagtatggctatacagagcagagcagatcaacaaagtcatcacagtggcagatgagaagctggagaatgacatgaaacagatcataaggcaaaggacaagaaactagcagagatacatacagagtcacgaagacaagataaaagcgaggaagggatccaagaagcttgatctatgttgacttttaaggtcgcctttgtattgaccttagtttctcagttgtcaacaaaagtgaaagcagaagggattggatcagcttcaacatcatctaggataaacaagacatacaggttctcactttgttaacgttctgaccacctttacctcctgaacggtcaaacctgtattcaggtcgaatgcgactatatcgatcaatcctctgcatgactatcttcttttccattctagaaatagatattcactcgcctgacctcacacccaggtctactcttcgacaaccgttcccgcttgaaactctccatccagtctctcagggcgagcgtctcgtccggagggagcggactttgccgagggcctgttgagctaggtaagtttgagatgaagcgagatcttgtaagaaaccccggacagcagcgagtgcgctgagagaacgaaacaagagagatcattctgaatcaagcaagaagtagataatgagcagcctggtatgatagtcagacttatggatgtatatcgttcgaaagcctggaggaggatcgcccagttcacccgtcacgtgaccgtgctcatatgttcactcaagagcacacgcccaacggaagcgaggagagcatatacagatccttcatatcggtgactctcatctcctcgtttccctttctgggtatcccaataacgatcatggtcatggcgttaaacactatatggaacgaaggtaggtcttgtttccatctgctttgttcgttcacttgagccttgtcttggtgtctggcagcctcgtctcctttctgtcccctcgcgtgctcatgctctctcaacgataacccaaacctcacaggcgggttccagatccaagttgaaaactatcgggatagatacaaacaaacgatcgactctcatcaaaccgctagctatgttggcgccagatggatcgataaaggaaagggaaaaacagtgatcactattctcgagtctccatcggcaagtcgaccgataggcggcaaccaggctcgaccggaggagtttgtcgatcgtccagatcggaaccacatgtcggatagtcctaaaagattagcggtcattagcttggaagacataagatggcatcttgtcctgaagggtgatgtacatgaaggttcgtccgatgccacttgtccggtgagattatccttaatcatgccaatctgagcctgctgacgttatcttttgccaggcctgtattccataccggtcaacggaaacaaagacttcgacttggtcattcggaaggatggaacgctctcagttagatgtctgggaggaagcttccagaacggcgtgattgaagctaccgtcaagatacctcctcttcaaatcccgtgggtttcccaaaccctcaattcctcagttcgagacgaatggctaacctcgaggtctcatctccttatgcatttttttctattgcatgaatgaacatatggaaaactctatgctctctttgaagatcctctccaccagataccctgaccgcctgctctgccgttccctccgacccatcgaccgatactcaacctgatctccaatcgtgccatgctctttctcctaccgcatctgagctgaacacacctccttattcagaccgttcatcgaagaaccacccacatgtttcttccaatcggccggcctccaatccgtatactttgtccgaaatctcaccagatctgatgatgctcttggaagaactccgagcggatcaacgccggattctgcagaaagaattccaactggtcggcgctgggttcgccgaaaggttacttagcggaggaagacgtctgatgggcgtgagcgagcctcaagagtatgttatctactagtctctgatctattcccttttctgttatctgtcatccatcgtgcgcgcacaacggggctgattctaaggacgacgatgataccgaatgatgacgtctcctctacagattcttatggatgacagcgctgatcaacctgctggtgatacctacgatcctcttggtgatctatatgtataactctcgtcgacaatccaccacgttcaccaccttgtttttttcgtcttatgaccgggcacgtgaacgagtccgtcgggtccgtggtcgtgtgttgacgacgcctcctccttccatagctgctgtcaatttcatcactcccttctcaaactctacctccacctccacttcattctctctgaaccctttgacgttacctgtcgctggacccagcatttcctctttatctatacgtcctgttcatttagaagatccaacttcgttcctgatagatcgggtcccccaatgctgtctcgtcagtcctgacagagaaggagtgagggatgatgttttgcccccgccgtatccatgggaagaaagttcgccagactatcttagttgaccagggtttcttctatagattttactttttatattgtgtatttagcctttgttgtcttgcctgatacttgtatgattgatgatctaacgacctttttgtattgtgatctcttcagttgaggttgctctcaaccttgcttgtattgagatccagtcacgagaggatgtatgttgatcgatagtattgtaatttaaaaaagggaagcaaaaccgaaggtaggtgggtagtaataaaacagagttctcctatcaaggaaggaaagtgaagaaagacaaaagagacagagcaaggtaaatagaaagagaagccagttccttttcggtttctattaaacctcctgggaagcagcggccttcttgggctttccagacttggccgggagcaactcaggctggatggaaggaagaacaccaccttgggagatggtgacgtgtccgagaagcttgttaagctcctcatcgtttcggatggcgagctgcaagtgtcgggggatgattcgggacttcttgttgtctcgggcggcgttaccagccaactcgaggatctcggcagagaggtactcaagcacggcagcgaggtatacgggagcaccggctccgactcgctgggcgtagtttcccttcttgaggtctgggagagagattgataggtaagtgaagatcctttggaccaagacaagggcagatatatatgaacgtacgtcggtggattcgaccaacagggaactgaagtccggccttggcagatcgggaaagggtcttcttatcagtttcgactcctccagcctttcctccagactttcctccggctgactttccagacctatgatgagcaatagaaaacatatggatcagcatccagaaacgaacgaaagtgaggttcaagataggcaggaagcttacattgtgataattaggtttgggttggggtggagttaaagaggagttgttgtggtagtggtatggcaaagaaagtatggatgagagcagaagttgaggttcaaagtcgagagtgccgggttttatagagaacatccgacgcgtctgagaaccttcacaagtcgcgtcgtggccaaaaattgagacgcgtcttggaggtcgtgttccagatacactaccaaacctcattaaatattcatcaacgcccaaaaaatgatctgatcgatgcaaaatttagctgaggacgagcataggtaagttcttcatcaaaacgtcgcttgaatggatccaaaggatgcattcaaagaggagaaagaaataaaaaggcaggttttgcaacgtgtgtttccggatgtgacgcgtctcctgtcgatctatataagaagactttctttccgtccttcagtttcccttcctcccctcttccttcatcaatccaactttgctctctccaaactactttctcagccaaccgtttctccccactattcaaccttaaacaatcaaaatggccggacccgcttccaccgcttctaaagcccgtgagttcacctcgttctgttcccgttctaatggctttgagtcgtcgaactcacgcgtcctatttgcttcttttttctttcagccgcctctaaggctcctgcttccaaggctcccgcctccaaggcccctgccaagaagtccactacttcgaaggcccccaagactgagggtgacaagaagaagaagtccaagaaggtacgcaatcaatgcttttttaaattcatcacttgcgaactcaaattgatcacacctccttctcccaactctacagagaatcgagacctactcttcctacatttacaaggtcctcaagcaggtccaccccgacactggtatctccaacaaggccatgtctatcctcaactctttcgtcaacgatattttcgagcgagtcgccggtgaggccagcaagttggcttcatacaacaagaagtcaacgatctcttcccgagaaatccagaccgccgtccgattgatccttcccggagagctttccaagcacgccatttcggagggaaccaagtcggtcaccaagttctcttcctccaagtagagtgccggtccctctggtttcttctttctttttttacatgacctgtcgatatctttgagctctttgctattgataccacagtgtgcccatctctcccggaccctctctttactggaagcttttaagttttacctctaccttttgttgttaataatatgaacatttatgtgtaatctatttcaatgtctagatctagacatgaatgtgagaagacttgattgagacagtggtgtccggtaacagctcggtataaatcgtgttcgtcatatctgaagtcgatcgggcatgatcgataaacgttctgcaaaacccgcaaatctcacgtgaattgttacgagcaaatcatttggatatttatgatgtacaattacttctatatgttgaatgtcatcttttcttcttgttgtgtgttaagcttgggcttgcgattcctgctgcatggcgacaatctgagccaaacgcgaagacaagagaggacatgccctgatcaaccgctgagaaacgggtagctctagtggatgacagattcgtattcacgaacctcgagtttcttcttctcagatcttgtcgagagatctgcaagcgtcttttccacacgtacgctggtagtgtttgatacaaaggataaaggagaggaataagagtggaaggcaaggtcagtcctgatgattacatgctcatcaacggaaaaaaagacaagaatatgcagactgacatctcgctgttaatgaattccagtcgtttttccacgttcgatttggcctcagcctgttcttgcttgaccaagctgggtccaatcattttgtagatagtattgtgaggtttaagcacggcaaactccttatgcatgccatgaagtcgttgcagtcaaacagagataaatcaaagatcagtgacactcgtacacaagatcgttgtcatcaatctgtaaaactcgcctttagtacaccttcattctccgacttctgactgtctagacgttggcgagcttccacagcatttgatagatctttgtcccccaaacgtagtggatttacccggatagcaacacacagaatagcattttgtaagatgcatcatgtcactagccaaccaccattaaaaaaaagaggcaacactaaccagtctgcagtttttgaaactcgatggtagactcttctagccgactctctaaagactttgtactcgacattaccgctcgtgaactaatagaggatggatgccggaagatgatgacgatcaacaagtctgaagagaaggagcgacaacgaatagcaagagttgtgtaaccggccaggtgaatgttacatacacgtgacctgtgatctgacctcggccgacagctgccgatcaaatcggagccgagattagatagcgaatttttggccgaatttttcggagctccttcgaaactctctgggaatgtttagcaaacaaatatcgtctatttgacacacatccaacatacgtccaacacacatacattctcacaacctcgtagtctgtaccagtgatcgcgagatagcaagaatttcagtggggtctcctgattggtctgttcacccaagtttgattggtatgtgggtcaatttctcacacttctgaaattgaccgatgtggactgatgactcgttcaacatggttcgttttgactcctccggacacaagtcataaatagatcgccttttttgagcgtgccacccacccaactttcgtttacttcgacaagtcgtatagtgacttgcaatgaccgccgcaaaagcatcatccttagcagaagagagggatctcgagagtggatccttgaaggcagtctcgggcagcctgacagcctcgaatctgattcttattgtatgtctttatctcacaattcacttttgcgacgcgcttcgtccgcacacttgagctcatacctgatcacctccttgtttttcgaatgttcacctgcctgaacggaaacctaatgacagtttgccgtcagcttgaccatgattctcaatattatgaagtaagtccatccaactatctacctctccgtcttttactcttcacatgattcctcagcgccgctaacgccgcagcattgctccttttccatccttcatgtctcctttctgctagtaacacatccatcaacgtcgcattaccatctatcgccgaagaactcggcatatcccaagccgatctccaatggccagtcaccgcctacgcccttgctttcgttcgtctccacacttacattcttgaaggtctgtttgacgatcgttatctgatgtcatttcacatattatcgttctagggatgcctgctgttgctttggggtaagctggcagacttatatggaagaaaatatgcctacctaggagggatcgcatgcttctgtatctttgtacgcacatcggggttctccgtttcccgtttagcggaagactgctttgatggataatctaacgacaccgcggtttcacagaacatagcggctgccctttcccaatctctcatacaaatctcaatctttcgagccctccaggtatgtccatagacctttgtcactcaagaggtcacctcccaactgatgtcgttcttctctcttctcttttccgtacactcgggattttgatggaaactcatagggtgtaggcgcagcagcatccgttcccgccgctgccggaatcatcacggagaccttcccacctggtactcgtgctcggtcgctcgccttcgcttgtttctcggctggagctcctatcggttctggctttggttcaatctttggaggtacgctcgcggctcttacttctgtttcttccttaaaatttattagactcgcgaacattgattgagcaagttggttttcacgttttaatctgaattgccaaccctaggtgtctttacacaatattcgcctgcgtcctggagaggtgtgttttggttcacggccggtatctccgttatcccttgtgagtacttgctaccttgatagataacagttcgacttattcgttgaaaaatagatggaattatcagctgattgtttcaacgattcgtcttgaacagtcgccctaggtagtatcttcattccaaggatcaggttagacccaacccgagacaagcgagtggactggcttgggggtctgctttctacatctgggttaacccttcttgtctttgccttgagctctggaccctctgcttctaatggctggaagactccctgtaagatttattataaatttcttggtctgcgtcgaaatcattttcatctgtcatcaggcttcttacatttgaaaatccttcactttgactttcgcattcgattcgattcctgttttctctagatgttcttgccactctggttctctccatcttattaattggagctttcatagcttgggaagatcttttggtgcgatcttcgagattcagtctgaaaccgttgatgccattggagatttggactcggggtcggttggccgtcaatttggccgttgtatttgtcggatggtgtgctttccagccgatgctttaccacgctacacttgtgaggctcctcttcactcgtctgtctcatgtctttgcaaagtggatgctgaccgacggagcatcatactgcttcgattcactatctcggcctcttttgcctttagttcttccaagattaccaaggtctatctccaatcctgacaatgattcgattccttcctacagcagtgtccggcattatggtgtgcttggtgttcacactggtcgtaccttacgtttacggctggaccttgctcaccatcgggtctctaggagcatcggtaagtctggcttgcgcttccatcgcatgatgtagctttcctcaaagtccaactctactaactccctgttctattctctttttcagttcgccgccatgtgcatggcgctttgccggcctgaggatccgtactggcaatgggctttccctgccatgatcattagcgtttttggcgctgatttcatctttgctacgagctcaatttagtaagtcgtctttttctcagaaacctttcatagagttcattgctgtagctctccttcataatctcgtcttgagcatcatctgagatatcatctgacgatacaagattatttccaccttgatttatagcgtctcaagcattgctaaacctagtgaacaatcactcgctgcgggaatgcttcaagtcatgatgcaggttcgtcatacacctcttctgaatcctttctatcttttgtatcgagaaagagaatagtcattgacatcaatgtttacctctctcgaaccgtgttttcatctctagcttggggtggcaattggactggctgtgactggagtggtgaacgatgcagtggcttccaagtcatccatatcactaggtgtcatacccgatagtggcaacagtaacatccctaaggagtctcttctcgaaggtcttcaagctgcccagttagtatgattttctttcttgttccttgaaccgcgtgttcagttgcgttctatcttatatctgagcctgaatgtaaactgactactcaaccttctgattccttgtgctgttactaggtggactgctttcgcctttggcatgatcggtgtgatactcacagtcaccctacttcgtcctattcgagtcataggcgttcgacgaaccagtaaatcgagatcggcttcagaaaagccggatgctgtagaacataaggagacaagcgagcgcgatggagagaagcctctacattcagccgcagaatcgacagaaactgttgtcatctcgagggatgagatacctgtgttgggtatggttctgaacgaaaaggagggacaagaggtcaaggaatcggtgtattatcaaaaatagagacaaaatagactataataacataaaaccagctacggaagctgtctccactcttttcttttcaatccctctcataccataattattacacacttcctgggccatagtattgatgataaatgaatttaagaagttctggtttagatcgttgaagtggactgtagtgagtgatcacacgatgggtagtcacccttccaccgctgatttccatatacttacttgcttactcggccactcggttattcttccctctttcgacatccaccagatcaagaaattacgatgtcgggacccaacaccttccgacctgttctaaacccgttcttgacaaaacagatcgggaagaacaagtttcctctgataatgacggcgcgtgaagctttgtctttgtccgttcacggccatcctccttacctgctttgaaggttctcaatacgtctcatccgtttcactaacgcgatcctgtgctttcttcgtgatcatcaacagaggtcgttcgagaaaccagcttgatacaatagatacttcttcatcaagctctacaataatgcgtacgtcttcagaccgtgtcgagtctgatttgtccgctggatttcatgaggatggacaacctggagagtgagttgagatagaaaggaattcagattctgactgttactcttgcgtctgggactcgaacggaactttggacctgtataacaaacagctataaaagtcgataaaccaccttcaccgcctccgactgccgaaggaatgttcaagctggacgcagtcaccggaactctccccattaaaggcgatcaatcttggggatacacgctggacaaggaaatgaaagaggttcgtacttcctgttatcttttcaatctgttagcccggtcatgagagcagtagcttgaactgttttctctgtacatctgtcttgcagttttatatgttgaaagcggcagtagcaaaggagcggtataatgcaaagttggaagtatggcggaacggattgtccgccgtggatcggaagaacttgaagaaggtagaccccgaagtgaacaagttgatcattgcaagaccctcaaaatcagcatcgtgtgagttattgtcacacattttcactggcgtctcctagaaaagaagatcaagaaacaaatttccatcgacatcgctctatgtaaatctttcgatgatgtacgcatgtactaatcccatctttgactctctggcgccgccgttcgaacattggcagtgggtataccgtcgctcgatgtttcttcggatatctacccagattccaactcggattatttggtcgataacgtttcgccaaagtttgaagaaattgaggctgaagaacaaagcgaaatcaagttgtcgagccaggcgccatctaccacagaactaaaaaagcaagtgattgcttccatattggaaaccgaagaacttgcgagacaatctccagacgccaatttggcggatactgaaccaagacctgcatcatacctgacatatcgacatctgctagacgggaaagtcgggaaacgatgaagatgccatctatgttgctcagatgaattgttcctctgaagcaacgctttctcgtatctagacatctagaagccctctcttctggccaccgtaaccttcctgcttaacatttagttgattatatcctgctgttccctcacacttgcacatacgcatccctcttctcttcattctttgttctggccatattcttcacctgcacttctgctctctagctataccttatatatgtgtacaaacggccatttctatcatgatatgacaacatcacatttacaatctcccacattctcaagtacatccaaactctaatccacagtaggctgggattttctacgcgcaaagacgtgatagtggggaagcaactgcacgcgtgtattcgatgagtaagagcaacgacggtcaggttctgaaagtgggcaaagttcacatgacgacatcaacgaaccttgacgctctgaagccttggcgggttgaggaactgatatagaaggggagaacatatatccaaatgcaagagagaaatatcgttagtaccttgtgaaatacgttttgtttgaaaggcttatccttaaagatattcgagattcataaccacccacccagatagtttctgtttcgggccatataaaagaagcaagtcgaatccatatcagccaggatagaacaacgacagcaaagaaggacgaagatgtcgagaaggagcacgcaccgcaatcatcaggattccatctatcgttaacaaacattcccatttcccaacggacatcaccttccttccctctgatccctcccttctcatcgccctccactccggtaaaccctgtgacgccatcctgttcaatctcgggtgtcatttgagatttggaaacgaggggtaagggagtccagatcaagaaatgggtgaccgatcgaggtgtggagtaaggccagtctgtatatatcaatcattataacataatcaacaaataatttgaggaagacatagtatgaaaacggcagaatataccattcgcaatgatacaaaatcgagattctggagtagaccgatcgaaggactcgtccggtttgggtgaagacttgtccacgaaaaagactcgcttattaagaaggtaagattctgtggtacggatgaatttcgacaagggaacatacaaactccccggcgatacaggacgtggtcagtcaaagacgtggatcgattcatttatgtgatacgtctaggaggagcgtgagtaagcttttgatatcccccttttcaaacgcctctctccttctcctctcttcactcctcggatagaaagcggtttcgattacgaaaccaaaacaaaagtggtgcaaggagaagaagaaaccagtcgaaagaatagagagtaacaaacccgttgatcctccaaaatcagccttcatcttcaatgaccactcgtcatagatcttctgtagttgcttagggcgtttcaagagcgccaagtccctgtgtcatttgatgtgcatccaaccagccaccatgtacgagagacaatagtccggagtgttttagatctcgatcatctcactcaaagaggaagaagaaagatctccccacccgatcttgataatttttttgagttcctcccaggtgaacatcaccgggtaagattcaatatcctccttggtcggtaatccttcgatgtcagaaggagcaggatgaagctttgggccaaacttgatcgtggacgaataaggtagcgatttcgagatcgtcattgtttctgttgatgatgggtgggaaacagcgcatgatgaatatagaacttgtccacattgaagagtttaaggttagtaaccggtggaagccagggtgctcgcgaagtaagttcattcaagatacagttgagtttgatggaagaattggtaatgaagaagaatgaagagatagatagcaaagacacagagccatagacaatgataatctagcagaaacaagggataaagggaagagctgatggaacaagaatcagatgaaccacactctgattgaaaaaatcctacagggacaaaaggaagagaataacgctgatgctttttaatctacccctcactcatttaagcataaagatcatcatctccctcctcggcctggaaagcagcattgccacctgcagtagctgcgtcagcccctccgctgggcgctcctccctcaacacctccctcggggaacttgaaagacgagccaaacgatctcgactgctgaagcgtctgggcgaacatctcgtaccgtcggatatcggcatcggaaacggatcgtcgagcgtacatcatggcctcctcaaagtgagctcgggtgatctcgggaacggggtcctcctcatcctcagcttcaggggcggcgctatcctccataacatcgtccgcaccttcggcctccttggcggccttctccctctcccgtcggatgtcgaactcgatagactctcggatggcaagcttggaggctctctgacagatctcagtcagatcggcaccggagaaaccgtgagtggccttagccaagaaagttaaatcgacgttatccgcaatgggagacttcttgagagtagccttgagaatagaaattcgagaaggctcatcaggaagaggaatgtagatgagctgatcaagacgtcccggtcggagaagagcaggatcgagctgatcaggtctgttggtagctccgatgatgaacacgttctttttgcttccaactccatccatctcagtctgtgatgaggtgccagtgacgaaattagcatgagcgatacaagggacattgacgacacaaaggatagacgtactagaatctggttgagaactcggtcgccggcacctccagcatctcctccagagcttcctcctcgggacttggcgatggaatccaactcatcgaagaacatgacacaaggggcagcagcacgagctttgtcgaagacatctcggacgtttgcctcagactctccgaaccacatagtaagaagttctggacccttaatagagataaagttagcctggcactcgttggcgatagccttggcaagcaaggtctttccggttcccggcggaccgtagaaaagaacacccttggaaggagacattccgtatttgaggaacttttcggggtgctcgacagggtactgaacagtctcctgcaactcctgtttgaccttctccaaccctccgatatcatcccacttgacattgggaacctcgaccacagtctctcgaagagcagaggggttggaaacaccaagagcaaatcggaagttttccatagtaacaccaagggagtcaaggacttcagcgtcgatagtatccctagaacaaacatataaaatctggtgagagtctgacatcttgtaattataagcaccatcatggagactcactcatccaaatcaatgagatccatcttctctcgaatctgctgcatagcagcttcagagcaaagagaggccatatccgctccaacatagccgtgagtatcggcggcaatctaggataaatgaagactatcagcgtcgagataggaatcaacgaaacttggatgagcgagccttgactcacttgttcaagatcaacatcatcgccaagcttcatattcttagtgtgaattcgaaggatctcaagtcgtccagtgggatcagggattccaatatcaacctctcgatcgaatcgaccgaatcgtcggagagcaggatctatagagttgggtcggttggtagcagccatgacgacaacgttggatcgggccttgagtccgtccataagggtgagcagctgagacacaactcgtcgctcgacttctccgttggtctgatgaagatgacgtaggtgaacaattgtaaggatgtcagttgcaatctatgtttatgccaacttgatcagaatgtgatcgcaccttgtctcgcttaggtgcaatagaatcgatctcatcaatgaagatgatagccgggctgttcttctcggcctcctcgaaagccttcctcaaattactttcagactctccagccatcttcgacatgatttctggaccgttgatcaaaaagaagaaagctccagtctcgttggcaacagctcgcgccatgagcgttttacccgttcctggaggtccaaacataaggatacctcgtgggggcttgataccgattgacttgaaaagctgagggtgtcgaaggggaagctcgacaagctctcgaatttgagccatctaggaacaagatgtaaggagtaagattaataatcgagacaatagcatgattgacatagatcaaagattaccaacctgctttcggcaacctccaatatcgtcataaccaacatcggccaagttgttctcctcgtcctcacgctttacaggctctccctctaaaacccgtgcaagttgagcgtaaagaattagtcagtttgtccagcacgacatgaaatcgactctctatacaggcataagacacataccagtgtgaatgacggtatcctgagcgacgatacaaaactcagagggatcggtctcgatgaccttgaactcaacagttcgcatacctcctcgaacgaggaaagtgtctccctttcgaacaggtcggtaggctagtagggtacacagatatcagatatggttgtagatactacagcgtgccagaaatatgacttaccctcaaggaagtaaggcttgagataaacctcgaacaagtttccagtgagacctgaggaggaagaagcagtatatggttttaactgatagacccgagatgatctcaaaacacgacaaagaatacataccctcaaccgagtcatcgaacggaaggatgtgaacacgctttccgtacttgatgtcaaggcacgcgtgaacgttgcagagatctccaagcttaactcggaggttgtttcgggcgactgtaagaaagaattcgaaggtaagaatgaggcctacttagaaaacaacacacgtcattgattcaggtcttacccttgttcatctggatctttccctcatcaacatcttcgctcgagagacaaataagaacggtatccttgcgcttctttccccgaacgatgacagtgtctcctcggaagaacccaagggtttccatagtggcggggtttagtgtgcagacagagctagagacaaccatggaatcagctagtttcttttacttatatttacccaaataggcgtctaactcacttatcatcgcctaaaaagaagggagaacagaaagccaacctatcaatcagtacatgcaagaagagaaagatggaaaagaaagcagttgagatcgaaaccccgagaaaaaaatgcacctgtcgattcttggacaatcaatcggttagggctaacacgccaaacaacaagcaaaaccacacgtcaagacgttcagcaatttttactcgttggaaacaaatttgttgagaagtttgagccgacctctttttgggtcgcaagatagaagtggcgaggtcatctgcgttctgggcggcggcagcgtcagccatgatatagatagagatggggggttgggtaggtttctgtttttggtatctaattgggttctttgtttcgcgtacgaagaaggatgtctaactctcaaagctgagcagccaaaatacgacaaagacaaggcagaggaagaagtgatgggtggtggtgaggaggaggagaggaaggaaaggaagaagtgttctgttctttgatgagcagagatgagatcgacgccttccacgtcgagactgggaggattacataatcgttgtgatcacgtgtttatggctgtgttcgatcgcaacctgaagtagcctcgatcgtcatcaaccaaatgaagccttctgagaaaagaactcgagagttcatctatcgggatataaaatcggccaggcagttgatgagatttgaatgttaggtcgaatggctgacgatatatctcattcatttgttcttttgggactttcgacctctagaaactctgttattcagtcttgcgctcgcggactgaattttcatcttaaaaagcattttcttgcacgtcccctttgaacgtgcgctgctctacccttcactgtcctcttagtttctcttatttgtaagaataggtctcaggtaggtttgtgttgttcttttcaggttaacagttttgtagacctgagcagcttatgtaccggcagacgtccttctagtcttcttctagttgttcttcctcccttctaggtttctcacgacatctgtcaaaatcatatcatcgtttcctctggcacaccatgagcggcgcgtatgactatatgttcgttaattatcatggtttgctggccaaatttttatgatctgtccatcgggagcaatctagacgacattggggaattacataatcagtcattccgtcattatcagactttatctagtccgattgaccgtccgctctactccctttatttgtatctgttctgtctgctcacatctacaccagagaaaaacataaacacaacctcctacgatttgaacagctttttcgcttaactgcgaagagtggagtggatggagaggtcggagaagaacagaaggcagcagagctgctagagttcccttgacggtcgtttgtcgttgtcttatcttatctatgaataggctcttgtattgacccatcccttgtccataccatgcttcttctcatcgtcttggccaggaaccctctatcgagagtgtcttttttgctgataaaactaagctcaatagcacaaaatctcgggtgtatacagtcttgttcaacaaaatgataacgacaaaagagatcaaacaaagcattgatcttctctctgccgagtcgagttttaatctcgctatccatgtgatattcgtttgatggttgaacagcgctcgacccttgttctctatttatcttttcgatcctatccatcctgtcaacccctgttccacattgctgcaccatgtttgtgctcgagaggcttcttatataacgtggtcttggaacatcatgatcgcctgcgtcgcagctctcctttggtgtatcttcattccttgacaaaaacacttgtccgtctttcgggctggaagctgaaaaccgacgcaactcaagactgtagccgctctacatcaacaaatacttgtgttctgtggggtaaaaattggcgcattgtcgtcttgtaagaccggaatattcctctccttcgtacgttgaggaggcttcgaaagagcggtcgagcctcccgtttgctcggcagcgcttccattctaatccttcctcaagatttccacatagcggtgtcaaagataagcacagagctggcttccggattgatcatcctggctgatgctgtcggactcgaaagccgatgattgtagatttctaccgagtttcatgcggacttttcgcttggacaagtgagaaatagacattgcaccatactttgtacggaaacactatccagcacaatataagtacaggaagtcacgtaagcaggttatagggtgataacgcaacttcagagtcggtccaatgtacagaagaaacagcgatggagctagagtacacgacatccacaagtacaacaagaaagctagaacggaatgggaatgtgttcctacggttgaaatggactggttgataaggaaaatgacaactgcgacatgttcaaggggagagaaaacatatccccatcaggtgaattgatagagaactggagatcagaaggacttgcgtgagtttgtagtgtttatctcgagagtgtatacagataaacagagactagatgaaaataggcagcaaacgaaccttttctgacaagcccactgagatcacgttcaccccatcgagcccggtcacacaacatagccatcgcgagtgcagctagtagcccatcttcaaacgggatgtacctcggcacgcctggtttcgatcgaagggagatatacatggaggatagacctctgggcagaacgtacagcgccaattcaggtcgacggccctggacgaaggaattgaacagagaaaacaaaatgcagcggagacttgttcagaacaggtaatcacaacggaaacgatatgaatctgctcacctttttctcaaagagaagagagaagtgtgtcaagaagccggccagccagaagtaccgtttggagttgataaatcggcgcgaccagcctttcgtatatggatatacgaccggctgcaaacaaattacacctggttgacgaacaacaggtttgaattgatcatcatgtcgtgattggaaggtgagtcaattgacgagctatcatgaggccatgtctgctctagctgtgacagagactgaccatggtatataacgacaaacatagagagaaatgttccactacgcatggttccctggaggtaaagattgaaggagagcccttcagatcagttggttgggcggtgaaacaacagagagacgtagttagaaatataccttgactcctctccaaagcgttaagcccacctccctccagttgataccaggctttcttcgctccttaatggcgtacctctccttctccttctctccgttccatccgtctttctcgggcagaatttccaatgtaggagttgcgctgacttggaacaactgggctcgcttaaggatcagcggaggaatcagatgcaaggcagagtatatcgggagcatatgttggaacaccatgaagaatcggttcacaagcataggagtacaatgatcgttcatcggatggaggattgctctgtggtttaaaggatttaacactagtgctgcgtcaaggatctgagaataacggaagaagggtgagattaaaatggtcggacgaacgcaggcatgcaacttcccatttctccttgaacaaccccgttcgtagccttctcaagcagttcctcgatcgtctttcttgccaaaggtgtcaaccctttgcgtctggctaacaatttgtgtagttgatccgctgggatagtccctgtattaacgagagagccttgaataatccgagcctcgacaggaccttggaatgcgccgttgatgaaggatacgtatgaacggggaagccgttcaggtgaaacctaaggtttgtcaaagtggtagaatagatggcacacattaaaagattgatacttcaaaataacaaaagtagtgacgcacgatccagttttgcataatctgtcccgcacacaatctatcggacaaagttgaaatatcaatatggtaattcagactcacagaattggcatgtttgtcagggatatgacttacccgaaaagaatcaattcacctcctggaacctttattccaaaacgtctgctgacgccgttccaaactccttctagacctcgaaccagtatttgccttcgtgaggtaatgccgagatacgagagcgttctctgtcagttgattctttcaagaagactatctcgaagggtttggcaggaaatatgtacatactcaatcacacttctccgctcccgctctttcctttccaaccagtagattgcaaaaccagccccgactgctccagcaaatgcggcatgccatcttcgctctccagcccaatcatcataagctatctccggtgggccaaaaccaggctcgtcgctcaccaaagtgtctagcccatcctctaacatctcgaggtaagactccgatcgactagtggatcggcgcagcgaacgaagagagtgggcgaaacgtttcttcaagtaggatgctgggggagatagtcggagggtgtgaagaatgagtgtatgaagaagagtgaaggttgagaaaagtagagaaagtcggagagcaggtttgtaaaacaaggaacgaattaagagggaaggttgaaattttctgcagagcgttgatggaacggccggccaaccaaccgaccaaccaaccaacagacagtctagtttagtgtctgaaggatctccagcgaaacaaggattggagctaggctttcaaacagaccttgttcgtaagcatctgaatagatacagaatcaagtttactccagctctaagcccataggcggacaggaagctacctgatcaccctcgtttccccaagggccaaaggacgaggatcagagatgaccaagacaaggcttttgaacgagacagagtggttgcgctcacggatagacagtctgacgctcaacaccatcactctttcccaatctcctggtctttttgggccttctccagctggcctccagacaaccccagtgacaccttgaagcaactcctttgcctcacttcgcctttgttcgatccgaagcattcggtcgcgcgctctgatttcagccaagcgagcatctgcttcctgctctgcgttcaagaccaaagatgatgagagagcagagtattctaggacaggagatgatagagttgagggatcgttcgagggaggggaggatgctagagagaagactgattgtttagcagtggagctcgaagtagaagctagaggagtagaagtctttgtgaacgaatatgccgatggcgacggaagagctgccagcgagagaaaagtgtcaagagatgccaaagataatgttcgtcgtatatgagcagcagctctgaaaggagaaaactccagatcaagtcaacttctagatgaaattttacccaaccgacggccaatgatctacaactcactcggataggttgggcgttcccgggtctgatttacctccttgagcttcgtaatcccattttgcttgttcattctcctcgtatctatagcgcgttgcatcatcacaagaggcaaatgtttaggcgagtcattcgatcatgagagaacccttcaaaaacggacgactgacgaaataggtttgagtggagtaagaccgagggtgctgaacctgactctagagggtgacctccgagggggaggaatttcagagttttctggaggtgccataggaatctgaatggaccattcaccagaggaatcttactacccagacgtgtagaaaagacagatgccaaagtaggcaagaaagattgaatagatcgttgttggtagaaagttgtttgttatcatcggatcagtccgggtgagagtataaccgagactgtattttgtggggaagtcttggttggggtaaatcaccatggtaacgtccagaaacaccgtcgctctgtagcctatgtgtatatgcttatatgcatcatcatcatcatcatcagccatacaaatacaaaaacacaactagacgatattcattctagaaaggatgctgttccatttgatgttgaccaaaatatgagggagagaatataatataccaaagagcggaggacaaaaaaaggagtgaaatcctgaatcgatcattctagtgtcccatctctatgcgatcgtttgtctgattaagctctgccgaacgtcctctgcataaactcctttctgaatgcttccttaccggtggtctcgacaacgacctcgatgccgctctgagaaacatcagacttaatctcatcagacgactttggcttgatccctccgtgtgttctgatcgctagatcggcctcctccgtccctctgtagcaagtaaaagtgagaaagataacaacatacaaaacagagcattagatgaacgacccgctttgtcatgtaatcaagagtaggtcaaaggaaatcccaataacagactgaccgtcgatcgatcacacacatccctctggtccactctccttttcgctcaacctcaaactttcttcttcgaacgctaaatccgctgtctcctctggcaagcgctaccgcaacccaaacgaccattgggtcatgcatctccatctcgtccggcaagcctaggctactatagatctccttgactcgaggaaggaatgccgaggtatacacgtccaccggagattcaggcgaaggtaggagtaattccgggaaagggaccgcgtgaggagttgtgacgtcgagaggaagaattgtgaggtggaaaggatgagaagaccgggaaggagaagaggcgtcaaaaatgtatgctccggcatacggatcagcgtaaagattgaattcggccgaaggagaggtgtctttggtggagatgaagaagctaatgttagttgtctggatagaaaaagatggcagagaaagtcatttcttcatgactcacttccaggaacgtccaaagcggctcccatccatacgacttgcttgaccttcgtaaagatctccgggttggccttgtgtgccaatgccaggttggtcactgttcatacagcaagagcatgtcaatctctgatcgaagactttggacataattatacgtagatacgtagactcaatagattaggagaacaagacagagaagtcatagcttacaaggcccaagagctacaatagtgaccgtgttagcgacttccttctccaagacctcgaggataaggtccgaggaagccttagatgatagctcgagagaagcggggaagtatgacggaggaggtataagctctgggcgaatctcggagatgttggagagtccatctggtccatgctgcgagataaagtgtgcgtataaattataaagaacacagcgaccaagaggaacgataaatgacctgaaagtcagctccagtgatcactttccatcttctgacatagatctccgtgcgacttacaaagtaggaggcggtggcaaactctccgtcaataggaagtcgtgctccttccttcgatacctggatcttttgacgctgagctcgaacgagtccaggccatctggtttccctcaaagtcggctcgacggtctctagttgccgctccatcacatggaacgtcttgatcaaatttttgtatacatgttcgatcgttgtgtttccgaacacgggtgttaaagcgagaatgtcgagttcagaagaggcaagtgcgtagatgagagcaagtgcgtcatccactccgatatcgctagataatcacgtataaaaggagagataggtaagctatggctctgtatgtgtgtgtctagacatgagatcttgacggggaaaaagagagagaaacatctcttacagatcaatgatagtctttgacatggtaagggaagaaaaacgatatgaaaatagcagatagcagatggtagatgggtgatcagaagcaatgaaaggagatgaaagagagtgtgagagacgagaaggtgagaatagataacggattccttctttacgccaaagttgttacactttaatcggtcacacccccgcacgtccggttgacaaatctccgccgaacttctcgctctgttttctcatccctccgtgatccacggaggacaacatctaagggctgatcatttggaaatcatgaagacaagacaagacaacatgtgatagagctagtatgatccatactatgaccaacaagggagagaataaaatcgatcggctctgttagatgagctgtttggaagttttacactattctatgtgtcttttcttgatcgcctacaaagtgaacacaacacggatctagttaggtcgagcactgattgtaaacaagacctcctttccttttccttttttctttcctccggacatcggcggaggcgtcacgctcacgtccggcgtgttgcttccagagcctgtcggcgacgatccccaggacgacactggtgcagatttctctccggtgattcgcttgattgtttctgcccgggcacttgggttcgaaaacagagccttcttccgtgcggccagctcggcagcagccgagttggtctgcaacgacgggaacgcagcgtgtgagaccggcttgggggctttggccggtgttcgggagcccgtgccagacgtcgaagacgcatagtttacagagacgggcgcaggtcgggatgaagatgctgacgaggccacgggaggtggtaacgcagggaatctatctgaagacgtcgatgatttttggctactggcccatgcggttgaaccaggcacagtctttgcattcgttggcgtcggccgtgctcgagaagcggacaggttgctagccaggcttggcgggttacccgctgagggccgagagttagaggacaaagcctgtggggcagggaagtcggacgcataattaattgctccaggcttgatcacctgtcgtttcggagcagccggaggtcgtagagtggcttctgcgctctcgactcgatcccagacctgtcgagacgaatgacttgcagtgttctgcttgactttgagagccttagcgttgacgttgccgttaacggcatgggtacggtagcttgaaccggagccacccataggctgatcgattgaggggaaatctcgggagtactacgggtttgaacgcaaagaatgttagtgtgagctgcaaagctttctggaagcaagaactgcatgacaccctagagactgacctcgttaccccatagttgaatctctttgttcagggtcttttgccgatcctcgtcggttgagaggagtaaggacgcaaccccgctagcaatatccattgtcagactgacatccctatcaagaatgttgaagattgtgtctagtacgtctcggggtccagcctggccggttttgtaggcctgtacagatgaagtgaacgctgcgtttttagcgtccgatcgacccaccaagttgtacaccctggtcatgaaagtagagtgtttcctgtgtatattgatacattattattatggttgtttgcaaatatttcacaggcagtagaaaggtaatatattgtcagttgagcaaccaaatgggacgtcccactgtctcgtccgagcacgctacttgtgaatttacgctgatagcggaaaagagatatatatgatagcccgtacctttcagcttcgctcatcgcacctcctccattggaagaggacccagcaccggcctcgcccccagtcagatcggcgccaaacccagcccttctagacgacttgttgtttggcacaccggccgttccatcgaaagttcctggatcgtagagcgcccgtccactggcatccggtccatttccacgaccgcctctggatccgtttcgaccgccacctcgacctcctcggccgttggagccgttggaaccagagtgggacgaccgagggtcctcgaaggacattgagacttggatgcgacgagccaaggcaagatcccgagaagtcatttgagaggcatgctgatgacagtcggcagggagcgcgtcaacctttgttcttcgtcttggatgaacaacagcaagaatggttgacagctagactaacctctgagacctgatgaactttgagatccatctctgaagcgaacacaacaaatttcttctcctgacactgaggatcataacagggatagtgttgagtgctgtggtcgaagtgagattccagaaagaagaacgattgcatcaggagatcgcatccagtgaagaaaaaaaaagctgatcgaacaagtgatgcatacacaaagtgctgttcgagtttatcatatgtttggaaactgagagaattgagataagaacatcagggccgaaagcactcggcgtgagtagcttgaacggacagaatttgaccgaatgatgggaaaaagagagagagggctgactattgatccctgataccagcctgtttgcacaagaagcagtcctcatggttttccttcaaatgtttcaacagatcatctcccgcaaagaagcactcgtgacaaaactcgcacatcggatgaacacccatttctccagtgatttccattccctggggcagctggggaggtttcatccgacggggaactctagaaggcagatgatgggccaacaaagctggcgggtagatctcttgctcatgagcaaacaccttcttgtgcttgacacatacgtcgctacacagttgaggcacagatttccaaatcagcttttgtgtttacaactctgagaggcttatgcagcgtttcaaaaggagaaaacaacgatgagcggaactaaccataagaggtatccgttgtgcgtcttgtcgacgtgtcgacgaagatccatccatcctttcgcgatataatcgcatgactctgacggacagttgaatctcaggagaagcaaggactcttccatctggtgaataccacggcagacgataagagatcgtcagttaccgtgtctcggtccgatgcacatctaggtactttgtggaagggaggagggggagaatgagaagaaacactgactacttcgtcgtctgagaaatagatcctcagcttgtcatctctgaattcggttcgagacatcttctcgaacaacgtatcgggagaccgtgtgaaaaatacatctgggttatctgcctatatcatgagcatacatataacacgagtgtcagcttgaccagctggaaactaaaaagatcactaatcaagtccctctgcctcgaatttgtatgggaaagagcagcatacgtcgcgcagatcgccacgaacgaagggaaagctttgggaaggagatacatagcaagtaggccggcgtaccttgcagtaggtgcattcagtctttttgtacagtgccctcagtcggagagagcaaacatgacacgttctctacaaacatgatacaggttcgtccaagtgttccgtcaagtgtttccgttgacaaccacgattgagttgaataacgaaaccccccgaaatagataagttgctattgttcagtacgaagctttacagaatggctggttgaggttacagcataaatagacgatcaaacgaaaagacaaacatggttgcaaactccgaccgcatagtatttgaaaggttcggcacagataaagcagaggtcttcgtctctctcgacgctcccattcgaggattcgacctgttgttgagcgggaagactcgactcaacggaggaaaccgatgatgaggtgtatgaaggagagggagaaggaaggtctggccgacggagcgaggcttgcgagggagcagccgtgttggtgttctcgtccgtcaaagtgcggtttgagcttccggaggatgtgagctttccggagaaattgtatcgtctagaggaagccatcgtctaagagttttcgcgtgtgggtttttttctccttcttttcagagtatatttcgaggatgatttcttgaagactgtcctacaaaaagacggttatgatatcgagagtttttcaaccagaagaaacgatctaaggacgccgaaagaggtagctgaaagcgagggctgaagatgaagagtgttcggagcgatcgatgaactcgagaaggagaaagatagaagaagaaaaaaagaaaaagaaggtgaggagaaagaaatactaaagaaatttggtggaagtcattagagaaagtttgaagaggcattagggaaatcgcttgagaattctattacccagaattgtattcgtcatcgttcgctcttgctatagaatgagcaggacagactgattggaattcatcgatgggttggatcagatcatgatagcttgttggagctcgctatgacctgctgtggctcttcgtggctgtcgataggatacgtagttgatgagttcagacgcacatacgtacagaaatcaactgttgtcaagcattcatgatcttctcttcaaggtctctgatacaaccagggaagcatagaacgacagagagaagtaccgagaaaaaaaaaggtagagaataacggaaaggaaagaaaaagtcgaacaaaatcccacttctctaaatgccttcaattaactcttggaactcgcccgaggcaaccatttccttgagaatgtccaacccgccgatcagctctcctttgacaatgatctgagggaaagctgtcaagttgagagaaagagatatatttaaccatgagaactgcgtttctatcacagccaagcgcacgcaacaggcagaatgggctagttctagactcactgggccagtcgttcttcttcttcattccttcccggacctcgttgtctgaaaagatatcgaaccatccgaattcgacaccctctcctcttaacaccgcggtagcctgtctagagaacccacactggggagcgtccgggtttcccttcatgaacagcatcaccggcgaccggttcatgagcatcgtcagcttctcgtccaacgactggggagcctgcggggacaccgtcgttgtgctcagcggagcagatggagaagaggatgcatgggtggatagagcagcagtcaaagcgggtgcaaccgaacccgagtgtcgggagagtaaagagtgaccctatggtgaccgaagaatgaacgcgctcatcacagtcagtccagtggagttgagagtttgagaaaagtgaccaaggcaggaggaaacccggcaaggcttactcgtagcagaaggaacgtaggaacggcctcgatatcaaacgactcggagatatcaggctgctcttcggcctcgatattgaggaccaagacctggggataattttctgctaacgatttgacaacctgcgaagaaacataccgaaaagacgggtaagcgtatcaggtgagtccgataaatcatctgatttgtcttgctaatactgcgagaaaggcactagaaacacatgtctcgcgagattcaaaacgacgtacttcattcatctctttgcaaacatcagcccatggagcccaaaagttgagaagtgagacccggttaagatcagccgaaaggagatccttgaagtgatcaggcgaggtgacgtcaatgagactgaagaagggcaatgcaaggtgagttggacgagcacaaaggcagaaacagtcgtcaaaaacccctaggttagcacccaaagaccagacttgatacaattaacagatgagaccctcacttttgagacgaagacatggctaccaagatatgttatcgatacaaagcgatggtttgtggtgaaagcagaatgaaaaagatggcggatttgaatctgattagaaagatgaggtgattttttatttatttttattttatttttatttttttttattttttcattattttatcatatcgacaattttgtaataaaccgactacaagaaaatctggtaataccctcaacccccaacatatactcaactcacacagacttcatttacaaactcacagaatggcaaagaaaccaagtctgaagagcgctctcgcaggtcgaaaggttcacgagcagaagattcaggcgaaagaggccaaggagcaggtaagatatctcatgaactgggctccatccatccatccaaccaaccatccatccgttgaacggtatggctcatactcactccaagtctggggaactttctctttttttttgacactctccgtcacgttgaaccactttagagaatatcagatgcgcaggctgcagctgagaaacgagcaaaactcaaagccaaaaagaccatgccattcgaggcagacgactctatccttcttgttggagaaggtatgcctgctcccgcgtcgtctccctacacccatgcgcagatgcgttaacaatctattcctctgctttcttcttgtacataggcaatttttcgttcactctaggtcttctcaaccagcatgtgtttatcgacaagtcaaatcaaattctcgccacttcgttcgactctgaaaccacgtgctacgagaagtacccggatgcatccgccatcgtcagcgccatccgagcgcatggcgtacctgttctcttctctgtcgacgcaaccgatctagaagccacatcagagatcaaatctcgacctggcggttggactcgagtcgtgttcaactttcctcatcttggaacaggcgaaaaggaccaggcgagaaacgttcagttgaaccaggtcatgcttgcaaagtttcttcgttctgtcgcgccgttcttgagcaaaggaccgagtcgaattcctgttgtcgagcctggacatggaaaaggaaaggtgaaagcaaagaaggtgaaggaaaaggatgaagatgagttggagggtgtcagtgatttcgaggaactaggagaaggagaggaaggcgatgaggcctacgcaatcccggtcgagaaggcaagctggaaagttcagaagggtacagtgctggtcactctgagagatgcagttccgtatactctttggtatgttctttctgtcaccctcgttggatttgcgctccattcccattgtcctcccacttggagaatgattgtcagttaaccagatgtgccctttgctcttgctctcaccctcttatccttcctggaaacatccttccattcaaacagggatctaccccgactgttgactaaaccgaagcctcttcctccgcttcacatgattcctcc

SEQ ID NO: 1567 - DNA, 9155 bp, Xanthophyllomyces dendrorhous
caacacgacgcttcccgctactcaacctcaataccgaatccttcgctctttcgctttccaccctactctctatcctggttactctcaccgacgaaccatcggcttcaaagagggtctttcggcctcagccaacgaagagattgaggaccgtggaggaggtagaacatgggaggctgaagtagtcgaggagagcttgaacaagaagccaacgggcacagacgaagaagaggcaagagagagaaaagagcgtgtcgagaagagaagagaagagctcagagaggagaaggacaaaaagaagagcagaagaggaaacggttacaaagatcacaggccaaagtggagcgccccaggacaaggtgatgaaggatggcagacctgatttcataacgttgtctccttacatatttgtctcaactcgtgtcggaaaagaagaaaagtcaagaggaaagcaaaaacacacacgtctgtgcacacgtcactatatacactgtgaaacacccaactggaacaaattttgtgataacaaggctatagctacaggcatttaaaatggaaagagacgttctgtagatcattcctctctagcgcattccttctcccaatccaacggagtcaccttctctactgctttttggaatgcctcgaacgtacataactctgggacacccgtcaaatggttctcgggctgagcgcaggccgggagagcaagcggcttgttctggtatctgaatcgaacatctgaaacacagaaagcacgcacattcagaaaacgagatgaaacacaaacatgttcagcgccttagcctttctcgagcggtagccagggaaacttacaatgacgaggaggcgtgggtttagtccagcgagagaataatgtcgtaggctcaggaggggtcgagaacaactcgacagacacatgagcggtgaagtctttcaaacagaacaaagaagtaaattagcctccatacaggcgcagaagcaagcgcaggatggcatgagcaatcgtatagatcggtcactcaccaggccatctagcattttgtatgggatatagaaatcaaataagagagaacagcagtcgtcatcaagctttgctcttgcctaaaagggaaaaagaacaattcgctatgtaggcagccgatataaagcgcacctattgtcaaacactcccaaggtagccaacatactagctagcgttgtatcatggcaagccagcacagccatcttgacgctatccttctttcctgctactttgtcagccatctcgtgttggagatctgatagtaatcgctagatagatagatagatagatacaagaaattaagcctggttataagctgacattctggaaaaagaccgcgtaacttactcctgatgctaatgttcgaacttcgttagaggtcaatactccgccaaaccattctgagactatggcacgctcctgagagatcctcaacatatcggttaatcacaagtttcaccataggtaagagaagatgtgtcttaccaaggtgtctcgaacatcaggatcgttgaactccgcaggtatcttcaacccgtttgcctctgccgctcggattgaatccataattcctgaagcggacgggttgctgtcctacagcattgcaagaaagatgttgatcgccgaacgctcagacatattagttattaaaacatcaaaaaaaagtcctcagaacgcaaaaaatacaatgaaagaaaacctaccactctgatttcttttcctccgacatgcttgccaatcttcttatccaaaggcttcagagtgtcattgtaagcgagcgctgccgctctagagaactgcttgtctagatctcggagtcgtgcgcatgaaaacgtattcggatagagcgattcctcggtagggttccggatatgaacgtccggtcgccaggatcctcgagtgctggacgggtaaagcccagtagtgatctgctgaagggtttcgatcgtcctagacatggaggtgctcctgtttgattatattcgacaaacatcaaccaagtatatagaacccctggttagccatttacatgaataagataaagtcatgagattgattattaaaccataagtctaacctcaagaacaagtcggctgcgttaggagaagaaggcaggaagcccagtctgttcgtttgtcgacagaccaagaaccataagttaatgttgccatttgatctgcacgagggactacaagcaggagaggttcgacgtactcatcgacatataactttctgagcgattgaccaagagctaacgacgtctttctaccaatatctgtcagctctcctaacagactgtatcaccaacagacagatgtgatgaaggacatatacacatgccggacagattggtcaaatctctacgcaaagtagacaaagagggacgaagatatccaaacaaatcggagaagacaatgggagcaaggacataccagtccccatcttttgccacctccttcgtgggtcccctaggcacgtcaacctttcggttgaccctcaagatcccagacgacccggtctcttccaagacagcagcatcgaactctctaccgacgtgacacatgttccaccggatgggaaacaagtttgtcattctgactcggacaggagttcgttctcctgtagaaggttttttttttttggaaatcagacgttgcaagtaacaagcatgatcatggcggtgacgatataaaaaggcaaggaaggaaggaacaagattcaaagtgcaagaccaggataatcagcgttcatattagagcatgcatagccagaaacataataagcaaagaggacgaagaagaacagcaaaaggagcaaaccatgtctggaaaagatgtgaacttgttcaagtttcaagttggaaccaggaaagaatgccgattggactgtagggtgaatagcctcaaaagcggtcggtggtaccgagggagatgatgtgctcgacatgctatacggatgtgtatatgtgtttacgagaagtgattcaagaagttggagttcgtcctccgtaggaacgatggagatggatggacgatgaagggtgaaaggtgaggctgatcggatggaattgttaacatcgacgtagttcccggccaaggacgatcgaggaccaacaagatcattgataatcctcttttgctctcattcgccattcatgacattgctcaatcttactcgaatagatcatccattgaacatatggaatgattaaggaagatatgtgtttatagttctatgtacaattacaatctttgcggcctccttctacttctcttgctgatagaaaccatcagtctttctacaccgttcggacccttgccctcacctctcgcagtcgcttagattgcggacagtcgtgtttcgaaggaaagacctttcttaagcacctgccggtcggacaacggatcccaccctcgggtcggtaaagatctttttgcagctcgtacacacaaggaagaccgtcatcctcgtctgtagaatggtcaacaaaatggttggtttcagacctcttgatcttctctcttcttctagatatctcttatttttcccaaaaactggtttggatcttacctcgtgacgcttggactgatcttgatagaagacagctctatcgaaccaaaacagtggcacgacaacaattgaaactccgttagtcttgccttcatattgatgcgctcagtgtacgactagaatgggcgttacgaactctggatggtgacagtgaggacaaggaacttctgaccgtctcggctatgacaagagagcgatagcgttggttcatgatcaacacgataaaccacagaggttgcctctaccatccggtagaagggtgacaaatagatgagcataccagtgtcggatctgtctcaatgtcttgaatgactcccggttgctctctaaacacgatatagagtacaaaggcaacagtcagtaagaactctctagctgcaactgacttgattgtggatgctgcgacagaaaaggctcgaaacacgacgggcatagcaaacttccctctatatgaatcatcctctcaacccacaccctgtctgtcctccagcacctcctctcttccggtttgcacggaatcctctcctcttatagatagtaaacaagatgatagaacaagacccattgacagactcactttgtgatcgttaatagatcatttctataaacaagcgccgcgtcggcttcttcctcatactggcaattgcgacaggctctcagtaagatccttcggtgcacatcggcctagaagaagtgaagagagggtagaacaggcagatatttctcagtataagatggatagaacattcggacgcgtctagaacgagaaaagaatcaaaagaaaccggacacacgaacttttgggtaaagtagattattgctatccaaatcccaagtcccaacccagcccggtatcagatcaagacccagagttcaagatgttttggttcatcagaaaattaagcttgattagttttcctttcttaagataaaatgaaagcgaccattcaagaaccccctcgggtgatagtcgtccatcctgatcagatgagggtatcacatgaactaaacctcttctcaatcatcctggctttccttcatttgtcggaactgctcgtggtttccaggtagacggaagaagaggcttggcttgaaaaagatgcacaaagaggtaaagaccaaccattctctgcaatacttgtagactgattttggaggtgccatctagaaacacttttgtagggtatagaataggctgtcggcaagagaacgtggaaggggaaagtcggggtatctgacaggactgattcaaacagatgcgtgtccttcttttggttccttctggtcttgcttcgtttcaacttggattgctttgcaaggtcgagcaaagacgaaacagagacaaaggaaggtgatggtttgacttgctttggtcatcaagcctagttcgacaaatggacgagcgaggcgtcgagtgtgtggcggctgtgtcaaatgctgtgcacaacctctggatcaaggcagacgacccagttgatcaacattcatccattcagtatcaaatgaggatcgcatacaggacgggactcggagagcgtaacaaccaaataggtttactcatgtgggcaatgaatagaagaacaagaaaacagtagaacgtcacgcagacccgtcttatttcgaggttaaatctccttcttttcctctccagatccattctcatcctccagccagtgtgtatctgctaactctccggcagcacctttgatgatcctcgctcctgcatccctcaagaaggtcacaacttcctttcctagcctctctccattaccaccctgctttccgccaacgatatcgaacgacgagcccaacgaaccggtcgagtcagatgacgaggctgaagctgaagccgagggcgagagggcctgctcattgacaggatcagtgatgaatgaggtggctagataagcggaggcaggtactttgtcatctccagactcaagactaagtagataactctccaggctcttagaggccttgagtcgggcacggagaacctgtcgaacgagtcgcctggaagggatccgagttgggtttggctcatacggaggaggcagtggggacgtcggtcgaggagatgtgggagatgaaatagtggcatcagttgaggaagaagagctcgcctgagacggcggagtaaggatgatatcccaagaaggcgggcaccaaatcccaagcaagatccggaatgtggccaccagcttccgagcgctattcaatcagatggatacaaacacagtgaaagaagattctgagatgagaacctaacttgagaaagaaaaggtacaaaagaacagggactgactggtcatagttatcgtcaatcaatgtcagatgataattgatgagtccaaagaccaacgcccccgcgacgcccaggccgactattcctccaacccaggtcccactgaacgcaactttgtagagcgcgattgcacaggccgggtagatcattgcgctgactagcagtccaaacaccagcttcatctgcgccttggtctcctcctcatcctcaactagcttcgcgccgtacctgccgaccagatacaccggcacgttgaccaagaatgggagcgcaaagaacggtagtcggatcagagacgacacgagatcctttaggaacagtgccagggtagagaatcgagtaggaagaggagttggccgagaaggatcgagcgtggatgggagaggaatctgtgacagcgagctgtgggatagacgagcagtctgcaggtaaaagtggtaggacaagagggcttctttgaggagagataagttgctcgaaggaggagggttggcgagcagatcgatcaacctgttgaaaacaaagctcaatgtatatcagtttcatgaagcttctgagaacctcctgagacttcgaaagactacagaaactgacgtttgggtaacttctctgaagttttccatccttagatccttctcgttggcccacaacaactgtctggccaagatggctgcgttcaacgtatccctgagtgaaaagaaaaatatgattgtgaacagagtcaatgtttcttccaaaaatatttagtgacttttcggaccacctggacaaaagagacaaaccaatcaggagcgttgactgtgagctcgatcattgcatcctctaccgatttcgttagccgtttgacggcactcttggcttcaacctcctcggtcgagaggaactgttcagaatattcatccacggtgattggtgtgccgaatctgttacatggttcagatcagatttttcgttgacgattgaaggcctgtatggagctcacggccttttttcaagagaagtgaaaagaagtggagaattctgtaagggacgtactcgatcgcgactcgacttcggtattttgtcttgtcactgtacgtaattcctaccgggatgactatcgcaggtcggacagagttcttctccccgtcggaagttgagctggcgcgctggtcctctaggtatttgacatactcgagtgccgtccagccaacgccatccttgacgggcataagtcttgaatgagtgtgcgaagttccctcgggaaacacgccgatgacctcatctctgaccagagctgaaagtttgaacagtaggagggtttagtatctctgatcactttggtcttggagaggagtagatcaggaggagtaagcgatggaacggttggaaccacgaaccttcgaatgttcctttgaaaaggacttggttgttcttggtctttcggtcgactgggatgtttcctgcgttgagtaacaacgctccgagagccgggttcttgaagagtgagtccttgacctacattcacatacattcgtcgatcatgatttgacacccagtgtacgaacaagcacacagtcatgagcgatggttgaggactcttaaactgtagagcagtacaagtgcaggaggactaacccagtagtgaatgtatcgtttcttgaccgacttggtagcttcgataacggcatatgagagacaggccggatcctattatttgccccatgatcagaaggacgaatgagcgaaggggacgagaagaccgtgagcatgatacattataggactaggacatgagattcaaaagagaacgaacaatggctagaagagattatgaggattgttaaggtaagtggaataataagaggatcagccttgagagaataagagacgagattgaagtcctagctggaaagacatcctcacccatgtttagatgagagcaagcgctaagacagttaccaagtatttgcacgagttcatccggcagtccaacaatgtgtcagttctgagcgggcatcaggctcgcatatcctctccaatcaggctgatcggaagaatttgagaacgagagtgtgaagaaagctggagacgactaacaagacgacacctccttgggcaggcacattctccgtgccaagtactttgacttcagaaaagaacgagtcgacggcaaagttggatatgttgaccaggattgtgtgggagattccgaatccggatggttccttggttgatgctggtgttactgtggacatttctctctgtatctaagtctttctgggtttctctatcagatggaggagaggtgtagaacgagatagagaagagagatgagaaatggagtggccggaccggtggtagaatcgagcggtatgttagggttatcttataactgccgaccagttcacgaatctacatgggtatatgctacatgggtatatgcgctctttctatttgagggcagccaaggctatatccttgcttattgaagcattctaaccgacgagttggtagttggtaacaccctgtatgtagcattaggaagagttgaaaagggagagagagggagccaggtgaggttattgttgagagaatgaataagcaaaaagactgataaaaagcagatagatacgaacgccttcgttgatcttgacgacaactttttttccaaccagagcgattaaacaacggttcaccttgatctgcggcaaatcagatttgacaagatctgccactatttgttgtttttcagagggaatgtcaaaaacacactcgcaggggctaatgtataaaaagcagaaggaaacaaaacaaggagacctactcttcaggccagtcggactgttcattaacgatgagatcacgcgctccatcgcttgagtcagagcctgggtagtaccgagtcgttagacaactttctgcgtgaagcgtgaggtaggcagaaagaagataaaaagaatcaaggactagaacataccggttgagaacctctgaactcgagaggtagagtatccatcattgagctaatctttgcctgggtgcacacatatgcatgtcaactataagctctgaggcagtggaagacagaagaatagtaagaaagagagactcacttccctgagcttcctcgctgccgctcctccggtcgaggttcctcctctacctctacctctagctcctctgcctctagctccggcagaggttgtacctctggctccactctgacctcctctcgtatttcctccagctgccgctcgggccttgacgttgtcgagt

SEQ ID NO: 1568 - DNA, 2103 bp, Xanthophyllomyces dendrorhous
gtcgagtgcttcctcctcgtttgcgaacgagtactgagagtgctgggtcatgtatgtcatgtctgccggatgagctgggttcttagcgactggtgaaccaaaccgggatggagaagccgggttaggagatgagggagcgggagcagtcgagtgagccatcggtctgttagcatgcatctcgtacgaaagatcagagggagcctgagttaacgagtgggcagagtgagagtaagcatgaagagccggcgttcgaaaatgaggataaagcaaagaataggctgacctgaggaaactcgacgctgaacgcgttcatcctaagaccaaagaggaagccagcaaagccttcgttgaactctgcgagacttctactgagagccaccatggaacaattgttctggtgaagggtatctagctcgtctgttagctctgcaaacgagctagcgaggtgatcgagcccaagggtagccgtctcgagtgagggatgggagagcggaagcgaggtttgatttgatgtggagtatctggacatatggccatgattggagcctgatgatgacagataggactgtctgagcgatccttgggagatccgacgaaggggagtatggtgagtagtaggcatggcttcagtcagatgtgtgttgtatgagatgacggattggatgtaagtggcagttgtgtttgtcgcgacgcgtcggaatgaatgatttttgacgcgtcgagcactagagaaaagcattctaaaagcattggaaaagcattaggaaagacattatgagagcatcagaaaaaagactaggaaaagatcagacaaagactaggaaagacactagagaaactatcaaaaaagattaggagaaagaatttcaatcttttccttctcccatatcatccatccattcatccatcaaccagcaaggatccccaagtccatcgatcagcacccatcgctgtccttcttgcttatacttcctgtctccatatgaggttcgcgccaccttcgagctcatctggcaggtacggccttactcttgctctggcttcgtccatagactatccagcgtcctctgacgaagatgatgtcgacgaaagtgatctctcgtcggacgaactcctagactcctcttcctctgcttctttctcctcgtcttcagtctcttcagacgaacaacatacgagcaagcctcagggctacaagagaaagactaaggatactactactacgacgaatagagcggataccatccctaaatccgccttgggaacccctgcacatgccgacgaacttgaactctataacgctcggtcaaagacagccgcatggaggacatcccatcaacatgcccaggctagatccgacgcgcttaatcttatgctcagcaagccagacagaatgaagaaggcaaggaaagaagcagatgatgacctagatgctatcagaggcttgcttgaaggtctcaagatggaacgtgcggaagaggaaaggagagaacgtgaagagtttgataaccgaaatcagaaactatgggaggttcgtctatccttcatcctcgtttccttttctttgccttttcgttgaggtctatatccaaacacatatctaaataagaaactagtttctcctacatctctcagtctatagagcataccatcagagaaaccgaggagcttcatctgaaagctctgcaggcaaagaatcaagaggcagagcggctcgcttccgcactccgtgcgtccgaggaggctaagcgaagagcagaagttgaacgaaaccaggccgagcaagcccgccaacaggctgaagttgagaggaagaatgcggaggaaacgcaaggaaggaagctgaaagaaaaggaggaaaagaaaaaagcaggcgaaatctggggctcaaaagcaaaagcgaatgagtgggacagctgggtgggcaagatgcaggtcggtcgccatcttcctctatcccatcgcctatttttcatttgtgcctgacctgctttgcctctcactatagaacatcaaacaaaacatcttacccaaggtgaacgcatcaccagaatggcgcaagaagtgcaacgcagtcaaacgtcagatcaccccgaaagttgg

SEQ ID NO: 1569 - DNA, 8647 bp, Xanthophyllomyces dendrorhous
cccaatctcacattctctccatcgttcgttatctctccctttatcttttcgcgccatcagactcaagcttttgcatcctttgctaacattcaacctcttttctcatattgatctagacctctgagatctcactcattctacactctgcccgttcagcctcaccagaaatatacacctggatcctcaaccatttttccaagattctcatcaaacaagcagaaacagaaatcactgctaaaccctctgccgcctttcctctcgctaggcttgttgttgcactcatgctgatgggacacgccgatggactgggagaggtgttagcgagtagacttgttaagaagtcttgctgggtcgttccgttctggccagcaaggaaacaggtcaatcatctctcttcttatctgtttcttttttcttctcgattgttatgtatgctgaacagggtctgtactatattgttaaaatgtatacagggtcaatctgaggcagattacgataaatccaccggccgactttcttctccagaaacaacgcttcaatacacgctccgtcaaaccggtattcttaccctgtatttcaccatcctccacaccctaccttcaccatcacttctccctccacttcctccgtctcatccaccgtatcctccgttcgacccttcaaccattccctcgttcttcattcttccttcagggtggctctgggttgctagcttgttgaaacccgcactttgggcatgggagggtacgccaacgtttttgggtgctttcatggatgtctgcgcttcgaggatggaatctatgtatggaagacagatgagtaaacttttgagaaccgtgaagagagaagttgatcgggaacgagcggcgatagcgtcgggtagtagtggaggtggagtaggagacaaagatggaggctcaaaaaggttggggttagagagactggctcttcggctagatgagtgggaaaggataggggcttggcaagatgtagacggtggattcaagttggatccataagggtttcacttccttgcttcctcctcccttttctacctcccttgtcctccttctttctcttgggattgccgtgtatgatttttgaccgaccagccataaccaatgtactatcatcaacacctacatatacatgcattcatccatctcggcttcatcagagaagagtcatcctgctttcaacctacaattatctgtcgcgaggcaggataaccttcgtcaaccatcatgcctattactgaatatatctcttgaatgagatatacgtggtgcgtatttaataagaaaattagaataggggattaggattatgtatatgtgtaacacattctaaaaattgaaacaaagccttaaaaaggggacagaatagaaaagaaaaaggtctataaggactgaaacaacctgggatataataggatgagagtgaaaagtattcctataggctgaggtcacgttgaggttgtatagaactagattaagaaagaaagaaagaaagagaaagagttgtaaaatatcaagtcgagttgttttggttatttctcctaggccctccaaagttctcggacctgcaagaagagaagagaggaaccccaattgcagagtatgagtaggcattctattcaaattcttagacttagcctatgattctcagagactcggtagaaacgacttacatatttgttgggtatgaatatatgcagactatcatatccatatcagagacacagaaaagcgcacagacgatcagtaaggcaagaagaaagaaggaatagaaaaagatcgaccgacctcgccctatcttctgcggttggcttctttgcttcccatatagaattaatgtagtcgtttccagtccggtcggctatctgaacatcctccagcttccaattatcaagatccacacctaatgatcaaaacatgacgttgttcaaaaggaaacaaatggaggcagaattataccatcgcaagacgtcaattcatcgcgtactaggcagacaagaatagaacatgaataaagttctctcttacttcggatcttgcttatgtgggatcctagcgatctgtgcactcctgaacctgtttttgcagacacgaattaaaacgaaacgatcagccgtgatgctttattgagcatacggtcaagcggagtgagactcacattcaatgcacataaacccgatcatcttgctgtcatagagtgcaatagtggcccaacgaggatctttgcaagagaagaaaagatcagaatttagagaaaggaacttgcagctctggcagagatctgatgatgaaacttactggctctacgacagtctaaacaggtactattttccttcctcttggagatacccaaaatggaaagcgcaacatttgcttctctttcactttccgactcagctccctctccaatccagtcgatcggacgctgacttccctcactgtgtgttcttctttgagaggctgggccttgcctcgtgacagatagccctaggtcaggagaagatgctccatttagcccttggaccgaatggttataatctccgccgccaagaccgcctcctgcactgctgtgacaggagagacgtctaacggagaaatccaaggagtgtctggaggatgaggaggagaggggcggagaggacaatgagccgtccggttgaagctgagaagataccgacggcgtagtcacgtggaagctcggtctactcaagaagtttgctcgcgagaatctggacgagattccatccatagaaactgtgggaagagattgatccatgcttcgcctctggaagggactactaggacgtctgatcgatcctgagggttgactgcccccgaagagaccagacgttccttccgaggggctgtgtccgtggctagacttccggctccttgtcagagaaatctttcgagcaatcgggtttccccagttacggatcccaggaaagggcgaggaactctcagggaagggggctgaggctcgacctgaactagattgagttttggagttcttgaggagaccaagatcgtctaccgatgttgaggacgggctagccgttccgaacccgccacgtacagaggccgtgccatttatagaggcttcgatagcatttcttaatcaacgataaatacataccaagcccatcgtcaggtttagaaaggaacaacatcttcagcgcgtaaacacatcaaagcaattactaacccaagagcagcaacccattggtgcatctcaatctcactggtcgcctgatatcttctcgtcgatttacttgtcacaagctcaaactatatgtttttcgatgtcagatatcaaacacatgtcaggttctcaccctcttcaagatgcttgcaaagaacagagacaaaacttacaacaaacctacggtctgactttctgggttcgcgcgccttatgagagcgaaatcagcagaagggttcaaacgatctgataagtctctagcattcagatgcgtgcatacatcgccagggcacttaccgaagcaaacatcagatccgtcgaacaaggagcgaagattccgtcggtattgattcggtgctacaggagaataccacaaaataagcattagatttctgttagatacagacgttgtcttcaaaacgaatagattgattgatctgcgggaatgtacacacctccagtaagtacgattgactgacttcgcaccagcacactatttgcggtcaaagaatacattggcttgtcagtgtcatcaccaacatatgcgtgtgaactggaagaaaaggaacagtcaacacccactctcccaattgccacccttcacagcatccccactacccttcctatcgcccgcacaccacagccagccttgcttctttcgtccttgtctctccttcagatcgatccaagctggatccgttcttcctgtactcaatccattcggtttgccagttgaagcgtagttgaaggacgagtaggattttggaagaacctgaatcgaatgacgagctgatctgggtttgatctcgttggcgagaacgggggattgtggtggtgatattgccttatgcgctaagggcgcaggtttaggcgagggacctccgaatccttgagcttgctcgggattactagataaggaggacctgttgatgactttgaaacgaggcgggggtggagggataacatccctggactgataactgcttccaaggctagaaccaaacgtcgagcccagaggggcagtcatagaaggtagactactgaacactcctcgaatcttgctacctagtctatctcgtttcctctctccgttcgctaagggtgcgtcaggaattgatcctatatgaagttctccatccgctgatccgtctcgatcatcgtcaagtatagcggaaccagcgccattggaaagttcaagagcaagctgtcgttcggttgacatccgtcgattaggccagttctgaacagcccagtgtcggtcattggcgattgagagtccatcggctacatattgacagctcacaggactaacggggacgttgtcctgattgaacagttgggaagggaacgtcagaagtcgagtaaacaaagtggtaaactgaggtccaaacgtcaagtctaagagttgtgtctgtatttggaattgagttagtctgtgaagattcgccagatgaaaagagaaataaaaacataacaaggatcagtctggtatctttttctttcaagtctactagatgaaatgtattatacaacaacgtactctgattctcgacatcttctctcgtacgcaatatctaacctgggactatcccggctgacaggagtcgcgagatatctggccgtataagtctgaaacgctctggtctcctcctgttcagtagtacagatcaacgttcagcgctgacctcgaggaagaaagaagactagaacagcacgataaaacaagaacaaaaggaagagactcacatcaaatccgctagctttcttgcctagcttatccttttctgcctctttaacggcgtccgaccaggcccctaaaggctctatcaccgacttctctagaaagactttctcctctcttcgctgtctcctcctttttccaactacgccctcgtctttccaaacttttgctagagcgccctccggtatctcctccatcacatctcccagtgcttctattcctaccgccaaccgctcttccgcttctgacagtgcagcaagtaagccagcgacgtcggccgccagtgttttgactaacttgacatgaggcttcaggagacttaaacgtttcgtcaggctatgcatatgtgatctgaatcgaggggtgtctggcgtgggctctaccgggagtaaaggagacaatcctacttgagttggaacaggaggaagaggaccagataccactctatccgagtttgtccttttggctgtcgttggcgtctctgttgtcttcgtcattggttttgtaggcgtcttgttcatcaagtcaagtgaagaagaaaaagtcgtaggtgaatgatccatattcggcatgagcgagccaagattcggcgtgctcgacgtcgaacccatgctcgtccgactcgagtcaatggaccctcgagaactcgtagtctccacagaaattgagctcgttcgcaagaaattcaaatctcctccgcggatcggaatttggtgttggtattggttctgattcgagtctaacaaatgtgttccctgtggggtggaagcccgggccgaagagggtggtgacatgactggaaccgttaggctcgaggatctcttcacagaaggacggcgggcaacgatagctgggttgtcgtctttggggctcactgaccgggcatcactggacagagatgctagattcgaattcaaagacaaagaacgaaacagaggagaagaaaagatcagattctgaaggaacaggaactttaattcaaaaaatagcctgaacagatcccaaccaagagaagctatctaacgggtcaaggaagcatcttgaacagaccagtcatgtacatactttttctggacgtagttgaagtagcatctactcttgcgaatcctctctctggaagtgagttgtccagctcggcggtcgaggtgtgtgtgtcgccttgtggatagataccaacattggtggcagtggcagtggtagcagaagagaaaggagccccgacgcctgggtatggaggaagaggaagaggacggggaccgttcatttaccgtgacgcagagctggatccaggaaggataagaaagaaccctgagcgaccagaacaagagaagaagacgaagaagatgaagaagatgcgagtggtcgtctcgaggtgatgagcaacggtctggtcgtgggattcgaaaaggttacaacaacacccaaacaatgagaacttttcactttcctcatttctatctttttagctttctttcgtttcgaatcagagtactcgacttcaagaaggataggcagcatacatagcttggctcttgagcagattgatatccaaagtttgccaagtaggaaaaaaataacatatcatcatctgcaacccaattacaagatagaacaggttttcttgttctttattctctctttgatcgacaagagcggagaaagtgggaagttgttttaactctatcgatatagatataaatggtaattgaacatgacacgaaacaaggtattgtgacaagagagggggggggttgttgcgtgaggttggagagagagaggagaagaaggagatcggaggaacaagctagcaaactcggaaaagaaacctctaaggagaacgaggagacatgacgacctagagtcggagagcgagctcgtacacactatacgacatcaaacacacgcaccaagcgcgagattagcttaggatgtctctgacacttcgaagaaaaagtattagaaacgcacctgtacatcgcagcggcattgggcacaacccgcatcatgtgcgctgtcaatccactgtatagacttctcactccttcttcggcaagaataagcttgaacgtctggaccaaatttcggtattttggaacagtggcacctgcagggattggttgccttagtcgagttcgcagaacctatgggaaacgagagaacaatatgtgtcagggagcgagtgcaatttgagttgattctctttccttgtattgagaaaaattgatgaattgtaagcgtacctcgtgagggtaggtgatcagagcagccaacatcttggctcctccagcagcaccgagcacacctgtccattctccaagtttgccacccttctcagagatacccattctcttaaacctctatagaatgatatattgaaatgaacaagaaatttgcacgatcagccccctaggttccttcctcatttcgtgatgttatcctcagtagttgaacttcgggagaatactcacctcgtagacgacccactggatgataagctcgctaacgcccaacatactggcactcaaacccttgtaaagacctttgacaccctccgtccggacgatgtaggtagtgcagttccaagcgttggtgaacggaggtttcgacagcgaaccgctcgccgaggacgacgcggccgaagccaatcctaaaggagttgtgatggatgaagcagaggtcgaagtggctgctggtatgggagagacagtagagaggatttgggaagaataagcggatgcatgtgccgctctagctgcagaagtagcggcaccgaggtgagacaatgaagcagtaggcttgacagctgatgcggcaacggctgcagcttgttttgcttgatttcttgatgaagctgagagttgcagtcgagtcttgacgacccagatcggattcgttgccatacctgtggcgattccggcgttggcggcggcgatcaagtgaacccacggggcttcttttccatcgttgaacttttcggcaaggatgagttttaagtttccatacgtgaagaactggatcgatctggaggaaagagtgatggtgatgatggagacaaatgtttgtggagaagaaacgagatcagcttgaccggacagcatttcgcgtaagtccaaacccaagagctagcgatcgtaccgagctggcaccgcgcctaccaaagtaggcccgattcctttccatagagcgggtactccttcagatctggcgatatctctatgattggtattatccaagtgaatttacgctcgtcaagcttcagcctatacttcttaaaaacgatgctgatctgaaacaggcagatgtatgaccacgtagacgaacctgagtaactgtccggtctcgacaaagttccaaagcaagctcgtcgtcggtttcggtggcttaagagctgatcctttggtcgtgttcaatacgccttggacgttttcaggcaatggcacggacttgagagagatcggtgaaggtttcagtgtggacgatgacgcggcggcagacgggagcggttgagcagagtaaggtatcgatttgaggtcggacgtgggatggctgttgaagagagacgattgtaatctggtctattggtcggagaaaaagacgagaagaacgcaggggatgtgtgagctctggtggtgagaaggaaagaagaagctatcctggttcggcacgcaccttgacgacatccaaagg

SEQ ID NO: 1570 - DNA, 3896 bp, Xanthophyllomyces dendrorhous
aaaggcgcggtgatggttgcacccgtcatcccaccaatactatgtgagcgtttagttgcgggcagcggtagcaagaaacgacgttttcagttgtttcaaaaaccccaaaggaaacattttgatgattcagtatttgagcaacctctgatacgtcaactcgaagcacccgttccagaagagacacgcttcgtgggctggattggatgtcaagagagggagaggaccaagaatatatacgcacgctccggcggccatatgcctccaactcttcttagggtcccattggactgtcggagtaggttccgacttaacgtttgccggatggacgatggctgctgaaccagacatgatgtttttttttataagagcactgtgagttgttcggtagggagcgacgaggacggtagtggtggtgttggtggtgaaaagtcgggtgttctctctaaagattcctgtgttgatttctaccgtttgattccttgccttatcactctgaatgctaatcttcttccgggaacaggaaacaaaccagactgcctgatggagaaggatcgagctgctgccgttgctgttgatgctgctggagtcaagttcagatcgaaatatgaagaaaattaaaatatttgtcggctatgctcttggatggttacagaaggtgtgaccatgctcttgactcccacatgccttctctccatccctcttgctgtcctttgagtctctggtgggtgtatgagtatctgttgcgcttaattatattactgggaagtagagatatagatgggtatgagtcttgcgcttgaattggatgttttctaggagaacgtccgtagagttgatcgtgtaaccaccaaaggcaaggaaagaacacagacgacatcaacccaaaggaagacgttcgactaccacgcaaaaacacatacactctcactcgatggatatccctacaccttctctggatcatctctccaaggacgattatgagatcatctatgatccagcaggcaagtctttactcgtgagcacatgcagagaagggatgtatcacacggtcgaccggttctcaagtaccctcctttcgtatccatcacctagaggactcgttcatccttctcgacgcgttagaacaggatgctttggaactacaggctggaccttcaggaaggtgttgtctcgagattgggtgagtaacgttctcttgtctgcttgtcatgaattaattcggcgctgaattggttgcattggttgggatgatgtagatccgggtcgggcattgtgtctagctttatgggaactatcctgggtcctagttctacccgtgggtctgcttccttgttcaactctttgttcactcacctgaatatgtcaagctcagcttgccctcttcctttccataatttttttgatcattctcccaaagtatacatatctacggacatcaatccccacgccgctaaatgtacctttgaaactggcaagcacaacggagtacgccttcttttgcgcttcttcatacctgcctgtttcgtgatgtgtatatgtgtgtgtgtgtttgtgtgcgcgcgctgatagaattactttacactctagatcccaatagatccaatcttagcaacactttacacctcacttctccctaggatgtatagaaagatagacatcctgctgttcaacccaccatacgtcccaacatccttagacgagtaagtattagcatttctctcttccctttacctttctagacggctgcaagtcgaactgtactgaccgatatttgccgttctctgtgaatgatagattggatgacacgcagacgcagcctggcatcggatccacttgggccggaggacttgacgggatgggactcacacagaccttgctgactcgtttagaggtatacctacctctcgttctctctctccctctgtcattcaatcgtcttgtttcgacccgtctgaaacgttgaatggtgtatcaggatctcttgtctcccatcggagtattctacctggtagcgatcaaacagaacaagccactcgagatcattcagaacatcgaaacgaccactgaaggccggataagcggcaaggtatgtgtctgtctttcttcgcttccactttgtgaggaaaagaacttggctccctttggtctctttccaagtctttcggcgcgattcgatattgactctgattgccggggcttgtctatttcttctctcgaacgaattaggtcgcgctcaacagaaaagcgggtggagagaatctttttgtgctcaagttctggaaaacttctaaagatacgatatctccttgatggttttaaccgtgggtacatctggaagagcaagcctttgtcaaatcaattgtacgctcgtcactgagtatattttcagaagagaggaaaatcaaagcacaagctagaattgaatcgacgggggaaaaatcatttcaagataaagatgatgaaggagccgctgaatcagtcttcctaggtggcagcccgatcctctcatccaattctccactctttatcctttcatccaacccagcaccctcgagaccgaagaacgtccgccaccatggcttcttctcgtttcgctgagctcgatcgatagcgtctccaattcggtagtagtatgccggtttgtacgatggaacgagtgtctttcgggagaacgggtactgtttcagaagacacgtcacatatgggcacagaacggtatgttcagtatcaccagtgaaatcgatcacgtacaagagacatggacaagaaaaagcaagacaaaccttcttcctccagtgattactctccagcttgtccaaaccctgagtcaacccttccagaactctcacatcgtcatctttccagccaccggagatttctccactctcgaccgatcttgatcgctcttccacaagctttgtgagaaccgaaccaaattggacattgggacggagcggatccttgggaatccgagaggtttgagacagaattcgagatcgaagtgtctgagcgagttgagcgggaggcatgttgggctgaagctagttttggtcttgaatatgtgtcgctctctgtctgttcttgtggaaacgaataaagatcctgcctcttgtctttgaatggaaggtagtggtggttgatggcaacacagtatcgattaaatgcgactcgccgattggcgaaatcgttgacctcgccggttagggttacactttgcctgttctctgttctctttctacaaacacacaagcgttgcgccttctatcagactctttcatttaatcctctggatcacttccttcgtcgtcgtcgccgccttcctcagcgcctaaaccaccggcagcagagccctttctctttcttcttctcttctttttcttcctcccgctctctccatccggtcctgccccaagctcactatcgccacctcctatgacgttgacggccaccggctcatcagagcctttgtcatcttcgccttcggctctctcctcgtctcctccactcggtcgtttcctcttttcacccgtgttcgcgttcgtcccgttcactttagatttccccttggagcccgctgccgagggaggaggaggcgcggcctttttcttcttcacactcaacgggtttggctgtttcggtccttttcgcttctttggcgggggaggctgggtggctgtgacgctctttgagctggcttcatcggtcgaagaagaggggaggccaatgatatcgaccagagaggttggggggagaggaaggaccgatgtaggcatcgatgctttcagcgcggattcttccatctagtttcaaggtcgtccaaaggagaagagagaggagtgggaacgtgaagaaacaattggattcgtcaatcggtcggttagatcacacaagcatac

SEQ ID NO: 1571 - DNA, 5953 bp, Xanthophyllomyces dendrorhous
tcataggacatattaagaggaggaacgaaccgatgacagacgtcaagcattcatctccagggattggctctcggtggttgcatttccttcgctcgaacgtcttggccaggtctactacgtattggctatcgcgtccgaggtcgtatagctcctgcatacagcattgagtgatcactaaaggagtttacaccaaatcgacagcacaagaacagcaacaggatagtatagaacaacaagaattgagaaccgtgctcaaacacaaacgacacaacctgaacaccgaagagtctacacgtactaggtttacatttaccctgaaggacggtttcgaattgcttctcgacgtcgatacctgactttgcgatgtttttgcaaaactgtgcgtcgactgagtggaagggagatatcatagaattatgagcactcgagatcagccagccccaaaaagaacaaaaagatcacgaaacggaccaagagtttgataaggttgcctgaacccaaacgtcaagcagtactatgaacagaatgaacacggacgagcccaatggtcaagacgctatcagcaggcaaccaccaaacccaacctaacgaaacacgactcaacgagactcaccgactgcatcagtctcttgtaggcctttgctcttttctgtctcattgtgaatgcctagatagaagtgagtcgaagagagagagagagaggtgtacgttaggaaagagtatgggagaacgggaatcttgaaaatcgtctgttagggcgggcggaggtgtaaccaagtgggatcacgtgacttcaacacgtgctcccggggttaacttgaaatatctctcttttctccttctcttctctttcgtctgcgttcatcgttcttcgttctccgttctcacagtcgttccactctgcttcgtggacataggacggtcgagtgaatgtacaaaaaaggactcactgcctcactacttcgtcgattcccagtcaaagacgcgaagaatctcccgaccgcaaaggcagccaaagaacttcgaaaaacactaactcacgatccacttaaccctcataggccctctctcgcttcatctcagttctcatacaatccaaacggttttagtccctttcctaccagtgttccccctcccttatcccacgtcgctcctaggatcaatccgactgcattcatgacaccctttgcctcgaagaaccagatgatcaagtcaatcgttaccccaaaggtcatcgagccatctttcaagaagaaactgattgcagcagatggcccgttggtatggatagactgtgagatgacaggactagacttggagaatgacaggatcatcgaggttcgttcctgcgtgtctgcttgagaaattatctatacagatcatgctgacgctgatcgggctcatccacctggttggaaaccgtagatagcagtgatcatcaccgacggagagctccgagcggtagacgaaggcatttcgttcattgtccaaaccccaaaagaggtccttgataagatgggagagtggtgtactgaacaacatggcaaggtatgtgtgtcatcccatgtactctacattcagaagaatagtctttactgaatggtgcctctgactaccctcactttgtgttgatttgctctctagaccgggttgactcaggcatgcatcgactctcctcatacacacgaatacgtcgaagccgaagtgctcaagtatatcaaagagcgaattcctgagaagagaactggagtgttggcaggcagctcagtccatgctgatgcagcattcttaagacgaccgaacggcggaatgagcagcataatagattggttgcactacgttcgtatccatatcaaatttctgtgatctcgaaaggtctattcaattgactcctaaattctcgctgtctttctcaccgtggtcaatgttcctatagcgtatagtagatgtgtctacaatcaaagaatgcgtctcgaggtggtatcgtatgtcgtctgaccatccctgttcgactttgacttgatcgcttaagagctgacctttaatcaattgtaccactttgactcttgtctaaatccaaccccaaactcacagcgaccctggttcctatcttccgccgagcgcgggatgccgaccgggagatcgcgcaccgagcgctggatgatatccaacagtctatccttgagctagctcaatacaaagcaactgtatttgtccctccggtcatgatcgacagctccctacaagccaattcggtctcatcgacatcgtccaagccgaagcacccgagatcggatgagaaaatccaggtggacgataacttgaaatggaatacctcgacgagtccgaaacgatgggagacggaagatgagtatttgagcacgaaacagacgagtgaccagactgagtcgacgaatatcaagggtacgagtctgacgaaaggaagacaggccatacctgtagagccttctcaagagctggctgaataatgtagaggaaagaatgtccacgatgtactagtatctgatccatgtatcatcatcacgttgctcggtcgaaatttatctgcatggtcgtctagtcgcgtctcacgactcctcaaaaccttctttcatcgtgtacaatatgttctgccagtaaaatctcttctttctatggaaacaaatggaacgatgagagaagcgagcgtgctcgaagaacgaaaaagcatttaacgcgcttccgccggtggcgtcattggacggctctcgccgatgtataaagatcccatcccgtttgcactatcttcgattcttacttcaatcttgatcttgccatcaaagaacacacagaaggacagctgttaacatcatgtctttgccaacagctacccttccacctttatccaaagttgcagtcatcggagccggaagtctcgggcttgcccaggtcaaacagttgatcgacagaggagttcagaagaaagacatcgtcgtctatgaagctagagacgacgtcggagggatctggtaagaccatatactctccttagccgttcgagcggtggtgaactgatcaacatggaagaactcatcgaacgtcaggcgcttcgaagaggatgcagaggatccctcagtctactacacacaggccggacaacctctttatctcacatcggcagggctgaataatcctcattctattccgccttccccaatgtataagtctttgcgaacgaaccttccaaactatgtgtaggccatcttatttgatatctttgttcgttacatgcgtgtttagagactcacttctaattgaaacatcgttctgcagcatggcatttagagataacccgtttgataaaggaacagacatctttccagctcatcatcggattcaagactatcttcgtcgattcggagaagttcatgggttagctcaaaagtgctcaggttagatcgaaattaatatatccggttgctgactgataatcgttctttcccgaccgataaacatcccatcaggttgaagagttgtatccgattctcaacttcagttcaccgactattccatacgccgagccctgcttcagacgcagagcgatggactatccagagcgagacagatggtcaaccctttgaagagaagttttctcacgtcggtaagtctatcatctggtttccgatattttgttcgaacgcaccaattgattgatcagatacatacctgtggggttggtattgttttgttctatagtaattgccaatggacattacaaccagccattcattccctacataccaggtctttggaatttcaagggcaagatcgcacacaggtccgtttccacaatgttacagtcttcagtttgtttgaatttactgtgcttatcaagctatgtgcttaattctcacacggaacgcacccagccaatcttggcgctcggcagccgagtatcaggggaagaaactactgatcgtaggggcgaaaagttctgtaggtcacctcttgatatcattcccacaaccgctcgcgcgctactgacagttattaactgtgtgatcttcctcacctgaatcagggatccgatatcgcacacgatctatctcttgccaacttagcgcttcctgacagttccaacaagagcaagatttatctttctacccgaactatccctgcagaagtctttcccgaacctcttgagcaatggacgaaacaagttcagattgttccttcactacgatcagtctcttcctcgggggtcatcaccttttcggatggaatgacgcttgggccagaagaattagatgtcgttctctttgctacgggctataactttgcgtactcgtttatcgatcagacgaaggatgaaccgtggaagagtcattcggtggtcagtccccgactggctgttagtcgagagggcgacgcggagaggcctccgccagagaaggttcagccagggttggaaggccgagtcggaggttcggctgtccatcatctggatgggagctgtgagatgttctatctacctgatccgactatcgccttcatcggtttaggtgaatacatcgttttgttttcggttgttttcgttgtctcgaggaagagtgattgaacaactccctcgctttcgtcgttctttctcatatagcatactgggtcgtccccttccgattatcagaggtccaatcgcgcgtcatcgcttatgcctggacacaagcccgccagatacccgctgaacttccacctattcagaaatcggaagaattggaaggtaacccccatgcgatcggtatgccagctgagtggttgaacactaacggctggttgaaagctatcggagaaggcggccaggtcggttgagatttcttccttctctttctcttgttttgtgagagtgaagggccattcgaaaagcgagtcctgactgagatggttgtccgtgtgtttggtcttatttcaaaacaggacggacctggttggcacgaagctactgaagaatggatacaacagagaacgacggcaaaggcgtttagaaaagagttgtatggatactagattgatctctttatcttacttcaaccttttcttctctaaattatcatttgttcccttgttctcttcttttgctttgcatagatctgttcatagacatgttcctctacaactatagtgtgattggcaaactgagccaaaagtatttaacattctatagattaccttccataagtgaatacgctcgagctcgaggctgatgttgtgtatttcatcccgatttcttcttttcaaggcccacctagtggtgggaaagcagatttggcagagagaacgacgatttgatgaccatgagagatatatcctttgacgtaaccctataagaatgaagaaacgtataggtgatatatgtcagaagagcagggtcagttggtcaaatctcccggtttggcctctccgctttcggccaaagcaaggggaaagatagtagaagatgagagaaggatgtaacgaaccttgtaaatcatgttggcaattagacattcgacttctgcaggatccgcgtactcttcctcgtcttcaagatctccaaatgagccatcttctactctcgaaggtattggtgtcggtgttgatgctgataatgatgaagagccggaagcgagttgaagacctatttggaatgtcttgattggtattctcgagagtttgttctgagccaaccaactatcatcatatgtccaaagagaaaagaaaagaaagattccgaaccaatcccaatcagtcgattgatcatctttctgagtcaaaaggctctgttaagaaagacgagggcacgtacattttcttcagccgacctctgacgacgacctctcttcccttttccatagccgtccagatcccaccgccaccaccgccaccgccgccgctcagactcaacagcttcccccgaagagcccgaagcgcgatgtcgtaa

SEQ ID NO: 1572 - DNA, 10057 bp, Xanthophyllomyces dendrorhous
ctctgatatcggatcgtctgagggcttgaataaagggaagatatgtatcggaaagtactggaaattgagaaagaaggattggggatggaaggagaccgcgaagaagtcggagagggagaagataaaataggatttgtcttcagtccaggcagagaagagagcgaaacaaaacaaacagaacaaaagtcatcagtacaccaatactatttcggtaagagaataacaaagacgatctcaagagaggaacagacttactccagatttcgtttcgcaagccaactacagcctttgaaagcctcccagaaaagatcttccgcagtcttgtactcctcttccaagaaagctaacatgcccatgtagtacctccatgtgacttggtgggctatagggaatgagtcgagtggttgggggtttgaggacgaaccaatggcgcggatgatattcttacacaacgtcggtcggttaacctatatccaaaggggaaaaaatgtcagatcctcatatcgaggttaagaggaaaaacatgaaaaaagaatgagactgactttaaagtaacattttattgaaagaccagcgatataataaattcccctctgacgagcttctacacctttgttcattctatcggtagcgacgattgtgaaagctttattgatgtgtctggcggtatcttctaacgaaaccggtgttttttgaagacctgatgagattgaatattcatccgcctgttcgatggagtttgtgcacgaagattaagggtgtgaatatataacggaacgaaaggacgttgacaacgaagagtaagaacaagctcagacggaccttctcccctagatctcgaagatctctacacagttgataaagcaccggaagaggccatgatgtttgattgattaagaactggttcataaacaacctatatagattttgagaaagacacgttagaaccaacgcgtttgtctggatccctctgtatcagacaagtcgggaagcattccctcatcgaaggacgcgaaagagaaggagaaagaccgccatgaaagagaacacgcacgaaagacactgaacctgctccttataagcaccgacccaactggctccttctgtctctcctaggctcgagctagcttgcttagagaggacgagcacttgaatatgactgatgacgatctcagagaacgggctgggcaacttgagcgtgtgcggtacgagcaagtttcgctagatgcacaaatacgaacgagggaagatgatcaatgtcccagaacaactcccgtagaaccaatactacacctgtccttagcaaatgaaactcattgctagaagagagaaccaaaacaaaggaaagggcagagaacgaacatgagacccagctagaccaagaatgatcctctctccaatttcctgctgatcgttagccaagaggaccgctaatgtctctccatcacgctctctgagagctttttgaacgatctgacaatacttgggaaacggaagcgggatggcctgggtttgcatggattgcatcgtgagcgtatgacgaagaaccagacgaagcaagatgggaagtttgggtgaatgggttcgttcttccttctatcctcacccgggttgagcacagccttgagatcatgtgtacaccatgagagtatcttctttgcccacatcaacatcatcagaatttcatgagacgagatgatcaaggtataaatatatatgtatgtgtatgtgtatatatgagagcattgcaaaaccagcagtatgcagagaaatttgtgcgcagaaccatccaaagaattggaaacaaggaagaagaaggatgtatacagtgaactgcacgcgacgtctaaaatcacaatcggtcaaagtcggtcaaagacgaatgagagccatagccaggtcggccggtcggttattttatcaaaaggtagactcgtctgcttatctgtccaaaagagggaaattagaagaggagatccttcctcaagagtcctatgagaagccaagcggtccgtcttgcgagctcgactttatcgacctcaggcgctgtcctgctctctcctgttcccgtgtccgtcgccgtcgatattgatgcaggactgtcaaacgagaccccaatatccacccaattctcgtctgtcgataaagaatacttcaaatcaggtaacggaggaaggagagagacaagaaacgcttggagttcgacgaatgtaggtgaagggatagcatttgggtagagaagtggaagaagggatgtggacgaaggcatatgatgttcgacctgtataaatgaatagcgatacacgactgatgtcaggatctttaattcttctcggaactgatctcgcttgaaagagagaaggcgaaagataaaagtcgacagacctctataaggacacctttggaagttccaccagctccgctgatccctccgactttgacgacccattcgacctctctctcccccgtccagcttgtcccgttggaagacgtcactccatagggaatctcgaacgtctgtccatccactttaagtgctgtactttggttacgcgttcgagatagagaggatgttcccatatcgacctgagaaggagaaacgagcacaaagtccatcaaccgtaccagtgagattgtgatgtcgcttttacatttgagcgaagagagacagcctggagaagaaaggaaagaaaagaaaagaaaaggaaaaagaaaaaaagaaacaaacgtacaccttccgtccgttgtttcccaattccagctccagctcctggatcatttacaacaaacccactcttcacagctgccaacaactgatggagacttcctggcggcgtaagactcagcatcgtttgttttttcttgctactcggcggcagatctgcctttgtcgccgaacccgtagcagggttggaagcatgagtagatgaagagttagggacggattcttcgatcaacgcatggatgtagggagacgaatgagcgacaacggtatgtaatgaccgggttgacaatcccggcgagtgagacggccctgctgtatctgtgggcgtagggaaagaagcccgatgggagttcaaactgagaagaaatttcgtcgttggctgagcctgtatgggttgaacacaagtgatcaggtcttttcacaagatagtagaagggatggtgatgaaaatagaacgaactagatactgcttcgacagaacatcagcgatcaactcgactgctccagcagccttgtttcgagacgattaaacccgcgagaaagaaaagaaaacagaacaacggtgagcgtaggatagcaagagaacgagataagtgttctagttggattatcacataccggtgggttctgccatctgagccagcatgtactgtgggacatccgagagtgaggaggaaggataagagaaagatggatagtcaagaagtgagaaatcgattagaaggcaattgaagagtaataggagaaatgattagagagtattagaatgaacgcacgacagagtcactgcagtattcactcatctcttcgattgctggcttttgcgagagaaacaacatatatctgaatggattaagcttttttccttctagaacaagaaagagagtttagaggcgttatgggtgatataatgaaacatccggtaaaagagaacagtataggggaataaattcagaggcaggaggcatcgcggaagagatgggaatccaaagtaggagaaatgagatgagactagaaatactacaagatcaatgcgatctatacgaactatatggaagaaggaaaacaaaaagtcgtgaagacatctttcgcgggaataatgggatcaagtgaccatcaaggagaaacaacaaaaatggttggcagaggggggaaatgaaagcagaggatgggaacaagagcaaggagatctgaacttagatagcgccctgcattcgtctactttgtaagagcggctcgataatctccattgcgtcatctacatcccttacgtcttgaagaatcccattgccagtcagtctggcccactggtgagaatctagcttgacggttcggtccatgtcaagcgctttgatgattcgccgtctaaagattcaacaaagagagacacaaagacgtcagagaagagaatataatgatgaggaaagaggcggaagacacgtactggacggtagacggtttccatgcgtattgtacatcgttcgcagagcctcctctcggttgcgaagcgctgccgaaggaaagaaaagaaaggcgacgtgaagcaatccaaagggacgatcaatcgccagctcatcaagataatgagacacaccgctccctctatatatcgtggctcagaactcaccggaggacctcgctatcccgaccaatctgtgccaatgttgcacctttcaggaacaagttcagcgctaccacatccgctattgtcggcgagtaaccaggccggtatatttttggtttcttgggttctttttgaagaaaggaaagaaatgaaatgaaaaggctaatcagtaaggatgacaggagaacagagagaaaactacaagacacaaaattcaccaggagcaacttccaccatgtcttctagctcgatctttaattgtccagatcgaacttccgagggttttctctttgcttggccggcgttcttgtgatttgttcgcttctctacattcattgggacgcttgctaaagatgatttcccgttcgagcttggaagcgttctccactcctgaagaggtgccatctcgagagtagaatggctaggtctggtgtctgtcgatggtgtgaacgatttggatttaaatctggactcgggtcgaggttgaggtttagatacaggctcaggcgttgcaggggtcatcggccatgtggacgtcgatacattcgattgtacttcctccggcttgacgaaagttgcagatgtctcctccgggtcgacgtcaccatgaaggatctccctaacgaactcatcttcctccatagcttcttcctcttctgcctctctgattgcctggctgatctcttcttcttccgagtcttcttcctccaccaactcatcggtatcgttcgagattgacgcagactgagccctaccaactccatatgggacgtccacgttgacacctacggctggcggtgtactagtacccagaacgggaggcagccgatcgagaatcctttcggtctcgtagtcgaatattcttaccttctcaaggtctcgagtgtggagatgccatgttttggaaagcaccccggagagcgcttgttgacgaagaacatggtaggcttgaagccctgaaagtgcatcactggcagcatctggaaagagggaaggccaagaaggacgagggcaggaaataacgaagagagagggtgagccgggggcaagaagggtaaggatcaaattagaagcagcgaagagcgaacgtacaagagatctgttcgggtgatagtctcctgttattccattttgatttaacaacgctcggtggcttcgacagggatcgacctaatagcttgccaatgaattttgctagacttcgaggctgagagtgaggagtgcgcgaatttgatcgtcagtcatcataagaccttcgttcattgtctgatgatgaaagaaaaacgaggaggagaacgcttacacctgaatggttggattccttgagcgatatttgatttaggtcgactactccttgaacagaagtgcccagatccttgtcaatcttacaagcgtcctctggaggaacgattaccattgataagcatgacccaatctttcaagcggttagcatgtatgtatatctgcttttaaaagtcaacttggaaaagagactcacgtcgaataccgacgcctactttgacaaaactttcgtcttccagcagcttgcacagttcctccggcggccggctcatcttgaccaaatggacctaaaaaagagatatcagagtgagcttccgatatagacgaccgagttaagaacataaagattaatatagacatacgagcaagataagcttattgtctgctagctgaaccagggctgtcggggagggcgagacgcctttccgatagcttggcgtccattcgatatccagcccgataggcctgtttcacggaagggaagagtcggatgagaacccattaagcgaacaagatttcatttcacatccatcaaaagcacacagatataggacgtacgaagtgagccgtccgatggcagcattggcttcttcgattgtgttgacgaagaggacttctggtggatcatgaccgtctggcaagaagtccatgtggttgtaagctggcaggtcggcgaatgcgttcaccttcttctttttgggctttctctcttttgccgcggccttcatcttttgaagttctgctttttcaaacagacggaaatgactcttgccatctttatcgaagaacgactctctatttaacaagagatgatgaatgtttggtggttgatgagtgacaacaagggtgaaaataagagagtgggaatgaggaacaatgacaatgaaggctgacaggggatgagtgataaagctcaaagacaaaggagagacgagtaggaatcataagatgaaatgaacgagagaccgacccaatctttttaaaaggaggaggcatcctaggagacttagcagtgaatccccaaactcttctgatgacgttggtgttcggaatgttggatgagaaagatctgtgaacgatcacggacgggcggctcgacgaagaaggcctaaagatcagtctccctggtactggaccatgagaaacagatcgtgccgagtacacgacatgggcaaacattgctttctgaacaaaagcacaaaaaaggtggcaagacgagccaacgagctgggtgagaatccgacgttagagatgatccacccagacgaacggatagatgggatgggatgggatgggatggagacaatgtagactcgattaggaaggaaagaggaaattcagagacatcacgcagaggcacgtcagcggttacattcaatgggttagtaaccaggattaccgtaatcacgtcgttgggccaaggtgctctgccggcgcccagcacagaccaagtgttctccaccaagatccccaaacagagcgtatccatctaggttgtcgaggcagagtgtgcctcaagagatgttgagcagagcacctttccatcagaaatgaccgttcgagtacactcccgtcaagactacttactgtgcagagtacgactgatcagaaaacgcccgatgtaacaattagaatcacgtgattcattgggcttacctaatcgtaaccagtcccccttcaagccccccttgttccccccttcccgctctgtttccttcccggctgctcgtttccactcccacttcttttttttccttttccgtcctgttttgtctatctaatcagtttgatcatctccaacaccatctatttattcgttcttcatcccatcacccatctttcttccgtcttcctcactctgatgcctcggtcaaggcattcgacatcaacacctctacagacggtcgtgtcaaagtctccttcgccagcgtctagtccgggaaattatccaccggcacttgcaccggctcctccttcgcctcttgttaccaggcttcgtcaagatgctatgtgggctgccgtcagtcagttttgtgcgatgtggcttcccactctcggtggaatcgattgggatccagaagtacgtcctatcacgttctcttttcttcttatcctctatctctccttttttttcttttctctcgttcccgtttcctcttccccgtcgcgtccttcgtgtttctcaaactgacgatcttctcctttaccctcttcttgttcttctcctctttctcctcatcgtcactcacttttcatctcgtaccttctctttagaggatcgagtctgattttgacaacaccgaggatagatacatcgctcccatgatgactcagcttctcacttctcttaccttggataaacgtatagagtgagtggacgtcgtctgtttcgcttcctccttccgatcatccctcctaccctcttccgatgtttgttcggatgtcacccgccttcagattttctttcaaaccggactgaaacatctcggactaacacggatgcttcttctctttccacatcaaacttttgacgtgactagtaagaccaactgggttcgccatctccgcttacagtacctctcccgttcaccagaaacgaacgcgttaggtacagaggaggagccaagagactggcctgaacttgggttaggtgacaaggtttgtttcagacgtgattcgttcatccctccattcggatgcaagttctgacagaagtcgatctatatgaacgcgtctctctctgtttctctgtttcttagcttcgagcaatgcacgatttgtgcgagtggcagctggtcgactgtgaacgattccgaggactcgttctcaacggcgagcccgacgaggaaatcagctgggttcgttctcccatcttttcctccccgttctctgctctctttccccaaaactcttgctcaagcgcgtcatcttttctcactttccgcgctctcaactcatacagaggatccatccggtcggctgggacgccaaaggcaacactttctggctgtttgatgacagcagactctgggtccagcacccgatccctcctaaaccaatcaagatggtcacccggcggatcaaggtacctcgtgagaaggtcgtggcaagaccaagaggacggaggcagagaggcaaagctgctgctcctactcctgctcctgctcttgttgagagtagccctcaaaaatcatcgaggacgaaacgctcggctccgctgtcaccgccggcaccagctcctccgccagtaaagaaggctagatcgaccagggcttcactccgagcatcattaacgcttcctgaatgggaagagattcctaaagagtggcttgatccgctccagccggaagcgggagcaggcccggaaccatcttcctcatcctcatcagcagcagctgtcaagacggaaggatcgaaacaggacgccaccggttcaatagatagacgcgcgctgaaagggaccggtctcttgtcagacgatgacgagagcgatctgagcgagattagtgatgtcgaggaaaaagaggaaggtgaaggtgtcgattgggactgggcagaaatcgaggaggaagaggaagaagaaccagatccaagagacgaaattgtcaagatgaaagagaccttggctgggtttacagaatgggaagccgtcagtcctctcgcatccttctttcatttcaagcgctttttttttctcgcgctagaatcttgatgtacaaagactaaactctcctgttttcccacctcccgtataggtctgtgtgtgcaggttcgattgggaaaactttccaaaacaatttgagaattcagaagatacggacgaacaaatgttttacgagtatatcgtagagaccgtcgctcctcaggtgactgccgctttcagagtcagtgcttcctttctcttgcctcccttcgatgacgaagatttttctcatttcgccacctgacgtgtcctgtctcgttctgttatgctctgctctgttctgtttattcccaaacgcgtatgcatatatgcgcgtacaaaaggaaatcgaacaccaaaagaagcttcaagaggcgattagaaataggaaacgttcttcccggatccaacatcttgaggaatccaaagctgaacaagaacgacttgctcttgcccgacagtcgaccgaggcgcggatggaaaaggtccggaaggaggaagccgcccgggctcttgaacttagagagaaacaggccgtcgagaaagccagggaggatcgattgaaggagagggaaggtagactttggcagagggaggaagccgtcaggctcgcaaaggagagaatcgaggaggaaaaggcggaagagatgaggaggagggaggaaaggtacaagattcggatcggagagcttgatcctacccagatcgaaggcggccagaatgg

SEQ ID NO: 1573 - DNA, 18701 bp, Xanthophyllomyces dendrorhous
ggtttgggcagaaaaggttctctcaatgggagcgcaaagaagaaggtctcgcccacaaagaagaaggacaaagactggacgcttcgatgcgaggtctgcaacctctacgcggtcaacccgttagagtttggtccgattatctgttgcggaaagtgtggagagtggcagcatgaagattgtttggatcaaagggatgcaaagcaaggtatccccaaacgtaactggaagaaagttgatttcaaggtaagtctctttgcgctctttcaaagacggttcacgcgacgaatctagttctctgacccactctgttgacatgtttcccattctttcttcatcctcgtagtgttcatcttgtcagaagaaacaggccgagaaagccctccgacggaaatctagtcaacagaacattcaaggttcacctctctcgagtcccgctcaacctggaaacactcaaactttaccaccgtcaaccatgacgtcaacatcatcgctaccctccgcgcctgttcctctcctgcctaatggaatttcccaccccgggttcttctcacatagcgtgatgtctccccaacagcaacttcaactccaacagcttcagcttcaagctcagcaagctcaggttcaacaccagcctcaacgccagcaacagcgtcaacatgcggttcaacacatcggtcttcctccctatcagagctcatccaacggatcctatcctgtagctgtaaacaacagagtgccctactcatcctccccacacacccaacctggtgtgccgacatcacatcctcagtcacattctcagccccaccttcaacctcaaggtcaggcccaggttcacattcgatccccaatatatgccacctcccaagttcagccccaacctcaatcgataactcactctcagacatcgcttcagtctcaatcccagcgccctgtttcgaccggcgatgtggatgttggagggcatcagccgtatagaggtgcagagtcgtattctatctcttcacctagtgctcagcaacaacgacccatccaccctcaggtgacatatccgcaaacacaagtttcaaatcaaggtcaaaatctacagacgcaagtccaagcccaagcgcaaggacaggctcaatattctattccctacacccaatatcaacagttcccacctgctcagtctcatctcgcaggatatcaacgatctcctcaacagctccctcatcaggtcttccagcagcaacagtaccagcagcagcatcaacgctatcagaacgttcaacaacctcagcaacagcaacacgtcgctcacaatcctacacctccggcgactgcttaccaccagcaatatccgacacatcagacacataaccctcaatccaattcgttctctcatcctcttccaatgtcccagcagtctcagccacagatgccagcgcagggccaggtacaacctcagctatctcaccaatcacagcagagaccgcaatagtggtagtgatgacaatttcgaatgggcctaggaattcaaaatctgattctctccactcgctctcgctcatcttgtcttcttctctctctctttcttgtctggtccttttctttgtttcttatgatattctttcacccctcctcccttgattccccatttcattctgtcttgtctcagcattcttgttccccctacattcttcctcttctgtttttcactgttggttttccattcaacgcttgtatcagcaaaattcattcgctgttccacatatcccttctctctttactaccttttccttcacccttttcgtttttgcttatttgatccggactgtgatagcctgccattcaaggcatatctctgtcttcgctctttctttttgatttttagtatatatcgtacagatatgaatatggtctaggatggggccgaatctcgaagagtcacatttaacttaggaagctaaagactgaatttggtggcactccatatatagagtcaaccgtctgaagggtttccaacgagcaaacagattaaatagcgaagatatagacaaagaaaggtaattaaagaaaaaaagaacgaatccgagactctcgtgttcaagccgacaaagccttctcgatccccttcaacaagataccgactccgtgcgctccggggtcgggtacgttggccttactgagttcttctctacctacgtaagcagctctgccagctttagcctgaatctttgaagtctcagctgctgcgtcgaccgcttgacgaactgcgctcgagaaatcattaggggcagaggagaactgggtctggaaaacctcgagaggatcgaccagggttctagatggggctcgggctacagtgagatgattagacaaccattgagttagatttctagactgaggaatatcaaggtctcaaagaagagggaaaggaaaggaggacaaagacaaacctcgagtgtattcgtacaacgtgttcttggcgaacgatacagccgccgcccatacttcagccgtagcagcctgagttttctgagcttccgaagcttttcggagacctgaagcgagggcattgaagaagatggagtacaaggctccgctcgttccgtccatatccctctcgatctgtttgtcccgggaagagttagaagatgaaaataagcatcatagtcttggcgttgaagcaaaaagaacgatactcacgttctcagccaacgtcaagacagcagaaatcacatccgtttcgtcgatctctcctgccttgagagcgttcaatactccctcccctcctgacttcaagcaagttccacagtctccgtcacccgcgattgtatcgtatctagtgatctctggttcagcagcgataacgtcctcgcaagcttgcttgatagctgccaagaaaacagaagacgaggtagctgatagatgtaatttgaaaaagaaaagaaaaacttagtcatgatgttctcaatagaagaggtagagcaaccggaaggccacttacgaggcagaggagatccattgttcttgacagccttttcttcactcgaagcttcctttgtgtcgacgtgaacaacaggctcgctagcggcgttccactaaagagagaagtatattcatcagtcttcgaaacaaagaagccaaagcacacgaatggaaaaaagagattctcacagcccaaccaggagcatctcccggagcgtcaacataggagagaagctgatcagctgtgtaagcactctctccttctctaggtaagaggaaaagagagactgagaatccaggcatgtcaagcgaggtctaggaaacgatagtgatcgtagtaagcgcactagagattaaccgcgtgttaaagtactctaagtgttgacataccatgtaggtaccggcaagtactcgtcggaccttgagacctttctctgatgctacctcaatggcatgtccaacgatgccactcaactcgagctggctgattcctcccaggttgttgatcatcaagacaacctcgtcctttccgtcgcctttgaaaggaacgaatgacctatccgggtcagaggtcgaaatggagaaggtgatcatttggttcaagagatccctcgtcttgggtagggtaatcttttcgagacctggctcattatgaatacccataccactaagagatgtacatgtccgtaagtcaaggtgacgaatgtcagggacggtcgaaatagtcagcgttgatatagtcagatacatacagttccatctcatctgccttcagatgtgactctgtgctggttgatccgggtaactacaaagtagtgtataaagaataagaatgggaacaggacaacagaacacgattgaatgcttgttattgacaggtagacatcagagaatagtaagaacttacgctacagtgctcgagcccgactcccaaggttgccgttctatcggccacgtactttccaagatcatagacctcgtcaatctctgccccttcctttgccagcgctccggcaattttgtaaacaagaacagttcccgccatacccctgcgaccgaccattttaccctgctctcgaccgaccgagacatcttctccgacggcaaggagtcggattttggatgatgggttttgggcggtaaactgctctttcgcgagtccaaagtggaggacatcgccagtgtactgcatgatgacgatcaaagttctgcgccggtagcaaggagaaacgatgtgagattgagaagacaaagtggaacgaggttgctgaaggatgtatggatgtggaaagactaaccccttgtcattgtttacaatctcaagagccttcttgacttggttggtgttgggtgctagaaaatgaaagcagcgtctttgagtactaagagcagactctggccggatataaagacaacttacaagcgaatacattgccagatctaaaggataagtaggtcagagttcagttcttaacacgtggcataaaatgacatgttgtacatacactgcagcactcaaaagaccagctccaacgaaccccgcatgggaaggcctgaattaattatcatcggttagtttcttgaaaacagcgacagattgccagctagtcagatatgtttgaattgagaacatgtactgactcatgaccgcttcctccctatttttgttgattttttttccgacagaaggaaaaggcaggctacagatcagcttcagaatctcctttcttgtgtcggataccgaaatcatacgtaccccagagatgatggaaacctggtgaggaactttggccaaatggataactacatttcccaggtatattgagtttagaatgtacgaatctaccttggcagcagcagaagatccaagcagaaaaggagacacttttgaccatacctttgtattcttcgttaagctttacattagggttaagagctacgactcccttcagagcgtcgagtacgatagccttggggtcgttgacgatgtgttttgctatggataggaagaacatgtaccgtaagaaccggacgaaaaggaaagatatcagcacaaacccctcttgctccaagatagatgagaataaagacgcacaagataccatgatagttctactaggtatgagatgagatgagtggagaagatagagagtaggatggaacaggaagaagaaagtagacaaacagaatcgaggcgacagttaaaaaagtgaagttccggatcggatgaccgggatgacgttcggcaaacgacggatctcagatctgtgcaacagatcacgtgatcaacaagctgcttaatcacctatcaaagcatctcttatctcttaacaacatctcactttcgctaggaagggtacatacgcaacattcaggcaatcacacaatgtctacattcgcacagaacacgttcaacgcagcgaagtatctttcgtttcgacctacttatccggcttcgttctacgatatcgtatacagttaccatcgtcatcgaggaggttcattcgggaaagcagtcgatctcggttgcggcccgtaggtttcaactgaattcttttgccttgaaagaatcgtttggagtcaacgcttttgatgaggtgctgactctctttcatcttttggactcttatgcatctggatttatagaggtttcatcgctcagaacttgtcaaccaagttctcgaccgtcatagggattgacccatcccagaaaatgattgattcggctctacaaccggagaaagccgaagatgccaggattgaatatcatgtgggatttgcagagaatctctcaagcttcgtacagaacgagagcgtcgacctgctgattgtcggtcaggtgagttttagagatttgatatctgcagctttaataggtagaatattattgaccaaatcgtatctatcatctcctgatgatgtttgctctcaggcatgtcattgttagtacagtctcacgcatgttcaatcgaagcatacacactgatcgcttcctgaataccaacacagggttcgactttgataaagtttggccagagtttacaagaattctgaaacccaagggaacggtggctttcttcgtaggtatctctttatcgctccatactttgtggacctaaggatgcgagttaatcgaatcttgcgcttctgatacgtcttcataggggtatggaggtttgttcctcgctgaatctctactctccatcttggtccctatcttctaaaaagctgcttcataccatcttaaccacagaatttcaccttccaaaacatccctcgcaaggcccgttgatcagcaactactccaacagtccgtcctcccttggtccatactggcaacaacctggacggtccatcgtcgaaggtctcctcgatgccgttccgttccctacacccatatctccctacgctcctactgaaagctctttgagaggatgggagagggatccggctgcactcgttccgccaaatggtatattagacccggaaccggcttcgccgaaaacattatcatcggttgaagcctccacatgggatccatcttctttcctccggctgaaacaattcccgacattggtcacgaagccgatcgcaggcacacctcaagcggatattgccgaagggcaagtatcaatcaaaaagacattgacttgggatcagttggaagcgtacttccgaacatggtcttccctgcacacattccatcagacccatccagaagataaagctcttgagagagatatcgcatcgaggcttatctacaggttgagacaaggcgtcagacacgatctcggaagagcacaatctggagatgcggtggaggttgaatggccttcgttattgttccttgctggcaagaaatgaagttttcagattatgttctgtcttgcgcttaatcgaatgcgttagttcagctcatcagaaggaaagagaaagaggaaagtggccgttctcgtcatcgatcttcgtagatatgagaaagaaaaaaagggagttacagaagtttttttttgtttctttgtcgcagagagttagagacgaagaagagaacactaaaagaacatatggacgtatccaacgttgaaagagaaagcgcaactagacgcgacaaagcacgacaacaaagcaaacgacggggcaaagccaagcgggatgagacaaaagagaaagccagttttgagcatggaaaaaaggtaatgaaacgaaaacgaaggaaacagtagtattgagatgagaaaaaatgcttgactgtggaatgcgtgctcgtttattgtagcacacagcaaggtagagaaattgagaatgaggagtcaatgcagaagagtgatgatgagaaaagttgtgaagtacagaaatgatttgagacggtaaagagaggagggaaagaatcaaagactagactgcaagaaacatgctccaatttgaaaaggcgagcaatgatgcaaaactcaagggaaaacaaacccataatcaagaggaatgacttgagaaggaccgaatgataagggaaaataaaaccacgcaaagaccttgcaagaaggagaataggattaccgcatgattcttctgtttctctctatcggctggcctggtctaattcagacaatcccaagcccacattctcaaactgcctcagccctagagagttccacccagaagatcccaggcctgacctcaagccctggctactgtactcgacgtgaggaggcgatcgagtatatgcatgcacatcaggtgagatgtgagaaggcgatgtgggattattcgtccatgcttggagcaacaatcgcccgacgtctggttcgacctgatgattttgaaagaaaaaaaacgcattaaagaacggttaggttagaggtctcatggctggtctgaagagtgacttgacgtacttcagttccatctcggctgactttctgtcaatggttagatatcgttcataaccaagatgttgtgatcagctgatgagcaaaggaaaatatcgcgccgaaggaaccgaaaagaaattgccagactcacgatctctcgatcactgttccaagggtttcgaagatgtcgaattcgctggaacggtaatctttttgtttgaatccactcgattttaaagggagttccccaggttcctactcccgtatccttaggactcttctcatccttcgagtcaacggccgttcctgtttcggggttgactgccttgggagaagtagccgacagaatgttaggtgagggtgggagatggagattagggaagtagaatccgccggtgagtcgagaggaggatgtgtcgagggaagaaccagtaaacacgctaggagccgagcctgaggagactccttcagatgaagagggaacaaccgattcaagctgatcttttcgttttattccgttctcatcctcgctgttgtcatcgccatctggattgatgttcggactggtctcatcaagatgaaggtgaggcttgtctctacttaacgaggacgatcttagatgatcaggcgaccttgacggagaggtatcgggtgatactctcgaacagcctgccttagcaacctcctcgatgattgcgttggtctcgacttttgtcaacggtcggaacacctctgatggatcagcgattggcacgtgtgccgggctggacgcctgttcgagctcagcaggcgcgcttgattgatggaacactggttcccggtacgcttcttgagaaagtgttgagcttctaaacggagggatatcgagtcgaccagaagcgtacttcttttcctcccctggcgtcaattctgctggagaagtgctcacatcaggcaaaatctgactcgggagtttcatccctgcggccttcatcgagggagttagctttgagtggcctgggcgatttccagatcgtttgccgcccaaaggcttatggggcgccgtggctgctcgaccgactgtttgagtatcatttgcttcttcctccgcagtctccgcgatacgatcaggagccgatcgctgatgatgagggtggacattaacagagcccggaccagaggatgaggtcgagtgcgcagaaccaatcgatcctcgagaggcccaagagacacgggtggtctccttgttgatcggtccggccattctgtgtacgtcaagatcatttgtggtgtagtcagactcgatgtttatctatgtcagccccagatcttgaaggagtgtgaggaaaacgtaccgagcatagccatagaattcacccgtctgatttgctccaaagatcaagaaaacatctttagatgtccggaaggcttgatcgaggacctgctcgttatgcggctgagttgcccacaagcctttctctgttgacgtatccagatcggtctgtaggtggtgatattcagtcgaattcgtcagcatagtgataaagatgaagaaaacgataggatataacttaccgaggtcagacttttgagaataaagtaacggacaggaaagtaccgtgcaaggactgtaacatcaggatagtagatgttaaagttagtcatgttaatcctcttggtactgaggagaaagcatatatgcaagaatatggctctcacaactcgaatcggtagacgcctgagaagacatcgttcgaagactggctgtactcaatcctttttcgggccggtgaggttcccaatctggcgcttgtccctctttgacttcatctacccgtggcccttctggttgattcttatcttcttcgtgataggatgccacaggtatcgtcgtcgtcatcgtctgaatatctgttcccgcctcctctccttttgcccatttgctctttacccaaccggtatgaactcccctgcctctctgtcctcctacaccggccttgagctggtcttccttgtttctgatacgacatactaaacgaggactccttgccccttctgccggccgaatcggttggttattaaagaacgcaacggcctgaagaagagtgggttcgtcataataattgatgaagcagcagtttgaccgggcaattggaaatattgaggacacgactggatgctgtcgggagggtggggtacttgtatcagtcacggtcaaagaaggagactggggtcggactacatttgaatcgggagagggcgaagatccctccaaagagttaggaagcggcgtagtgaagaacctccagagttcttcttcagttgcatctgaaggctaaagttagagtaatggatgatgccttgattagtgttggttcgacgatggaagtgctggaaaacagcaaaagtacgaaccatgttcccgacccacatcacaaactcgcttctggaacagaattgatacgaaaagatggtttaaaaaaaattgaacaataagagaagaaaaaagtgagactgatggggacttgagtgagattacaacggttgtaacacaccttgtagcggcagagacaggatgccaagcctttcgttccagcgtccgggaaatttctttcaatcttggatgtcgcctggggtggggttgctgagcgggagatgccgaagacccaatcacttgtttccccggtcttgcaggtgcagaccctaccacctgttgacctgaagagatcgatggaggcggaggtggctgggaatataccggagagatattgaccgggctgtagcctggtggaccgggataagccgtagggttaggatatccataaggcgattgttgggaaacgtaaggcgatatcgttctcgtcgccgatgaagcctgagttgatgctgtaactgtattgagaggcgaagaatacggagctgagcctggactatgcttgagtgagtgtgcctcgtaataacctccaactgagggcatgaccggaaagtacatccatgtctgaccatcggggccttgaattgtctgaggagaaggagaaggtccatagatcgtgctcgcttgactgctgttcggggacgccggctgagagactccaccataagacgagctggatgggggaccattgaaccctctgggagggatgggcggagggtagtagttatgggagacgttcggatagtaaggcgcataggttgagggcgtagtggaatggacggatgattgggatgccatcgatggagatggagatggcaagcgctgctgctgaagaccgtgcctatgaggaggcatcgggagaggactggcaggaagagaagatgcgtaataaccgccgaatgcttgataaggtgagcctggggggattccgtaggcaaatgaaggagctccaaaggatgacattggaggaggatgatgttgctcgggataagatgtccagttgttcgatcgactagacttcccaccattatttggcccgttataactgtgggatggatagaatatcggaggcccgggccgacctacgaagagaaagcgagagaagcgtaggtgagcataggagctaatgcctacttccaaaagaatggcacgactaaccatttggcagttgcatgttctgtccagtgccaaaagtcggtctctgttgagaacctccagaggatgtcgccggctgaccggcaccgcgtccgttctgagcgggaacaagatgggacaccctttgagaagcaccgctcgatgccgtcattgtcttagaaggaatagaacggaagaggtgatggagtccgtcgaaaattcctagcgtaaaggcttagattcatttacatgtcaagaggccagacgatagtgagcagattgaagctgttatttgcgtccgtcttgatatccctcattcagaacttaccaagcttgttgtcagaggaaacggatgatggaacgggatggacttgatcgctatatttctccctctgcctgcttgaagattctttggccttttcttttttgatcctttctttctctacctggttgttaaagatttcaagagagaatctttctctggatgggtttggcctttttttctgagccagtattcttattcatgacgtcactcatgacgatcagcctgggcagggaaggtatttcgaagaggcggcttatgtagcttatattccacgtgatggtcgggaaattctccgatgacgtcatcatcaactcacgtgcgaccctttttttccttttgcttattcttaagggtctattttcgatcagcatggcatcgctcttacagaaagagttatatgctggctgtaagatcgatggatgagtgccttatgtgtgatacatgtgcgaagactgaatgtgatttgttctgatgctgctatgtgtgttcgacggagtgtctctataaatgctcaaaatcggatgtttacgaggccaatctgatatggagggagagagaagattaggaagaagacgttcaacacatatgtacacacacacacagtctttctctctctccctccctctctgcacacaaatgtatcgagaaggtgaccaaagtgccctggagtgatgctgactaataaccctagcaaacaatgtttagccccaggctggcgtaagtactggccgcgtcatctaagttaatggatagtcgtccttcttcagttgaaggggctgacgacactctctactcaaacgtctacaagttcatccccaaagactcagctcctagtcgtcttttcttttgttcgttctcctcctaggttgtattctacatcgtcttgatttatcaaagccagatcggagaggttgccataaagtctaggtatgtgtgctttctctcgatatgctgtctctgtatatagcatctcatatccaggacttactccatcacctctcgattcttgaaccttcatagctcgcctctttcaatccaatcataatttctcttccacttgaattgctcaaaatccttagaaagaccaacaagcaagagaaaaaagaaatctcattaccctatcatcatcaccacaaatactatgtctcagtcagagtctgacgcaggccgacttcatcggccaaacgatttagagggcatgcatcgtgactttggatcggttagtactggttactatatcatcaaatcctttcggttccttgacgtgcccaaaaccaacactgacatattccatcaccaacataggtccgagccggaacacaatcgtgagtattcgaagtgatgactgtaccttctttgctctgggcaacatctcttgatacctcgacgcttgactgacacctcttcttcctctgccactccgctgcataatttcctcatcgtccactccttttcaaaacagtctggttcaagccatgtctgctgtgccctgggatgatgctgacgactcagactcctccggatcagatgacgagggcgaaacggtctccgtcgaggaaagaaggacaggcagtgctacctatgcacctcaatcagatccagcttttgggtccggccaggctgtccatgaaaagactaacccgagtaagccctctcccacgcggcctgaatatcactgtatctccattcctcatccacttgaggtttgactgatatatgatgcactctaattgtccacatagtgcgcccaactcattcgtcgaggatgtcttcatccattcataccattcaccgaccagttgcctactctcgagcgatctctgaatctcgaacacccatgctggagagaaataaaccgtcattctccggtcacactgatgcttccggcttcaaaaaagatcatacccttccctctttccaccataccgacccttatctttcgcacacagtcaaccctggacaacattccaaccagaatttggacaaggtcctttttagccatagagagaacggcgtcgaaaagtttcaggcagacaatcccactgcggacgaacaagactacgaacaccagacttcagataaatccatcctacacggcacccgagaaggtgagaacgttgagaaggaagaagccgatggagacagagccgaggaagagctcgttaaaggagattccatccaggacgaatcccacgagcaggaagcacgaagcctgatgtcccgaaggcacccagacaagaatgccaataccgatgagcatagttcaatcggacgaaggaaaagaaagcagaagttagccgagaagctcagggacgtattcaacctgcccgacgtggaaccggtccttggtgaactaccctgctggctcctgaggagtatctgttcgtatcactctataccaatcgtcttcggttatgtgggtatatgcaagcgatactgacttaggtctcggtttgatgtgtttggctatctcgtcttagtgttgcagggatacatgtatctcaccactggccatctctgcttttatgctgctctgcctaacaacgcagaggttagtgcacccaatcctgatctctttacctcttctcgcgcaccttctacgtcgtacgcttccaatgtcatttttctcgtcaaccacatacagcacaaggtcatcaaaagcggacctctgatcaagaaatctcgcaagagtttgcgggcaaacaagtactggtttgtattgaagaacggtgtcttgagttggtacactagctctgctgtatgtacctatttttccgaaagccatctcacaacctcatcttttccatttgattcacatgctcgcttgagccctaagatcattgccactgacgagagtatctcacttgcatcttggtcaccgaaaggatccgtatttccctcaaggaaacgtcgacttgcagtacgctgtagaatgtgaacccttcggagagaaggctctgaagttaagcacaaacaggaagaccttacaattctcatcggaaactgttgccggcagagatgaggtatgtttatctgagtttctgtctttcgtaccaactaccccttgggctctcgactttcctatggcatatgcgtcctgacaggcttgttatggtgtcctgtctcttctagtgggtcaaagctctgcagaaggtcatcttcaggacccagcacgaaggtgaaaatgtcaaggtatgttccatcggcaacggttacattgagtttctttcctctggtagaaaggtttatgttcatcatgcttatctgcgtctgtcaatttacgttttcagatcgcgattccgttgcaggcaattgtcgatgtagacaaatcgtctaacatggactttgccgagacgatcgaggtcaaggttgccgagggagacgttacgttggctgtcgattcatactttttcgcttacttctctgatctagaaggatctctccggtaagtacattcctattcatctctatgatgagatttgccctgcccatcattgacaattctctttgttcatcgtaaacaaaagaaaaatccgggaggtagttagctcttaccattcgccagatgctcgggtggacttacggggcacgatagactccaaccgagagcatgtgtttgactccatttctgaggctgcccaaaagaagcgttccatctctcagaactatcctgatccaaccgagaagtctccttcgacgctatcgagtatcaaatccgcgcttctccacccatttgggtcagacaagtcgaaaaacaatgacgctgagcctctgacgtctggtatctcccctcgaccgtcaagtacggggagtgaccttttgctgtccacttctcctctgtcttctgtcatttcttcccggtcaagttctagtgttggagtcggaatcactcgagttggatctaaagatgaacacgttttgagtgaaccttttaccggaacaccagggatgatcgaccgatcggtcaccccaaccccggccgacagccaccgatacccaccaatccccgttcaatctgatttgaaacagactcctacaagctcgtctgtgtcttcgtcttggagcgcttctaatctacttaatcggtcctctaccaaatcctcatctactacagtgtcgtccacaaagacaaagacatcgtctaacccgattgttagcctctttggcgctgtcaaaactagtagattcaaaccattctctacttctgcccgtcaggaggatcttacgaccggacacgaggcgcaaggtctgtacgagacggtttctcctaaagtagagattgagggtgatatgaccggccgggcctcggaggacagctcaaacgaggacacagcagactattcattgatggagaagtcagagactgccgatcagcaggcggaggatgtctcgaaagcattccatgaatatttcgcattggacaagaacgaagttctaattgaacgttcgtatttgtcatctagttcatccctctattcattaggctgactgaaggatacttgtctgatttaaaaatgaaaaaaaaactcgtccgtttacactgattcaaacagaccttcctggattcttgtttagagtcgttccagtttctggacaggtctacatctcgtcttatcacttctgcttccgttcaactcagatgttgtccaaaactcgggtgagattatgcccaacacatcatcttgccttgtgagcaacaaaactgacagtcttgtcttgtggaaactgtagatgattatcccacttcaggatatcatctccattcaacctcagaaagctttcaggttcagtcaccaaggtctagcgatcattatcaaaggtcatgaagagctcttcctcgaattttcatctaccaagaaacgagatctatgcaagcgcctgttggacaaacagattgaagaggttaagaccggccgagtgcctaagcctgctcatgaaggtccttcagccgcgatgaaacgagaggccaaagtgctttcggatctagacgcgaaagacatgaactccccaacagattcaaactcggcttctacctcgctggagacgacagataaccttccgcccgttatgttcacttcggcttcttcgacgttcttaaatttcaagccaaagaagagccttcatatcacttgtctaactatcggatctaggggtgatgttcagccttgtgagtataccttttctgggctacttcttataatttcgataaatggcaagaacgagatggctgacgaatgaagtgtatgactgcctcttcttggtaaagacattgcgctctgcaaaggactcaaagctgagggtcatcgcgtccggatcgcttctcagtgagttgtccatcttgcaacgtattttctacacatcttctcgctacaggtagaggaggctaaacatgaacttcgtttgatagcggtgaatacaaggactggattgaaggcgtgagttaggatatatcgaaaaccatttgtaagaccaaaacacttatcagaatccgttcatcttttgtctttcacagcacggaattgaatttggatatgttggtggagatcctgcggagctgtatgttcttccatcgattctggctgtcgaagaaagagtactaatctgttaattgggtcataggatgaggatttgtgttgagaatggtaagcgctaattctttcgtcatacatatacatttgcaatgaaagttggaacacgatactgactcgaaattatctttgacctttaggcatgttctctgtctcattcatcaaagagggactcgagaacgtgagtacaaccgtatgcgcctgatcttgctcaagattcatcgctcactttacttcttcgtacactcgccatatcagttccgagactggattgacgatctactccagacatcctggaaggcctgccaaaacacagaccttctgatcgaaagtcctagtgccatgggcggaatccatattgctgagggactaggaatcccttattatcgagcattgtgcgtcttctcctctgctcgctacatcgtcatctactggaggaagaaaggctcttatctgatcttattgtttatcgtatttcttgttttagcacaatgccttggactcgaacccgagcgtacccacatgcgtttgccgttcccgatcaccacgtgagcttgatcgttagattctgagcaatttatccagtacggaaggcacttacagtctgttctatttggcacagcgaggagggtcctacaactttatggtcagtctcggttgatctggtagcacttgccatgtttcgctagtttactaacgatgcgtatcctcccctgctattttcgacgaccagacctataccatggtgtgtgtcgtctttagaaccatgctctaaagattctatctgacaactgtcgttccttggttgctgtagtttgatcaagtattctggagggctatctccggtcaggttaataggtggagaaagaagacgatcgggatcagctcgaccacgttggagaagcttgagcctcacaaggctccgttcttgtacaacttcagtccaacggtcgtccccccgcctcttgactggtacgaatggatcagagtaaccggtcagtgatttcttctttgttttcacggagaatttatcgtactgaactcacatatgtctttcccttttctaggctactggttcttggatgatcccgaagattcatcggagaaaaagtggtcgcctccagatggtcttttagagtttattgataaagcacacgaggatggcaagagagtggtctacattggtttcggctctatcggtatgtgtcttcaactcgatcatctggggaacaagcttgagaatccatcgagtgacagacttttgacaactcatattatcccctaatagttgtttctgatcctgacgctatgactaaatgcgtcatcgaagctgtgcttgactctgacgtccgatgtatcctttccaaaggctggtccgaccgactgagcgcaaaggagga

SEQ ID NO: 1574 - DNA, 3395 bp, Xanthophyllomyces dendrorhous
ttcgaaaactcaataaggagcattttaccgccgctctcaaaacggcgactcagagcgagaagcagatcgagaaagctcgtgaattggggaaagaaatccgagctgaaagtggtgtagctaatgcgatccaggcgatctacagagatctcgagtacgcccgttcgctcataaagggtccaaccagacagacccctcccgatgcttcgagttcatccagcccagagtcctcaccatcaaattcaccaagaagtggtccccatgaacttccgtctgtatctttagacgacacgcctgatgactctgacaacgaagtcgtcttccgtcctgcttcctccaccacaagcgctggcaactcggctaagacgtcttccaagatgaccagtgggactggcttcgctcctgcagacgcacatgtcagcggctcttccacgggcgaagaaaacagtgacgattcgtgggacatggttcacaacgatggttcccattcccgttcgaacaccacaagactggcaatgcaaagcgaaggaaacgaaagtggaaggacgactttgaattcccttgggctcggagcagtggtgaacatgttcaacaagtagataggatagagactctctctttctttttcagacttgtcaatatttgccccttctcttcttctcttcttcctcttctttctatttgtatcacaatttctaaacactctctgtggttactcctgttccatattctctactgttcttggttgtgctcgaggaccgtcatgagatattcacaggactgccgatactcttgctactcttctcaacttgtctttaatctaatcagactgtagcactaatttttattcttaaatcttgactcgtttctttcctctttcctctgcaatcgtaccgttgtacaaatgtcgctttggatcatatcgtgtcttctacgacctaacaagagacgagcatagaacaacaaagataaagcacgcagaaagataagaagagagatgagaaacagtatggagacataaaagtagtaacgagaagaaccaatgaatggagtgttcaagagtcgaacgattgacaatctagatatataaggaaagagatcgatagacaacaagaagatgttctactgaaaagaggctcaaaatcaggttgattggaaagcgtgaaagatgatttaaatgtggaggcgtatgagaattgtcgtcgaaaacgagctgatcagatgttctcctgaacgccttcgtggatctcctttccaagctgcgagcaatcaaaacaaacacaataaattctttgtattagtacatcattcagtttagtcagattatctggaaagtctacctcttgtcccaaggcagtgatctaagggtaagaaagatcagcaagaaatgatgttagcgtgcgttgttattttctcaaatctcgacgcaagtgatggtcaactcacatcggtctcttgagccttatcttgcactttgtccacggcttcttttccctgtgtatgatgaaaagaaggcgaatggatcagtgcctcgtttatagaccaaacagggaccggccttgctacagtgacccaggtcttacctcctctgcagtagcatgaatgacttcagaggctttgtcaagaacaggctgaagagtggtctgtgacgataaccggaaagacattagatcggtacgtcaacatgaaaactgttttggcatgctgataaaagcgcaagatggactgacttgaacataggagactagctcctttgtcttctttcccaccggcttatccttggccaagagtagggtagagagatctcggtaggccttggtgatattctctcgagcctgagccggaatgttgtttccctctttctgctcgtgcaaagtcaggtatagatggagacccagtcaacgggtggtttcaatgagaaacaaaatgaatgggcacactaacttggaactggcccagctgctcgactaagatctgactcagacggtgaaccttagcctgagcatctccggagatgtcatgaacgaactggacgcctgacgagtaggtagttgtgatctgtaaactgtgtaatgacagagtcagaacgaaaccgttgaaccttccgagattggcatgttttatcttacttgatgttggagatggtatcaatcgccttttggcttttaaagatcgattgtgcttcgaaggtcagtactaaacaataatgcagtcactgaaactgacttacacaaccgcgtgagcttgaactccgattctctgttgacgaagaatcatcaccgccggtcatcagttcagcatgttctcacaaggaaagagatcgcctggcgtacataagcaagactaacgttatcgtaaacattcttgacgacctcgaaagcctgatcggccggcttccgggcgtcagactggagcaaccagatacaaatataaaaaaagttagtcttgttgatgtatttttcaactttaattcagatagtaccaacaatgatctggtcagtcttggtctggaaggcgtacgggaagttcttttcggccaagtcgagtctagaacgcagcaccagtatgtttagaatctagtttaagaccataagagcttataaaagaaaaaccgtttaccctttgttggccaatccgtctgcgccctcgataacaggtcttccatacctagagaaggaccaggactagattagtgggcgagcagcgtctaacgggcttgtccgattaaagtgactaaccccaagataggcgagacagcgttgtaactggatttcactacaccctcagccaggtggtaggccttatcagtgagcggtctggatgttacgacagcgagtagttggtcgatggaatcagactgttacacccgtaattagcaggtaagaaaaggagacgataagcatgacgggttagtagccgtcgatttttgctcaccctctgatgcgcgagatgaggacgacttaccacaagaggaattgcggtctatcaaacgaggcgagaccggtggttgaatggcgtttcaattagaaccaatgaagttcatcaggaaggttcacaagattgtgaccgatgccatcaaagggaacaaggtaggtcgaagcgttggggagtaagacgtcatcagggcacatttgtgagcaaaggacaccgagcaaatgaccaacgcaagacagacaaattcgagttgatctctcttcagcatctctcatgactaccgagcaagaaacgatgggagcgtgaagcaagagttacaaaggacatacgactctgttgacagaagtcaaagtgggcaccccgttggtcttgggagattcggttatggtctcggacatgatatcttttctttcttccacataccaagaaagagaagtttgagatacgtctgaaagcgaacgaag

SEQ ID NO: 1575 - DNA, 2390 bp, Xanthophyllomyces dendrorhous
aaaatgtgaacgagggagaataaagacgaacggtatgtgttgaagatcgacgtagaaactgtcaagagagatcaaagtagatcgagggagatgtggttggagaagaagagaaaagaaagaaggaacaaaagaaacggaaggtgccggctcattttgctcgtgaaagcggtcagtggagatatatatacatgttcctgtgtgtatgtgtgtgtctgtgtgcctgtgtgcttgtgcctacgagattggacacttgaggggtccatgcgccgccgtacgtgtgtgctctcgctcgcctcttttcttcctgtactccccaatcgctcgtgttttcttccccaaccaagagttctctcttattcaaggatcgagagagcaatgtaccgagcgagcgcccttccatgagatgccgagagaacggggaaggaccgtgcgtggcgtccaaagagaggagttgaaatctgatccgggatgtttttcacgtgaagaatcactcgagcacaaactttatcagttgttgactgaatgcacatatatcttgaaacaatcacagccaacgattggaaaaacaaggaaagagacaaaactcatgctgataggatgatatataataggccagaccggccgacaagatatggctttgatcctgattgaaacaaagaagagtaaaagaaaaagtagatagaagggtatatagggagacggttgggctcgagtctgaaaacacttggtaggtaatcacgacgtaggcttaaatctaagccgttcattcagaaaacaacaaacatgaatatcaggatacgcctgattctggcccctcaattaaacaagcacagaggataggaaacacacctgaacgcattcaatcggctcctggcgctagtcccaattctatcactctcctcaccatctgcacttccactcctactactcccgctcctgctactatcgctactcattggcagccattctctccgcttcgacctcccgtctctgtctctatctctatgctcatcggttccagcctcgatttcacctccgtcgtcctgctcgccagggaagccgaggctcttcctcttgatcggtctcctcgagattctctcgacaagaatgtctttcccgatttctgtctgcagtgctatgtttccgctgactgaccgcctggttatgagcgacgccaaaggtgttccgatcacggtcgtctctgtagtagtcacggatgcggatggaagatcaaaacgtggaggaatgattgctgaacgtggggtcgatttagaaacatttgattttgagcgagcgtttatcgatggtctgtcgacagacggcactggcgtttggtaaacgtttgatgaaccatgccgcgccaaaccgcggcctgttcccacggacgctgacgctaattgagctgcctgagtgggcttaggcgtttcattagatgtatggaatgagaggcgggagattgttggagtccttgcagtgaaaggctaaatcagaaagagaagagatagcctgagttgattattgttctccctgataactcagtccagagtcgaaacgcttaccggactctccgaggcgctccgtctatctccaaatccaactcttttcaagctgaacctctccctccagccaacggcaatcctctccattcgtttctctgttccgtgttcctcctcatctacctctatctctcctccactgatcccacttccaatgtcacttccatcagatataccgctgcagatactctctgatcttgttcctccgtctgtcctatcatctcccaggccatctgcctcagctggatccgcacagtgcgcccatagatcaacaccgcctttctcttggatcgtcgattcatccaccagagactgcgtggtttttgatcgaggcttcgcagacgacggcaaatcggatggaaaccgagggggactactagagatgtatccttcgtccggggaaccaccgtccagagatgatacctgtgctccctcaagagacgatggcgtaggcgacgaaacgccgtgggactcgacattggatggcgtcaagaggtatgagctgacacgggatgggctgcctgctctagaggaagacactcctggagaaagtgaatacaccgatgaacttccctcgtagatgtcctcggcgatttgtctagagatagaggaggacgaaacgttatctcttgtcagatctgacaacggaggctcgctcagctcgactgttgcttccttccttgcctcattcgctggcttcttcctcctcttatcaccgccgctgccaccgttgaagaaaaatttgctttgctcttctataatttccacgggttcaatgaactccgtcatctcgactgcccgcatctttcctttcgcaacagcagacagcccagt

SEQ ID NO: 1576 - DNA, 38485 bp, Xanthophyllomyces dendrorhous
gaccgaaagcgagcttgtggggttgttgaggaagtgatactgttcgtcggatcatcgatggtgagccgacctttagggaagaagtggctttacctattgtttttagcacaaagtggatcaataagacagagagaaagaaagttcatgtcagttagcaagaagacaagacatgtagttctcatgtttaggcagacatactaaacatctcattgatctttggttgacgctgtatagagatcgtgaaaataaataagcgtcctgttctcaaccggggctttaattgacaactagatgagagacaaataaacagttctcacattgacaaacgtcttgagtccagtcggactgaaatctggccaggggtccacgattcgtttctttgtcactgggttccattcccctctcgagatgcctctcgccagctccaaatcctggatatctggtccgatgaaccggtcttcctcttcgccaaacccttcctcaggaaacgggttcaaagggacgagtgatcggctttcaggatcgaacactcgttgatggaggaacgtgagttccgctagacggaatgatgtcggataatccggagggatcgtctttccttccaagcgcaagtgttgcacaacctagagattttttttccgaaacagttttcccaggagaaataagaacttgagaatttacgcggtgatgaacgtgatccaagaaacgaagctcgtcaggcttaccttttccacagacttgtattttctcagcagtttatgggctgtcttgatgcctattccttggatagaattgatgtagtcacatccagagagaatctgtgaacgtcatttcgtgagcagacctaccgttgagtttctgtcttacgaaaagccaagaagagtgagagaaataagagaatgatatgatacgactgacggccatgtgtctgaattctccatcaccccaaccgtcgaatctccattctccccctgctcctccagatccgtcttcgaaaccaagagtttcccttctgatttcacagcatttcccctctccatccaacttgaacaagatctttctgcatccgaatacgagtagatcagaatcctcggtgatgataccatcaacgtatccgtgaagctcaaggtaggcgagctgcgcatctgcttcataaggggcaacgatatacgaaacgtcttccgcttgaagagcctatgtacgttgacagaggcaaaaggaacggagacggcagcaagcttttaagtaaaggaaggacacagcacaacatcgtttggagaaaagaaaaaaggactaaacatactttgataaactgaaaagccatctcaggggtcacatcaacacatttagtaaacatttcacgggcatctttcaatcggccctgacttcggaaagatttggccttctctaaattatctcgtcgacgtctaatgttattggtagaatatcacgaagaccaaagcttccttctttgttagtgacatcctacaagatagaaacaattcggccaaggggaagatcctgataatcatccctgagtctgcagcttacttttctctctcaacctcggttccggcctttgctggtaggtatcctccgtcaaatacaaggtacggtttgattccatgatacttcaggagtcgaactttatgcatacaataatcgacgaatctagatgaacagtaaagtcgaacaaccaacccaaagaaaaggacggttgatcgttagtgcgtggacgtcaatgatatctgtccagtaattacggagtaaatctggatgaatagacagagaactgactttgtggtctttcggccgagcacaaggtcttcagcgcatccgaacgctcctttgtgcagccagacatatccctgatgtattagtcaataagactcaagatcagaatacttttcagcagtcaaagtcgtgtgtgtgtcgagaaggggacaaacatctacagctagactgatctcgataaggcgccagagaggtcgatgagaatgaaacggtcattacatctagcttggagatcgagatttaaagaaataagggcttacgtttgtccatggtagtctgaaaggtctctccatgtatgagcggttttgagcaactgaacgaatgatgatcgaacaaatgtacgcgatcaatcttcaccggtcagcaccaaggttttctatccaaacaaaccagccgaacttacagggaggagaccttgaatccccatggtattgtgttattgactctatcaaccaaggactgatggacctgaaacaagaccttgtacgttctcaatcgtcctctttccttctttctttctttctttctttaatatcaatctcttggacgcgtcaacgcgtaggcttacatccattacgtgaaccgcgaggaaatccatacaaattcgaaccctgggattttcatctaacaccacgatatcacgacattacgtaacaattgatgaaaatcgaatcgaatatatgaaattcactgaaattcagattcgttctcttcgtgagcgaaatcttctggcaaaccccaccgtttcaaccactctcactcacctttcaaccttttgaactttctttctagagtgagttcttttcattggatatgaagacgaggagatggccatttgatggaaaggagtgaatctttacggtcgggatgactaaccatatacctctaatcttgtaattctcctcactcacctcactgtcaagagctttcgaaaagatgaggttttacgtcgacaagtaccccgaggtggacgacctcgtcatggttcaggttaagcagatcgccgagatgggagcttacgtcaagcttgtaagtgaccgcttctatatctggagttgatcaagtcatgtacattgggcaatcaagactagagctgcataaagaagaaggccgtgttgaaagatcgttacagcatataatggagcgagggaggaggtgcttgaacgatacacaagtgtgcttgaaaaagagggagacatatgctgataaatctttttcttgaatccatctcagctcgaatacgacggtattgagggaatgatcttgctctccgagctttccagaagacgtatccgatctatccagaagcttatccgagttggtcgaaatgaagttgttgtcgttcttagagtggataaggagaagggtatgtatgatattgcatcttttcaaactacatgagtcgctgcgagttgtatgccaggtgtataagagtgcttcagagctgactggttttttctctcactttctgatcttcaacttttttccccatcatcaggatacattgatttgtccaagcgacgagtgtccgctgaggatgtggaaaagtgcgaggagaagttcgagaagggaaaacttgtcaactctgttcttactcacgttgctggaaagctcgagatggaagtcgagacgttgtatgccgagtgcggctggcctttgggttccaagttcgaacacacctacgatgctttcaagctttccatcacgtaagtgtattccccttccttctatccatcagtcatcatttcgttgcggtcaaagtgtcttcacaagttatttgcgactcggtgagattgctaacgcctggacctttctgttgtcgtctctgacagtgagcctgaaaaggttttcgagggaatcaacctccctgctgctaccctcgagactcttcgggagaacatcgctcgacgactcacacctaaaccggtcaagatccgatccgatattgaggttaaatgcttcgcctatgaaggtattgacgccatcaaggccgctcttaaggccggagaggctctctcgacagagtctataccgataaagatcaggctggttgcccctcctctctacgtcgtcaccacaaactcgactgacaagagtggaggagttgaattgatggagaaggcattgcaggtcatcgacgaaaagattacagaggctggcggagagatgagcgtgaagatgaaggtatgtttttatttcttttggtaacacatctaatttctttcaaactcaagattacatgactaaacccctactcttccatttgtgctttgtttcatctttctactaacgatcagcccaaagctgtttccgaggctgaggatcaggagttggctgctcttatggctaaggttgagcgagagaacaccgaggtatctggagatgagggagatagcgaggaggatgagtaaattggggccaattgttgtctgaatgaagcaagaagatttggatgctggggaacaaacggaaaaggcggctcttctctagcttggagagttggcggagcgctctctgtcctgttttagaatactactatgtagctggttttgcctctttttaaaaaatcaatgtgatattctctctgcctctgcccctctgtcttggtctctatactgatactggtaaggtctactgacggacgaacagtcttcagggaagaaggttaagtgaacactgagcgtttgaggcgcaccaagagcgcagcaacgtaggaaggaaaaacaaagcaagctccctccgtgtttgttatgatgaactccatcagacaaacctcatttttcaacctcacctctcgttctctttctttgtcctctttctttgttgccatttcttctttcccggcctagaccgaacagtctctcgacgacctccggtcttggcctctcagcagacacaagtatcggttcagcgtcaaacaaatactaacttcaaacttcgttacccttggatcatcgttcatcctctgcgatcatacctggtttaccaacagatacccttcccttctagcagtccttatatatcgacatcatggacgatcaacagagctcatccgactctgcccgaccgtcttccgctctaccagcataccaagctagactccttgacccgaagtctccctctcgttccggttccagcttatccctccgaaattcatttttctcccaatcgccaacgaaaactgatttgtcttcaacggccagatttggttcacctgttcctctgtctccatcaactgtcaggctgaacactttcacgataggaggaaacacagagagggaaggtatacgaagtatgcaccggtctgggagcaagagcatggatgccactagaggattttgggtagaccaagagaaggctgctgcatctgaggccagagagtttgatcaacaggccgctcagttgaaaggtaacctccacggccttggtctcagcaggaaacctagcttcatacgctctcaacaaaccgggaacagcgagtcaaacgcttctctatcgtcacgacaacaggcgctcgagtctcatccagcggattccttcatcgtatcgaccccaccaagtccttcctctctatcgaataatcatcgatcgagattcgagtcgacttcctcttcctcaagaagcgatagcgctagaccggacagtcctcagtacattcgatccggttcccctgcgttatcgtcctcgactcagcacattccttcaacagcaacctctaacagtcccgctcatacaactcgaaaattacaccgtagggccaattcagcccaaccatttactttccaaccttcgaacccttctgcgtctgctatgtctccctctccgtcttccttcgccatagctagctcaaacaaggttcctgttctgaccagacagcttactggagactctgaaagccggttcttctcgccgactctggcggcttcggctacctctcctttaaccagcagagcgcatagttttgatgcgtctgcctcaaatccgactgaaacttcggatttgactacctccaactccaacatcagttcgacatctatctccaagggcgcaagaaccagaccacattcgttccatcaggacttatccgcaccccttcagtcctcatcctttggcctctcttcgccttccgtcgagtcgccttccatcctgccccctacgaccaattcttattcaaccatgccggtcctgcggtcttcatacgcccgggcgaaaacgtcttcccaaacatctcttcattcgacttttgttacttctcgaccggaatctccttctatcgaacagcctgtcattccagcctcgcctataataccttctatcagggagcctcttggtccgagacgaggacccgcctcaaggttaggacgacatatgcctagaattgctagtggagatgcgtttggatcggacgaccagcaaggcaacgaaactgaagaagccgtccccagaaatagagatacccttaaagttgataccccgaagagatcgcagtgggcggataaggacgtaggaagcatacggagtgtaggcgaaggagacgaagtcatcggtttgtccggctcttctcctttcgtatcctggcagatcgaaagtgtcagccactaatctcagttggcgtttgtttaacaggaatgaaaggtcgtcggagactccctctaacgtcctccttattgaacagcggttcgacttactctttgagaatatcgaccgctacgattgagcgaacccggaaggaggtcatcgccgaggaatatttaacgcgcgttggagaggctcttcagtgggttgaaggtgtcttacaaaaggatcttggattcggaattgttgagttcgaggacaatttgagggatggtgtcgtcttggctcgtatggcagaatgtctgggcgccaaaggctcgatttttgaggtatgtctcttcaaccatgagttgttagtctattacggcacggtgaacgtgatgattctaatgtatgctcacgtcgaactaacttttgattcgattcgatttaaacagcatcctagacttcaatggagacattcagacaacatcatcatgtttcttaattttgcaaaatcgcctatggttgggctccccacgagttttacttttgagacgatcgatttgtacgaaaaaaagaaccttccaaaagtgatcttctgtatccattctctcaggtcagtctactcaactattgcctgtttccccttctgccaatccctcttcttctgagatttacatgttctaaactcttgaatcataaacagtcacattctggccaatcgaggtttagtggaaaagatcggaaatttgaagggaaagctgaacttctcaggcaagtcttacctccaatatctgatcttacctcaatatcatgttgctcaccatgtatattggtctcatgtgttggcctgcagaggctcaacttcagcatgcctcaaaggggttgaatggtcaagccatgccgaactttgccaatataggaaaagatttggcgcgagaaatgaatgtcgagcccccaaaggaaaccgaagaagaaagtaagtcgactcgcacatgttgttcttcaatctactatatttagctctcatttggtcgttgctcgtctattttcagtccaagatcgactcctagatgaagcttcttcatcaatcgaagctcttcaggctcatgccatcggacgactcgctcgactcgactatcatgactttctatcaaccgtccatgcctgctctcgatccacatccactcttcaagctcatctccgaggatctttggctcgtgtgcggtttgcaaaatctttgtctgctcgagggtcccaactagagcctctcgttcccaccattaccctgtttcaagcgtctgcatctggtgctctgtcaagaaaaaggatcgacgcatgccgtaaacagttcgccgcttgcgatagttcagtcaaactacttcaagcccatctggtgggtgtgcaaactcgaaagggctttcacgaatcgaaatcgacagtccgacaacagagtcaaattctcagacaatttgtggctcgagctcagggggcgctcgttcgatcccgacgagcgaccaatgcttcttctttgaatcagatagatatctcatccttcattgctcactccaagggtgttctcgctcgaaatcgattctacgaccagatggatctcctcgacgctatcgatattgctggtttcgtggctcatgcccgtggagcattgatccgaaagacccagatagccaagaagaacgctctcagtagcgtcagtataagccagggcctggtcgggttcagcgcggttgctcgtgcaaagttggctcgaaagcaggttcaagccgttcaggcagatttgactgtagttgttcctttgatctcaaacttccagtcgcacgcgaaggctcttcttgtccgtcgaaaccatcagcagctagcttctgctctcgccaacgtttccactgtttcatcggccaccggtacccaatccattcttcgagcggccctctctagagctaggaaaggagagcagaagaaagaagttgagttcgtcttgccgaactttgtgagcttccaagcgatggccagaagggcataccagaagggagagtatgagtggtggagggaccacatccgtggtgcagatatagttgctgttcggctacagagcttgttgagaggagccattgtccgtcgagatttttatggtcgactatcccacttctatcgaaatacagccgccattgtccgattgcaggccatttggagaggaaaaggtcctcgagaaggcttcattggaatccggctgggaaagaatgtcaaggtctctactgtcaagaatttcgggcatcttttggacgacaacgatagtgaagttcaggatgaggctcgactcaagactttgaagataaatgtatcggaaacctaccgggaaactcagacccttgagatcgaagccgaagaactcgatcagagcatcggtttgtttgctaagaacattgctaatcttcaaagtcgaggacggtcgagtttggagattcggccggttcctacgtttgccgatcaaagcgcctcaaaagaagccgattattacagcgcaatgcttttagatccggaggccgagttgaaagctgaatgggcgagagcgaagagattgattctggctgttctccgaattcagccggacaaggacatcctggcttcgttgatcgcaccagtagaggacgaacatctagacatgtggcatgaaatctctcaacaaaacgcgcatgtcttgcctcctcgccctggtgaggaaccgggttacaacctgaatgatattaagaagtaagtcaactcttccctctttaccttcttgcagtcttaatctttcgtttcccatagtcttcactgattcacaaatcttgtttcatatcgctacatcagtcttccatacgacgaagtcaaattccaggctctaagcgtttgtcagcaactcgaaggagaaggtattatcacccgggccgatggctatcaggcaattcttaattcaatcgcttacgacatccgaacgaagaatcgaagacaaattcagagaacccacgagttgaaatcgatggaagaaatttttcagaagctggatactcgaaagaaagatctggaggaacagattgagatttacaacgcgcacaatgctcagagtatttcaaacctgcagtcaaagaggttagtttagcttgacatgtttgttttctttcttttcgcgctgacatgttctcttgatacggttgtttgccatactcgattcttgacttatgtcagcaaacgaggctctgtcatcccgttaggtaaacagtactggcaccgaagaagcttgcaacagagtgggctcatgcctcgatatggttcatgggtgtatgaggccaaagtactcgtacgtcgctacatctcgatctccttgactacgaacttctttcttcttttcgcgcttacttctctttcattcttacgctctcttcttgatatttttttagtacggccgaggtctcctcctttcagtcgatcagttctcgccaactcagtatgatcggctggaactagttttctcgtctgacacggctggtagtttcaatattgagatcttattttcaccacccggtcatccgaagtcaaccgtcggaaaatcaaccgtgacgatgcaagatgtaagattttgttctttggagttgatgagtcatatcttccaatcggtttcaacctgacaaatgtgtcccatttttcatttccgacatggtgattagttgctgcacaaacaacgagagcagaagaagagcatcgccttgggcctaggtgaatacaatgtgaacctgctggttgctcagttgaataaaagtatgttcttgatatccatctccgttcttgcccttctgtttacgatacgttgtatatacctcattcatcgtgacggtatgtgattaatcgagcatacgctaaccattcatatgatgtttatcaccgccaataacagagttttataagaactgagaaccttgaggcccgcttcttcccatagcttgtttgccctctataccagtcatcttccttgcacgcgtttatttgttccttctcttcgctcatcttgttcctacatgatctctttttccaactctcttagtgctagaataaccccagcgtttgtttcattaacccttctaatgacgttcctcttttttttctcttctctctgtatcttctgtttgtcctcttcgagttatcgtacttactgactgtccgtcttccattgctcttccgtctgttttcctcctttttccttcttacattttccttgatagataaacctaaagacattataccttcttcttcttcatgtctcgtagcctttgccgttcgatccggtctgatgtgatcaaactttattatttgacacccaaaagagaagcagaagcaacttctagagaagcaaccatgagaaggaagagggaacagagacaagcagctcattttatctttgaaagagtctcctcgattgcctttaacatcttcggttcttacgcagtcgcctgtcgagcctgtcgagcctccaaccgagagagctctcgctccttcttgaaaacctttttctctgccttcaacgttgcgaggaagtctttttctttgacgttgaagttctcacccaccaccggtccgcctgcccgcctagcatctcttccagcctcccaagcgtctttactctgatcaagttcctttcgtagggcgacgatctccgatcctttatgctcccagaatgcctcggcctcctcagtccaccgtctgaatcgaatggtgctgttcactctcgatcgctgtcgtcgtctgttaaggttcgagtacttcttgagatcgagtgcgatctgagccctttcgggaagagccggtcgcttatccatcgatggcaggccaaacttcccaggaatcattggtttgacctttccggccgaggtgggcaaaggattggaagcccacttgtgaatggtcttggccaaagtgaccgaacgggtttcgcctaaccttgtggttcggagccggtcccattcttcaggcatattctgaggaagaccgtcctcatctactcctcttgaaggaagcaagtttcccttgatgttgagtgttttcagtttgatgaactgaggaacagtagggaatggtatggcgggaacaggcacattagggtggaatttccagtagtgttcggatttgccgtcggaagcgcgctcgcccttcttaacaaggatgttcttgatcacggtactcttgatcacgcccgctcgctccaagtatgggagaagatcgtttttgaggaagctacaagaacaaaagggatcgttatacagcagaagagagcgaccgaaagggagagatttttccccgtaaagcagagttccaagtttagaaatccatgaacaatcacggagaggatgcaatggagaaaaaaaagagagagagagaagatactgacttcttcgaaggaacaggatggcccgcatacggagcaggattcataatcggcggcaatctgattccatggagcttcctgggcttcttctccctcctgactcgtgccgcaaccagtttcttactgatcgggtagagcttgtggatggtctcatagaggtcctgggctgtcggtctagcctctgctcgaagccgaagagcctcaaataccattcgagatggatgagggtatttcataggagtaagcatggctatgtgctgggtaacaggaggagggacaaccgtttagaataagagctgccaacagatacgatcgatgggctcctcgtcgtcgttgtcgtcgttgtcgtaagtattaagagttggaagagacgacgagaagagagggatatttgaaatatattagacttaaatagctagttaagtgtcagttgagccctcctcgtttttgccttctctctcaaccactcaaacactcatcgtctccttccagctctgcttcgttccatcggtcatcgttctatccaaagccaacatgtctttcgtgagtggccgcctgttttatccagtgtatcagctactcttttgaaaagaaaaccagctgtttcagtgggagagaatcgccgggactagcttgttgcttattgcggctccttttttttctctctttccctcttttcttcgtatccttctaaaccgacgacaatgatcctctgcagacccagcctctccgaatcttggctcgttcgtccgtgtgccgaaagcctgctttgcctcttgcacgatggtaagctttttatactcctcggacgcattccctgacggcttgttttcctctacagccgtgatcggtgatcggttgaatggctgcacctgctcgtttaagccaaaatgctgaagatcgatatttactcatgttattgttgttattgtatcatgaatccatgggtttcgcagcgttcgatccctttcaaccactgctcctcgagcctcgacatccaagattgacagcattgtcgacaacatctcgtcgctaacccttctcgaggccgccgatcttgtttctgccctcaaggttcgtgccagaagtctaccaaggtggtctatgcacgcagggacctaacgacagtactgatcactttgaaccattctgttgatcgcctcgacttgatactaacagacaaagctcaacatcacggagattgctatgcccgccgccgccgccgctgcccctgctgctggaggagccgccgccgccgaggctgagcctgaagttcgtttccacttgtctctgagttttcaaactgttttctgaatgctaagcatttgaaacctcggtaacttttgtaggagaagcccaaggagaagactctgttcaacgtcaagctcgagaagttcgaccctgcagccaaggctaaggttatcagggaggtcaagtcggtgatgcccaacatgaacttggtggaggttcgtcttgtccctagtttatatccgaaagaacatggaagaattgtgaaggagagaaattccgaatggcatattgaattggacacattgccttggtgctaattttaacattttactgacgtgttgctcttttttttgtcattgcatcgacacctcctgtcatatcctggattatctccctaaacatcacctatcggtactttgctctcgtaggctaagaagtttgtcgagtctgtgcctcaggtgctcaaggagaacttgtccaaggaggaggctgaggctttacagaagaagttggtggagttgggctgcactgttgctcttgagtaattgggaaggcttgttgaaattataaaagtagcaagttgttagggaacccagctgagcgcgtagaacgaaggctatgtgcaagagaaagaaaggcatattttatattattctgtttgtctcgaactgatgtgggtcagaatattcttctgaacagcggtcctactcgaagaagacttgcaatcgagcgcgtccgtcaaaagcaatcgtcaatatagcaacaaagagagcgtgttagaaagagaaacgaatggcttggaagaggaaaacgctccgctcgagagctgtatacgagacaaagtcttggactcataccctcctccactcggcctcatctttctctgcaccgttaggtgttcaaacgttcggtccttcttctaaattctcttcatagaccctctgaatgatatagcgcatatgccaagtgatcttcaacgcttgagagctcagacatacatgctagcttcaacccaacacatgaaggcggcctccggcgatgcatacatatgtgatccaagaggctcagcggttactcacccaaaatcgttcaacctagccaagagaaggaaagtcgtctgtccttccggtccaagttccatcttaccttgacccaagatatgttgctcagagcaaccagagcgcttgctcgcctccatcgcgcgcccagaccatcttgtagctcggcaatcctatcgagatcgctttggacaagttcatctaactctacagtcgctggtaacccccttccgaaacacacggaccacgcatggtctcctacaacccttgcggaacattttgaccgtccggtttcgtcttctcagtctacgtcttcatcaactcttgaacctactgggattttcaatcagcacctgctcaaaaatcctgctggtctccatcaagccgctcaacacgttcaccaaagagctgtcttgctcctccaccggattcatcgagcacctgaggcagggcttggtgagctccgtctggttgtcaagaattttgatcggctgagcgacctattatgtgggatcatcgacatgtgcgaggtcatctggacggttcatcccgaaggagaatggagaaatgcggctgaggaggtctatggtgggctttgtaggctgatgaacgaaatgaatgtcgacacgcaactctatggcgtaagtgcttatattcactatcttcagagttcattgtgcgggctgaatgaccgaatggtgttgatcaaaatatccatctctttccgtttacgtttcgtttatacctccttcctttttgtatgcacaggcactcaaacaagctgtggagacgccgtcaatcgccgcttcttttactcctgaagaacggcgcactgcacaagtgtttctacatgatttctataagtctgggatccaccttgagcctgcgtcgcgtgcaaagtttgtcaatctgagtgaccgactcatcaatcttggccggcaattcacgacatcactctctaatccctcatctcctgctatcctgccaaatgcagagatgctccgatctggtctgggtgaatcattcgtcagaagggtgaaacctcggtttggtcgaggaggtggcaaagtcaaaattcaacctggaacatgggaggccggaatgatattaacccgggcggaagacgaggaagcgagaaagttggtttggatggcaggagtgaagagtgaaccagaaagagtagagctgctggaggacctcttgagagtcagggcggagaccgctggtttggttggtaaggcaaactggggagaggtagatgcagagatgaagatggctggaggaccaggtttgttctctttctttccctctacaatgtcttcagatatgatcttgacgaactatgttctctctcactcgtttgttgtcgctcatagaccaagtcacgagtttcttagagaaccttctccgcgcaaatcgagcaagaatgacttccgagcttcgccagcttcaacttcttaaagctaagcatcttgcatcctcaaccacaccgtctctccagccatgggaccgagagttctatatcaaccagcaccagagccaggtagtagagcgtgctccggcattggaatccctatcgccttatttctctgtaggtactttgatggctggtctatcgaaactgtttgatagcctgtacgggattaggctagagccagcgtcgatagcgcctggcgaggtctggcaccctggcgttcggaagctacatgtcgtcgatcacgcagacgaagcgggcgccgtgatcggaacgatttactgtgacttgtttgctcgacagggcaagactggaaatgccgcgcattataccgttcgctgttcccgacgggtggatgatgatgatctccagggagatcttccgcctggtcagacagattggacttttgatccaagaggtgggctgaacgtccagccggcagcaagtcggagaagagagggattgtttcagctgccggttgtcgtgctaaattgcgatttcggtgaggaatcgaattcctcgggtggattgaccttattggcatggcaggaggttgagacattattccacgagatgggacatgccatgcattgtatgtcgttcatctcatcttcttttctgttgtgaatccaaagctgaggaccgtttctttgatcctcctcctaagctatgattggtcggacatcccttcacaatgtttctggtacccgggtacctaccgacttggctgaattcccctcaatcttcatggaatccttcttttcctctccactcattcttccctcgcttgtcacccaccatagtaccggtcttccgccaccatcctcgctcgtccgagctcatcgggctcaacgcacccagttcccctcgcttgagactgccactcagatccacatggctcttctcgaccagcgacttcattcaatcactccttcttctgacaggtctgctgttgattcaacaaagatttaccatgatgtcactcaaaaggtcgatttgataccttctgtgcctggaacggcgccacaagcccaattcggtcatctgcacggatatggatcttcgtattacgcctatctttttgatagagctattgcaggaagagtgtgggaccaggtgtttgcccaaggtggacaggggatcgatggcttgaaggaaggcggagaaagaatgaagagagagttattgatgtggggtggtggaagagatccttgggagatggtcggtgggttgctaggagatgaagagatcaaacagggtggaaaggaagcggttgagaaagttggcaggtggggagtgtcggatgaaagatgacctttttctctgccatcttttctttcttttgtgttctggttcagtctttctctcttgcgcaggtctggtggaacactcagataagaatagattctaagaaattcgatagcaaaacatacaactaacggcgataaacgctttgctcttccactcgacgctcagtctacaacttggctgactgggttgtcttgcccatctacctcaataaatatggagttctcaaagaaaatgatcagccattgtcgagggaaaaaacggaaaaacagaaaagcctccgttcaagaaagcaaaaggaaagaacaaagtgagttcttgcactaacatggggctctcgaagagcggctacacatgtaatctccacatccgttccctgtggcagatccttgatctaagtgaagaaaagcagcttttgatcagaatttcgactagccggaattaagaaagagaacaggcgttcagagtgagtgagaattggcacttacaccgatgcatgttctcgaaggtggatccgttggaaaaaacggggtgtactaaattagtatgacatgagatttccggagataccatcacaggtagatgatcagtgagtggaagacgtatgttttttttttttagctacggaagaaggaatataagatcgactacggaactgacagctttattcatggcaccgaaatcttccacatagttactcaggtagattgtggatgacaccactgatgaaatcactcccatgtaaagcacgtcagcgcattcgacagagatgagaacccctccaagtctcttgacgcatcaggagagagagaatggagctcaccatcagaaagaccaagtcctacttcaacgagtctagtcttgatgttctccagagcggctctggctatcaacatgtcgaacaggattagatgtcgatcgctcgggattgtaacgtgaatgaggtaagggtgacttacttcgatcagacacagtaccatctgtacctacgccagttgttcccgataggtagtagagtttcgctttaggagccaaaatgttggacgaaaggaacggagggactgcgcctagagaggggaccttcaacactcatttaattataagggtaaatcataaatatcagttcttgtttgattcgttttcttcttgatgacaggagacatcgatgtacgttgatgggaaccctaacgcgctgtccagaaccatcattccgcttcgctgcgatgctacggatcgatttgttagtagaatggaatagaaagagaaactatgagcttatatctcgatcttcatattaagcttgatcatttgatgctaggtccatttcaagatatgtatcgacgtaccaggtaatctcgacgtctgttccgccaggaagtcgctcgagcccgatgcaagtccgagtagggaagggagatccagtggtgaatgcttgaatgtacgcttgattcatcatgttctgtgttgatttccgagttgtaaagagtttgagttaagaagagctcaacatcaagcaggcagtaaggaatcatattgatagttgatagaaaccacacttacgaaatcttccttgtattttgttagatataccgtcgagcttattacgtcctccaatcctagaccggcttgctttagtaacactctgacgttccctaaggccgacttcgtccgatcgtttacagtatgggcagaggatcctccatcctcggcacattgaccagaaacaaacacgagatcttggatgcttaaagccggagataggaatggaagtgtgtccggaagttcgggactctatttttgtttagaaaccaacggggagttgaacattgatatctgaggtatgagtcgacttggcctgtacaaattgcacagggcgctgttatagcgataagtagagtaactgggcgcacggtgatcttttgaatcggcccgtgagacttctcaacagcgatgctacatcatagagacacagtgcaagaagaaaagttccgagtgagtcattcgagactcaagcactgatgcgaaattatggagttcataccaggtaatctcgacatctgttccactaggaagggcagaggcccctacgcaagtcctagtaggcttgatatcttggggaaatgcttggagatactaatgacagaggataacgaatgagcttggagggataaacatgagaaacataaacaactttgtcactgactgcttcattcagagaatcgtaatcctgtacgtattttgagagatagacggtcgaggaaaccactgaaggtttatcgatgtgtcagcggagcgagaagaaaacacaagaatgagatcgaagatgtaatggacggcgtcaaagacgatatacagagtacgaaccatcttccattcctaggcctcttgcctgaagcagactctgtatcctcttcaacgccacggttgctctatcctttacgtcaccctggacaaacaccccttgttcgaccccacagctaccagagacgaacaccagaccagatgcggcgatagccgagctgaggaaggaaggcgcctgaccagcatacgaagtcttccaaaccaggaaataaagacgcacgttgagcgagacacgagcagactgtgggtttaaacatagaactggaatccttactgagaacgatatcttgtttggcatattggatgattggttgcgatgtgtgctctggtacatgctctctgggagcatctaagaatcgctgggggttacacacctcgccgtggttacgcagcaaaccacggcgtaattccagtcggctagatccggcgatgtttcggcccggtctaaacgccagtctaacgtcaggcttcggagctgtctcaaacattcatctttggaatttacctgcctcttttggtttctttttcgttgttcttctcgttttcgtttcattcttgtctgctctggcttctttcttcttccgtttctataactacctcactctcatttggttttcttgtcgctctcattctccttttaccatctcacggttttttttctctctcgtttctcaagatgcgcacccctctttccttggttctcagcctcctcatggccgttacttttgcctctgcattctcccttcacccacgaaccggtcggccacaccaaggcgcaaatattcgagagctgaccagcaacatccgagcgcgggacgctcatgttgttcccgatagagatagtttcaacactgcaggtccagttagaagggtccgcaaaagggctatctgcaacacatcttcttcgtcctcttcttcggtctccaggtctacgtctacgctttcctcgtcctcttcctcttcctcttccccggcctcaacctctatcaaacccagttcttcttcttcatcgacgtcctcgtcctctagctttacttccaccgtcaagtcttcgtctgccgctgctaccactacttctacttctactccttcctcgtcttcttcttcttcgcccacacctgtctcaacttctacttcaaaatccagttcatcatctgcaaccgcaaccccaacctctacctcaagcttcatcacgtcatcatcgtcttccacttcccgaactacctctacctctacctccgtgtctagcgcgacgaaaaccacgacttccacaagctcggtatacattgcgactgacgtcgcgtctgtcatcgctgtatggcccactgttactcagtcaggaagcagcccttcagctactgtaacttccaaagctggttcgtatctctcgcatattcttcactctgcgttcttgcccgctctctgcttatgcccatatatgccgatgccaataatttgtgtcgacactgggcctggtctcttatttgtttcacagatccatacgcacagtcactttcatacgcgctcaataattctgggaacaccttgttcacgaataagcgaacagctggagatctcacatactagtttgttttctcttgagcttttttttggtattctatgatctagatgctgcaactaaccgccaacctctctcctttgctttcttagtgagcaaggtcagacatcttgtggatctgtctatgatgatactacgtttaccgctgcggtttcctcactcctctacgacgcctggtttgtcgttcttactcttcatccatgtgttcctcaacatatcaactaaaagtcccctcttgtctattctttctcaatctgaactccatcaggcctggggcctcatccaacacgaatcgaaacccgatctgcggcccgttctctcctgggaggcttgacttgtcatccaatgtcaaggtcgcgtccgcttatggcagtgtgatgattggtggagatggtctgcttaactgtgtatctagttcgatgtgccgtgagtcctcctttgcttatccacccttcgctatcctatgtcttctttttttcctcaagaagaataagcgccgttatatctgaccattgctttgaccgatgtgctatatagatattccactaaccgccacgttgacatatagcgggaaatccgcaaaagtcctcatcgttgaccgatgtgaaggatgcgctgtagatgatgttcgtcattaccttttccctttcctctaagaatttcacttgaccgtcctggatcaatcgctcacttgctcatctgatcaattttctttcatacttgatggcacatcagattgatgtcacgccagctgtgttcaaatacctcactggaagcctcgatatcggtcgggtttatggaacgtccggaacgttctcttggtctttcgatactgctgaatagataaaacccctcatcgttccctttctccttttctctctgtagatgcctctgtgaggtactcaactcgcccctgtcctactgctttctctttcttttcttcaggatctggcttatcctatcttatcttcaccttgatctcaatctatctatataccaagcagaaagaaacttgatgttcttctgtcgccttctgtatgctcaacgaatattcatttaataatctataaacacaagggtatggataaaatgcgcctatcacatatctatcgtctccgatctggttcgtcgcgatccattatgtcttacgagcttttctcatccttcgtcgagggtgatgatggtgatgaaggagaactagccagtccatccagctgtttcttaccgacagagtattttccaatctttgccagactgtacgctaggcttttcatcggtccggcggtgatgatacccttgatggattgtaagagtgctggatatcgagtgatctgggatgtttctgttaaacgaatcttaatctatcagaaaaagggggcaaagaaaagttcggaaaagtcatagaggagacaacgctaaacgtacgtttgagcaactcggcggccaacgtctcgtcccctccaatcttcagccaaagttgcttctcttcttccgtactagaggattctctaggctgactggcatacttagttcggatggcctgctttaataccttgggtagtttccgggctagagacgcccggtgttccggcgaggtatcttgctgtatttcccattccgaaaagatgtgccgaacatttttagtcaatcctctgtcgattctgatggataggctttatgcttcacacaaaagtaaatgcctttaaaactcacctgaaggacatcgcccgaggatccggaaacggcaagggaaccaagctcgaccagtagacggccatagattccttggaaacggtccatctgtgcctcgacgatgttgaccactttccgagggttctctgcaccgggtatcatcatcctaggatcacctgatgaacgcgcgcataagccagttgtttaagagatgacaacaagacggcggaaacacaacttgagttgggtatattcagcctcgagtttagaacatcaaggaagaacacacctccgtaactgagcccggcaattctctcaaatagttctcgcttctcaaacttctcaggaagagtgagcagcgcaacacgcaaagccgaacatagattgacctgatgagctagtttgactctcgggtcatttcggatgatacgaatctatttataagatggatatcaaatgaaaagaagattgagtcttgaattccgggcggtggtcgaaagaaaggacgataggatcggagactgacgggcttgtgcatccgaccggaacagtacaacgtgtcccagttgatgaggtcttcgcacaacttgtcgacactgattactccatatttgatggtctaagaaatattccccctcgcccgaaagaataaacagtcgttaggaagatcagctttcgtcctggagatcactcttcgctgacagaatagaagggaaacgtttctcatggatcagaaagaagacgtaaggcgagtgaaactcacgaccccttcgacttcaacgtacgcattgtaccacacgccagcgccgcccttctcctgtaaccatgtgacagcgttggaccccaaaagcctcatgtaagctgggtaatggcttgggttctgctgcatattgatgctgtgaaagtgatccggatgcgtcgttgcaaacacaaaatcaagcatcggttttttctctgtagacttccttgcttcggcggtaccttcaacctggatattgctgtccatactagctgttccagggctgccattcgattgaggaaatattccggagccataggcgaatgcgtaccgaataggggccctgaaagacccgacgatggacgagagaacggtcagcgtagagtctggaagggagaccatctgattggacccaaagtttgccggaagtctggtggatgatctatccggttgatatagagaataccggggctgggttctcgagttgggctctgcattggagatgcggctcgggctgggtttcaaatgagtttcggttttgctgaagaagcggtattgtgagggaaaggaggtcgagggcgaggaaataaccccagaagaaatcagacggcagggcctgagtgtgtttccgggcgacaaaagatgcttggatctgagcagcatggtgtaagtacgatgagatggaagttggagagaccgagatatcaaaaagagaaagaagatggggaacgagtgaacggcgttctttccatttttatttttattctatttattttatttgcgattttcacttatgctcttttctccgctcggccggaagcatgtcggccgtaagttcaacagacccctcattccgagtccgttcatcactaggccaaagaaattggtacgcattcgatacattcacagaacagctaacatacctcgagctggtcgagaagtactgtgagatatacctcacaacaggcagaaggtgtcatcctagatctctgcctccacctcactcctccctttacctccgatggctcctcctaacttgtatccactgaccttatcccaatcaactttctgacgagtaacagggagagctcgtcgcagcctggttcaataacatatcacacaagtcgaagagattccatattagtacgatcaactatagtggtatgccataagagtcagaatagttgacgagaagagattaggacaaacgatttgaaggtcttgtctcctagctcctccagacgctcattggctccctcctgggagagacgctcgaccttgctgatctcagatatgatggccgcggcttgcgacggcccgaccggcggaagcgcgatggtaggtgtttggactgttcgcaattggacctgtaatttcgagagttaggtcgtcagcctggaagtgcagtcagcgacatgaagaagaggttcgcacgtttccttgctcataatagtgaacaactgcctggatttggccaatgaatgactctttctttaggtcaatgtcataagacgagcgccaacgaccagtcctaagtatcaagaggaaaagtgacgataatgcaagcgcaaattagtcaacacagatacagttggttaagcaacagaacattcaggctttcgcactggcgacttatgagcaagacataccagaaatttgtgggggagtaccggtgaccggatgtgacgatggtaaatttaccttcatcaacgcctaccgaacgacccgctggaacaattttgactgggacagcagatgattcttccttgtctaaagcagctactggaacatcaggcccctcatcggccacgtcagtggtgttggtctcctcctcttgattcacctgttgctcttccttcacttcttctttctcctctgccttctcctctttgacttcctttgtcgcttctggctcttcagggtcgacagactccgatacctcttctccaaccccgctcgtctccaagacactcttcacgccgctaacgactgcgtccttcaaagtttctaccaaccctggctcggcctcctcggtaacctctgccttgtcgttctgtccgtccaagatatcttcaactttttcagatgcttcctgtgacgacgagggaatctggaattctggtgtagattctaaaactggcgtagactcaggcgcagaggttgctggaatcggggttggatctggaaccggttcgttcaacacgagcgaaggaaagatgcagcctgctccgttactgtaatgattggatatataggtctggagaggcttttcgaatgatgcgctaatatcatcaaaaacgaaatattaagaggtttactcatgacacactatacaatatcaccaacgatgaatgaatagaaaagacacacatgaaggaggttgtatctttgggtagatctagaggctgcaaatctgaagcggtcttgatgtaaacgattcaagagacaacacttagtttttctattcagatgttcactcaaaaaagtttgagaaaactgagatgctcaccaaagagatgtgatcgaactcaaagctctgcccacttctcggttcgtagtaccgagatggctcgccaggtacaagcgccgctggagcgaccaaggtctataggtaagggagaacagttagtgaaataaataagtaccctatatttacggatcccaggaagcaacattgaccaaagtggtcgtgagttgagtctaaagaacctgaaggaaggagaaactcaccttgtatgataaacctggaacatcaaacgccacgaactgatcgtggttgtagcttttgacggctggtccaacggcttcgtcgaaagccttgtcatcttgaagcaaaagtcgagcatctgttcgcatcgatgataccaccacggtaatataggatgcatacaataacgacaggatcaatacaagctcatcttggctgacccggtgatggccagatcagagtctagattcagaggcagatgtgaatgagaacggaccgttgatgacatcgttgatctcacccggtggagcttgtcggatgaggttagaaaccagagcgactcgctccacgacagagagttgagggacgtcttcttcttcgtacatagattttgatgggagtgatgcgatacggctaaacaaggtgttaagtggttgatggctgtagcgatgctggtgatggaaagatggcgatcggtaattgtactttgattcgtagccgcttctttctgtataaccacaacatcggtgctctctcccttactcttctagttcttcagctctctcgtgagctcgttcagctctctcgctcgaccactgctgtcagttatggccaacattgagcaatggtaagaaccgtcttactatctgtcactggtcaagttgttaatctcgcgctaatcgaccgtttcagggtgatggaaatccctcctataactaggttggtttgatatacacatacctgttacctctatgccagcatttatctgacgatcaaacatctgttttgttctagagcatggatcatagcttcggtggcgatcagtgttggagtggtcagtcaatccgtatcgaattcgagtgtatgactccactctaagctaaacctcattgttatgcgccggctgccagcaatgtcaagtggtctcgccttttcatctatacttctcttggaaagcaacgttcggacaccttcaggtgcgtccagtcttatttcgtgactcggatattcctggaagaggacctactgatgatgaaatactccttttgtaaaaagttatggaggctgatcagcaccttcatatactttggcccattatcaatcaagtgagcaaatcacatatgtattcttttgtgttcctactagacgatttctgatactgcttcctctcggtatggctagcttcgtgatgcgcctctttttcatgtgcgtaaatgtctgtgagatttgctacacgaaatagaagctatcgccaacgtcttgtccatgttctctttttgtagaatgcgttactctcgtttgttagaggagaattcatatgcgaaccgtaaagcagactatctctggctgttgatcgtgtgtagtttgttcctactcgtgagtatatgtatccttatgtttgcgaatctgcagaaactgctcatctacgttctgacgacatttctcgttttgtagctcatctctcctttattcaccataccaatcttgtccggttcattaggtatgtaaaataagggatgaagcataagatgaatttgtattgatatttcttccaatgagtagccttcgcgctagtctatatttgggccaaacggaacccaaatgtcagaatgagtatgttaggggtcatcacgtaagttttttcatccttttggctactatcattatatacctgtagacgtcttggaggcacgatctgatcaagaactatctacacatgcagtattccggcaccttatgtgcctctttgcctcgttggcatctcgtggattttgtacggaggaagcagcgttgttgtagtggctgatggagtaagaccctgttaaacaatttccttggtctattcactttccagatcacttactgacatacagctatctcattcgaaacctatggttctcagcttggacttctggttggccatatctactactttggtcaggacgtttggccaatggagatgtcgagctcagggaaggggctatttgagacacccaatctgctgtatgtctcactgtgtaattctttctaccttcataggcatcaactaacatgggatcactatcccgatggcccaatctcacagaagcgcattggtagacggcccgagaacacagaactagcgaacgtatcgtaccgtatgccgatctatgtaattgtttgacaacgagtattgagagtgaggtgtggtacaaatgacgtggcagttgatattagggttaatgtcactaggcaaccgatttaatctcctggtctttctctccatcttgtttgctctgacgaacgtatgagttattcgtcaaccatcactgtcccttttctctctcttctcgattgaaagacagtcatgtcacctattatagagtttctggcaaccactgtgccgggcaagctccgggacttggcctcaaatccgtctaccaactacaaaggatttgtactttggttcagctttgctatgtgggcatttgaaacttacttgatgtatgtctcctgatttgttcttaattcgcacggtcttgcttgagtggagcagttgtttgcatgtagaggctgaaaactcacgctaatacttccttgtgatcgattggtcgcctgtttttcgatacctctggtaaattaaaaaaaagtcttcgacaactccctctatactcgaagcctccccctcctcatgctgctgatctcactccggaagaaatcaaaaaatcccaggactacggccgagacaaggcatggctgtcgctctttagtctcgcctggagtcaaggcactggcgcagcgttggtctactttgacgggtttgcgaagttctgggaactctcgacctctatcgtgggtcctcaaagagaattcagcgtgagtttccccttctccctctaagcggggatcatttgaggctgatttcatcagaatgaagagttacgacaatcgtactaaacaattccgaatatgatcgactcgaactagatcatcaattcacttctttatccgaccattctgacggtggcaatgacgctaccatcgatcccgctcagtctgtattcgacctttgtcgtcgagcagcgccatggtttcaacaagtcgacatacactctcttcttcaccgacttgttgaaatcacaaatcttgactgccgccatcggtctccctctcctggccggattcctcaaaattgtcgattgggcaggggatgggtttgtcaagtggctcatgatctttttgtacgtgatcatcataccttgcttcatatgtgtgcaaaccacaattgcgtcaagtctcatccgggtttccttatttctttaaaataatcacaggatcattgtccagctgttcctagcaaccatcttccctacgttcatccagccgttgttcaacaagttcactcctcttcctgaaggtccgatccgagagaaggtcgaggcgctcgctcataagctcaagttcccacttactcatctatatgagatcgatggaagcaaacgaagtagtcactcgaacgcgtacttctttggtctcccatggtcgaagcagatcgtgatctacgacacattgattcagaagagttccgctgaagaggtagaagctgtcctggctcacgagctcggccactgggcgatggctcacccatcgaaactcttggtgatgacccagttccacctgttgctcactctatccctgctccatctgttcctctacaacccgcatttgcttcgatcgttcaacttccctgaatccactctatcaaacccacctgtggtcgtgtcgttcttgctttctcagttgatcatgtcaccattggatcaagtgttccagttggtggtcaatattgtcactagaaaattcgaatacgacgccgacaagttcgcttgtcatatcggaggagaagagatgggtgaacagttgaagactgcgttgaagaaactccatgtgacgaattctgctacgctgaataacgattggctgtaagtctgttgaacagccttgtttctcttgatcgaccgttgctaaagtatctgggcgcttctttgcttctactgggcctatacatgatcgatcatagatactctgcataccaccacaaccacccaacgcttcctgaacgactcgacgcaatggacgctcacatgaacgagtattttgcccaggaccgacacctgaggcttaagcaggagtctggcacaaagtcagagttgtaaagagaaagaagggtgagacgactatagatgggggttgtgagcgaacgtaaggtgcttctttgtaagaaggaacgagaaagatatgcatgatagacttatacaaccgcgctgtgtgtttagacgacatcaccccatagcaggcaagcggaaacagaagaacagactacaacttgatgaaacagatattaagagcaagcgaacgatccggaaataaaggaatagagagattctcattgcttgctctttccggcgttggcaagaggtccttcgacactgtgaggtcgcaagatcagagaagtggatcacatggttgagtatgtctagctccacactcgagtacagtagatacaatgagatcgaagaagcttgactgacgtttctttggtctcgttgctgcttctggcctgggaatcgacattggcactaccagactcattcgtcatttctccctgcttgcctccttgtccagggagggcgcccagtccttcgggtgcaacctccgtctgtttcatcataaccacccgcatccaaccatcagtctggtcagtttctagacaaacgacggatatcagtttccgaagagccaaggatacgaacggtgtaatcagctggctggtacggtcctgcctggttgctatcagtgcgatcagctgtagatgcagatacgttctgctttgcaggtggcttagaggcgtatgatcgggaggcggccgcctcgatcgcagggactcgcccgagagaagcgaagagtgatcgtgagaatgttcggagagacatgatgagaacggatgtattcaagacggattgtgtatgagatgcgggacgctaagagattcaagtggaggagaaaaggaagtgtgataaaattgcgctctcctgaaacggagctagctttatacattttatcgatcgcttcctaacggctatgatgatgagtggcagcagcaagcgtcattgggtgtaatctaataagagtatttgattgttatctaagattacctatggtgtacggtgatcccgcagtcagacacagatctcaccaggatctcgcttgtcgttcaacctcttctggatagatctactctttcccagtctctctcgttctctttcagtcttccttgacgtttaaacctttgtctgttacttgaatacatattggagatgagttggtgagtctggtttctagttcttctttccttatctctttgtgtttgtgatggcgtttgctgatgtacggtgctgctggttctgttcatgtaggaacgggtaagcagaattctagtctggtcgtgactatcgacaccctcctaatcctttttggttcatgcttcatgtgtgcctcttggggaacaaaagattgaagaagagcttgtaagtgtgcaacattcattttcctaattatatcctaattctctctttagctgacactgaccgcgactttggaaactgtatcggtcgttcttagtaaccgagctggaacgacgttgatgcagaagacgggtcaggttgatcgaactgttgataacgaatttgatagtgaagttgcaaagtaccgagtgtaagtcctatccatatctggcttctccagtgtagataagactgatggaggtctcgttggctttggctgggaatcctatcaggctcgagaaggagctcaactctttacacaaggatgccaagtcttacttggatgctatgcgaggtttgtgctcttcccccttgatttgcgtagcattctgttgattatccgagtgactgaatctcacacgtcgtgtttgagaaacgctagcgatgacctcgtccgaagctcgactggccgagacgatcgagctattttactctgctgcagaactcacgtcggatggagcgatggccgggcacgcttataaacgagcggtcgatgagcttgacactggtgtcggtagagaccttgttagtcctttatatcatacctggtttcatactcgacccagcggatgtatgaagctgactggttcggttggatggatatccactgatggtactttatcttggatcccactcatgttcaggatcaaccatatcgacacacagtgctcgagcctattggtagattctgttcgtatttccaaatggtcaatgccgccattgagaagaggaacaagaaggtacgtctggagagttggttcgaatgtgattcttcatcggagacgtacttgactgactgactttccttttcttcttcttgttcacgtagcttttggactatgacgccgcccgtacacggatgcgtaagctagcagagaaggggaacgacgatgtcaccaagctaccacgtgtatgtgacttatcctgtcgactttttgtacttgagctttgggaggaggacgtcttcagttagaagctcaaaaccgatttcaaccttttctttccctataatccttcccttaggcccaacaagagaatgacgaggccgaggcggtgtacgaggtgatgaactcgacgttgctcgagggattaccccagatggtggaacttcgggtaccttatttggacccgagctttgagtcgatggttcggtgtcagttgaagtttgcagaagaaggttacgaaaagatgagcggcgtgcaacggttagtttgctttgtttcgtctggatggggagaaaaagaggaaggagaaacactagatgcaagagaatggaagaaaaatggctgatgggatgttcgtctttgtggcctattagatactttgcggacaacgttagagatgaatacgcgtctggaatgttagattctcaggtggagactgtgttggccgagatgaaggatctctcgatctacggaagtggttaatccaggagtattgtggtgtatttttttttgggctccatcctgttcagccgtgcgtgttgtcttatgtgttgtcggcccaagtgtcttttgtcttttgtgatttatgtttcgcccactctacgctcgcgacacgtgaatctgttcttttttctttatgtttcacaatcttatcgtttggttgagcatcgcagtgcgaaaaaagtatgcttagatagacaactgataagcaagggcagcaaagaagacaggagtcgggaaagaagacatgaagaaaagacaagagaggaagagaaaagtaactgagtggttcttaggacccaacggacacgggcgcgtattgctgtctagtttctggctggatggctgatctgcttgggatgacgtcctgttttgatggttgggatcaaaattgtccataggaagcttgacggtcagtccatctctctcttacgaacagcatcaagaccaacacaaagaggaaaaaagatgaggagcataccttccaactgctgaatcctctaccaaaactccaacccaacctttccatcctaggtcttgcgaaagcgacgagtacaaggccaaatattatgattatgaagatcgtaaggatggcttgatctcttggcgagcctctctctgtagtgtgggtgaaggttgtagcagggagagagcaaagaggcctaatcaggatctgcctggattcgagcttgaggacgaaagtaaaaggagtagaagcgcatgaggaacgaactgaaacatctggcctcgacatcaccttcggtaccggaggtgatgtcaaggttaatgtgacctagggaagcgtctttacaaatcggcagtttctggtcctgtagcagttgtaagccagataggactgtgttagattataattgacgttcactttgaagtaagagagaagagagagaaggaaaagcagatgagagaaggtcagatcgactgacgagacagaatgcttttgtacaactagcacaggggtgttttcgatcgttcggtaggtagagagggatgattgtcgagttttggaagcagatacatttacagtatgtcagttccaactgagttgttgaggctgcattcactggttggacgagctatatgagaagtgtgtctgattagtttcgaaacggatctgtaaccaagcaagagagaacaggctaacgagtgaaaacgacagaaagagaaagacgacaagggcgagtggtctactcagcatgatcagcgagagtatgttagtttgcaaagtgaggtatctaaggtatctctttccttcctgggaaccaagagatcaaccaaggatgtaaacggctcaagccagagtcgggctagcccgctcatgtgtacgtaagtgaagtggttacgattacaaccccaattacatgcacagctccaaaccccgtgtaaaaaatttggagattttcgatcggattctttcgcgttctttcagcagaagaaaaagaaggcgatggaaaaaaaataattaaaataaaaaatcactcgaggtaattctgtagtgtcaagttccagtcagtctaatacagtcgactatcaatcgcaccctcatataccccgacacccacccaccaacacatacctaccacccaccccatctatccctccttttcctttctttcttttccctttctctttctttcttagactatacaaaaataatggtatgtcgtccgggttctcttgagtttgatgttctcgtgctgtttcgttctttgggccctgtctgttcagagacgaccggttgtgttcctatcagggctgatttttttcccttctccttctctctttcctggtattctcctttccccgttgtgcgtttttctcttattcggtcaaccaattgttgggtgtatgctatcgccaactaggcttccgtcgtcggtcttgatcttggaaacgcttcctccaaagtatgttgtgtccaagcttctagtgtatgggtttactgcaaaattcggaatacttaaattcaatatctgccttgcgtttctttcatcctcttgtctagattggagttgctcgaagagggtccgtgctttcagagctgttctcatgtcctttcgtggtctgatccacagcttaaggaacaaggaattttgactgacgtgtttaccttgctttgttcaatctctcataattaaaatcctatagaggaattgacatcattgtaagttctgccacgtcggcgcttttttttttccttccttgatctcttttgccccactatctatccccgtgccgactcgaggcgctttcaaatgcaaagaaagaacataacatctaatggacacgcttcgttttctcttgctcacaggtcaatgaagtctccaaccgagctactccgttcgtattatttcttactcttttctcttttgttttcaagcttctagctaacgtcttgttgtttcttatgccattcacagttctcttatctcattcaccccccgacagcgatacatcggtgaggccgccaagactgccgagacttccaacttcaagaacaccattggatccctcaagcgattgattggacgaaagttcgacgaccctggttcgttctcgtagttttatatttctcactctttgtcgtctgttttctgaccaaaatacaaaccacaacacgcttgtaccctcaatctcttcctcgtgcacacagagatccaggagatcgagaagaagttcatcaacgctgagcttgttgacgtcgacggaacagtcggagtgaaggtttgtagaaatcgcaaccaacttgaatcctacacaaatatatatcgaattgacacgacattttcttcctcatacaggtccagtaccttggggagcccaccacgttctctgccacccagctcgttgccatgtaccttggacgacttcgagaccaggcctcggccgagcttggatctgccgtttctgacgtcgtcatcgccgtccccggatggttcactgacatccagcgacgagccatgctcaacgccgctgagatcgccggcttgaactccctccgattgatcaacgacttgaccgctgtcgccctcggatggggaatcaccaagaccgacctccctgagtcgactgatgccgccaagaacgttgtcttcatcgacgtcggacactccaacttctccgtcgctgtcgccgccttctccaagggtcagctccgaatcctttcttccgcttacgaccgacacttcggaggacgagatctcgacttcgcccttgtccagcacttcgctaaggagttccagaccaagtacaagattgatgtcctctcctcccctaaggctatcttccgacttgccgccggttgcgagaagctcaagaaggttctctccgccaaccccgaggcccccatcaacgtcgagtccatcatgaacgacgtcgacgccgcctcgaagttgacccgaaccgagttcgagggacttgtttccgacgtgctttcccgagttcaggcccccattttgtccgcccttaaggacgctggtgtgaccgccgaggagatcgactctgttgagctcgtcggaggatcttctcgagttcccgccatcaaggagcgaatcgccgagctcttccccggtaagaccctcggagccaccctcaaccaggatgaggccatcgcccgaggagccaccttcgcctgcgctactctctcccctgtcttcaaggtccgagagttcgccgttcacgatatcaactcttaccctatcaaggtcacctgggccaaggatgacgtcgttgcccccggagacgatgacaccgagcttttggtcttccctgctctcaacggtattccttccaccaaggtcctcaccttctcccgaaccggaccattcgatcttgaagcctcctacgccgagccggagaacctgcccggaaagatcaacccctgggttggccgagcttcgttcaagaacatcaagcccggacccgacggtgagcccgctaccgtcaaggtcaaggccagattgaacctccacggtatcctctcctttgagggcgcctacaccaccgaggagatcgagaaggaggacacctccgccccggtccccatggacactgacgccgcccccgctgttgacggagccgaggccgcccccgaggagcccaagaagaagaaggttgtcatcaagaagaccgatgtctcggttgtctctggttacgccggacttgaggagaaggccgtgaacgagttcagggagaaggagggccagatgggtgcctccgacaagctcgttatcgagaccgaggagcgaaagaacgctttggaggagtacgtctacgacatgcgaggaaagcttgaggaccgatacgccgcctacgttcaggccgaggagaaggagaagctcctctccatgctccaggacgctgaagactggctctacactgaggagggtgaggacgccaccaagtctgcttacgtcgccaagttggataccgtcaaggctgtcggaaaccctgttgctctcaggtacactgagtctgaggccaggcctaaggccgcttccgctttgagggaggtcaccaatgacttcttgcagaaggctcagagcggagacgagaagtacgctcacatcgatgccaaggacatcgaggccgtcattgagaagaacgctcttgccgcctcgtggttggataacaacatggctaagcaggccgagcgagcgaagaacgtcaacccagcgatgacttctgaggagattctcaagcgacgagatgaggttatgtacttctccgccggtatcctcaaccgacccaagccccgaaccaccgtccctcccaagactgagactcccccaccgaccaaggagaagaccgacggggagccggaggccgttgtcgaggagatggacgctgatgagcttgattaaataattcaaagaagaaaaaaaccctcatcgggctccgccgctcctgtgctttcgcatcttgtcccatctattgaatgttttgtgtatcccttacatacagaccctccttaaccctttctaccttcatctcacaccgcttttatttcgacagatttgtgtctcgttatattttcttgttttccgctatctttctccgacttgttttttgatgtatctagatgatgccttgtttgtcagaagggagcaaaacgaagcgaacagacatgagagtttcttctggaattgtttaacaggataaacacgtcgagaagaaatatacaaaaactcatgtaaatctgaagcaagagcgagaggagctaaaagagagattgtactcaaaagagaagacaagcaaatgatacaagacaagacaaaaaaaagacgcaaaggaactcaacctaacaatcttaaagcttctctcaactctttcctagcggtgtcgccgtcttcgtaattaagcgcgctgatcgcccacctcgcgtgcttctgagcacgttcgatcaactcgatcgttaattctactggttcggttgcagttggcggcggcggcggcggcggtggtggtgg

SEQ ID NO: 1577 - DNA, 50429 bp, Xanthophyllomyces dendrorhous
gtggtggtggaggtgcgggtgtacgaatggggggaagagaagcagggacgtgtctagattcgcgcgtgataggagcagaaggaggtgcagaaggagggagaggagaagaggtaggagagatcgagaaatcaggtggttgagggggagcagatagatctgaaggaggaagtggagatatttggatcgaatgaggtttatcgggtgagatcggttggatcggtggcggagctagaccggaagccgaagggaataatgcggatgtagaaggaggggacggggagggagtccgagagcgttcaaacggaggcgcagatggcgcagataggtctgcatttccgtctgcgttcgttggctcggaaccgaacggttgaggtggagaaggaagtctggggaggtcaccgtcaatgtcttcgtggtcgacaacgacgggtgcggtggaagattcttctgattcctccctttcttcgttctcctgcttcttctcagcctcatcatcctcgtcaccttcggcgaaccggactttgagattactggagtctcttcgttttctcgcaaagaacccaccggtcgggggcagttccccacccaaagccttctccacgtcctttctctctccagcctcggtgtcatcgtcaacgatcacaatgtcattcgaacctagggatttgtccgactcatcaatccctggagaagcggcattactccagctcgtaaggtgtctcgcttgagattcctcttcttctgtctggtctatcacaggtggtaagattggtggggacggaggaggaacagggaaggttgactcgacggccgtctcagttgatgtcggaggtgggccgggttgaggagtgatgcctgctttgaatgctttcgataaagaagcagctttaaatcgggcatacttcagctttgcctccatctatgtcgacaaaggagaaacgagaatgggtaagtgtgaaggatactcaacggatgagtgcgagggaagatggagcttacttccgcatctagttcgccgtctccaaacgacttgccaacctcgatgaatgtagcagccgctaggaatgatctcacagtggccctaggtttgagtggaaacaatgaataacagatatcactcttagcatttgctggtcttttcaagtttgaggagaagaggacgagtgactcacggggttgctttgccttctctgtcttgatcgtctgcggtggcgaataccttgagcgcaaagttttctacgtaggcctggccggcaatctcattcgtcaccgcatcattgtctttcatcaaattcttcatctaaggaaagaacggtgtatgaacggaaagttagatttgggtgtccttgattgaagcaggctcggagaacatcacacttacaccttcgagcgcgtccagcaaatcaagcagagccaatgttccttctttggttctcttatcagcaactccgacctgagcagctctgtagcagcctggcagtcaaataacacatcacataccaagcgcgtcgtacccttcgatcagcaatctatatcagctgcaaagagcaagcaatggagagaggggtgcatacaccagtaacacatcacagggtcatgcgtcttgagttcttttgcccgtttcagcagaagatccgccgctttgagttcggccggtagagattctggtagcttgatcccctgcatgacgtctatcagtcgagaataagtgttgtatgaaaaaaacacagcgatggggatgagacttgataagagattggatggagatggccagccgggggcgaggcaagtgggtgtgagtgtgagtgtgaggtgggtaaccatgggttaccgaagatcacgtgatgactcaatcgatcgaagtcattacatcatcgatcggttcctggttccttgttccttgttccttattttccatatcgtcccttttttctgtactttttccatctccttcccaacttccacctcatactcttctcgttcatctcaagcaaccatctcgttcttgttcttgtccttgtcgttctgttaacttttatatttaactctcctcaacatgtctgtgcgtgcgctctctatccgctcatcatctgttctcatctccaaaccatccatatcacctctcacatcgtttctcgttcggtctctcgcatcgtcttgctctaaccgacctacgtttgctcacccgcatcgatgcttgtcaatcacccgtccaatcgcgtccacacaggctggccaagatccttacaccgctgtcaacaacgacgaccctaacgtcaagcagtcagtggttgttttgtctcggcgagaggcctacatcaaagtcaatcgaagaaaccaatgctgatttgtttgtttctctttctcttgatcttgtctgcaacaggaaagttgacggacttttgggtgttatcaagtctgtcggagtgagtcggttaaactgtattgactggtatcggtagcaacttgcacacacaagctaattctctttcttttttgagtaaagactgctatgcttacaacccgagcgcccgattcggaggaacttcattcacgagccatgtacccttgtacgtatcgtcatgcggcactcatttgtttttatatgtggtcaaggaaagctttgtctcacgtttatctctatcaatcttcctcctcagcctctatcgaccacctgaagtttactttcttcggcaacgttgagagtggcaagtttgatggaatcgagaaagacaaggtgtgtatctagacatcaccaatgacatctttatatattgaggctttccaactgacaatcggatccgaccaacaaacgtcagcacgtcaacatctcatactacaactcagataacacttcttgggtctcgatcgctggtgttgccaacatctctaatgacagagagagaatcaaggagctttactcccctcacctcaaggtgcgccatctttctcatcttgttacatcaggtacgaccgaagcgtgctaatgaagtagcttacatacgactgctcaggcctggtttggtgatctcggagatggcaagcacaccggagaggctgacgacccaagaatcgaactaattgagggtacgttccatacgtagtcccaaccttgttgaatagataggcgcttacctctccgtgtcattcaatatagtcaccccaaaagagatccgatactttgtcgagcagaaaaacattgtgaccaagtcgatcgatatcgtcacttctgccgtcactggctctgtcgctcaggttcgtgttcggtttcgtacagccttgcggcgttcgacgcggaaagacggctgacctgacacctcatcttcctttcttgtagcccggaaagcttgtcgttcttaacggtcacgagcttgaaactgccaagaagattgttggggccaccgtgaaggtataagaaactctgaaagccaacaccgacataaacctgtcgccatcagccttgtgttcaatcgttcatccctctgtatcgatatcaattctcgtatgcatttgcactctgtgtgagatttaaaatccgaccgatctaagcaaaagtcaatactgtagagttgctgagtaagaagcagggacatattgatatttgtattaaagctttttgcattgagatgaggaaaaagaggggttttatctattccttgtcattcaacagatgtgtaaggacggaacaggatatgtgttcacatttacaagtcaaagaacgactgtatcttagtacactccaggaataaacttgtacttgacgactgtgcaaacaaaccgataccaggcggtcagttttgttttgatctgtttccaaccctgatccttcgcagaaagagagaccaaacgcaacgaaaggaaaggactcaccggccatgtaacgatcccaatcctttccgtacttggctgcacacttctcaaagtctcgaccgcatcggtgaacgaggacgatgatgaaccagacagggtagaactgtttttcggttgatcgaacgaatcgacattcggtgcgcccccatcaaaaagaaaggaaagaggaagatgaaaaccattaggtcagttgtcacgtttgcgtgaattttcgtgagatgtttgtaaacaaattgtctaagtaaacgcaaagacgtacgtaagcgataggggtggatagaccggtagagagaccccaagtcaaggattggattctggaatttgagagaaaaaaaggaggagagatagcaaagagagcggtggtcaggaataagagaatcaagaaaagcttggccaacggaagaactggcatggacttacagatcggcagtgtagtgctaatttatcaaatatatattcattcaagctcttagttcgaaatcctgagaaagagaggatattcgagactatcgaaaagtacgtacaggcttgacggcgaatctgattaccaaaaccagcgcagcacaacacaattccaccacaatgatttcgatcaacaaaatggacgttaaagaagaggaactcaggacggatgacgaaaagaaaaactgacttgtaccagccggaagtaagaagcttgctaccatgctgagtctggatgaaagtcgggttgttcacccgtctccaaggtagttgggggaacgcttttcgagggacgtagtctgcgttctgctccatccggaagatagatttctgggagtttgctagatggaaaataaagcgacgtggtagggatcaaagtaggattaaaagggttagacttgatacgattcagatatgcaaagtaacagaaatcaaggaaacataccggtatcgaaaatgtagtaggataaaagaagcaaactgaaattcgtgaaggagacagagaatggaagacaatcgcttcagacacaacagtactgacatgttcaaaaaatagagagaaggaaacacaaacccaaagagaccgaaagtagcaggagttgacatcttgtagacctcagggttggttcgatgaagataaaggatcgagtacgagtatgtgaaaggactgtttgggcgaacgaataaggagaagccaaacagtacatgatgtcagaccaacgtattttgcctagtcttcttcagctacgttcaactaggacatacactcctgtgaaggatacaaaggaagagggggggaaagagaaaacgatgagcgtcaattttgaacctcgccagaggcaaaaagataggtaagaaaataaaaacgtaccggcaaagttccagaaggtcagcatgaatccatccttctcgtgaatcatatccatcgtagtggggatcatctcctctcctttagcacacgcgtttatatacagcgcggtggccaaaagcatgaaggccatgttctgtttggttatcatcacaaatgaaagcaggaaaggagcaggtatcctggttatacgtagtcgtcgatgtgcagcctagtggaatagtgagagaacgtacggcagtgacatagccgatttctcgatattgctcaagcgtggcagagagagcaatgaggaagagaagaacccaagggattcggacttcctgccacatcttgaggtcaaccgagccgattcgagggttgagtgcagctagagaaacaagtcaagaatcacacacgaacaaagagttagtcaaagagggtcaagaaacgtcgtatagagaagagattgtacatacctcccatgaaataatcgtagaaaaagtttccgctcatccggatgggctgtcctccccagcccaagaaaacagaaccaaagtacacagcggtcgtcaaggcaaatccaacgatcatggcaacagtcataagtggcccaaagttgtcgatcacagtcgtcagatcgaaaatgtcaaagtagtggactatcccggcggtgaccagggtaatgtaccaacagccgatggcattgcagtggtagaccaaagttttgtaattaagcgacgcaacgggaagacctggaatttttttgacaagcgatatgatatgagctaatagtataggattgagacttggagaacatccctaaccattctgctttttgccgggaacaatgaaggcgagtatgagctggaaagccatgagtccgaggtatgacttgaccgcccaagcagtagggtacgcatcctaatgagtcgtcatcgtcgagtatagtaacgatgcgaaggacgacaccagaagaatggagaacggttgaaatcgaaagagtgagccaagaagtgttattcagttaacgtggtcaaagattcgtggaacaacgcgccgcaacacgttcttatatcaaaaagtatcgaaaggaaaatgacaatgatgaacatacctctcggacatgcgccgccatagttcggaggaaaggcttgatgtcttccacggaagaaggatggacgaattttccctggtagaaccagagacaagcccagaggtagtctgttgtccatagaccgatgttgaaccgaagcgcgtacccaattgttattaaacgcgaaccgaagaagaaaaaaacaacagagcgacaataaccagttcatgccgtcacgaagaggagagccagtaaagatcgagatgaagctcatcagttctcttatccgcacaaacacgcatctaataaagtcacaaaaggaacgcacacatcaacatggggaatccgaccatcatcccgatcactccgggcggtcctccgaactcgtacttgtggtgggtatctccttcgatgtccttctttctgcctgcctcggtcggaacgaaacgcccattcgaattggagacctggccatttgacgatccgtttgcctgcttgcgctgcctgacttctgaaggagatcctgccatcttgtaaaggagaggatcgagtacaagttaagagtcaaaagtaaaaaaaaaggcatcaaccccaatcggagggaggaaagttaaggtacgatggctgggcggggtctgttgcttatgtaagcttaaaatcacttggccgatagggtcactaaccgtaaattacattgtaaccaccatccctccgtcttgtaacctttgtcctccctggatgcttcctaccttctccttctacccttgcatcccatcgaccttcactcacactctgcgtttcccagacaaagatgaacaggctatcatctcgtctacgagcaccgaagctcccgagtgttcatgatctgccggtcatcacttcgccgaataaacacatcgtcaccttcaagaagcaatacccatccggtcctcagatccagcaggtccgactgaaatacccgtacatgtccgctcagacattggccgattcagtctcgttgcattgtcagacgaacaagtcctcgcaggttctggctggtctgacccaggcattggggaacgttgcgacaggaaagttggctagaccggtgacgggaatcaagatcacgatcggaggagtgacccatgtcgagaaggttcgttggcgcttctttccttccttttttgctagtttcttctgctcttcagccttttctcttcatgatgatcgtcacttgatttgaactgactgatcctctttttctttcgtattcttttttttctctcattcactcatcattatacctcagaataaaacaacagtcgttcagttcatgcgaggcagtctcgccctgggaaaccgagataaaaagaagacgaccagacacggcaagatgggtatccgaaccacgcaggtcacactctgttcggccgctttccccttctagtttacgcacttcaagaggctgaaggattagagagtatcaggggaaaaagaacatggtgggtagactttgatgggattgaagtcaaatacgggtgggaaatatagtatgatccttgtacaagatcttggtactttcggtcaaatccaagtccgatgggtgtgctgtccgagcttattaaacatcttgaactgaagactgacctctcatgcagaaacagagacttgacatggtggtttctctcattccaggcaagcaacccattcagattgaccgtttcctgttccccttgtctctccaatcacgacttgtaaccagactatcggccatttcgagaaagcgtatagccaaacaatcactgcccaaacatctattctttactaggccgtttactatgaagatttcgaagtcttgatatccagtttacacgtacaaacagaagaaggagatagatgaagaaggaaactaaactttcgcgcgaaaagagcacaggagaagaaaaactacgagatctactcttccatagcgttcgcctccgcggcaggagcaggcgcagaagcagtagcaggcttatagacagacgcaaccaaaagaagaaaagaaactggtagttagatgaagaatggatagaatcaaagatcaacagaaacggatacgaacagcgtcactcttcatgaaagcctcaagttccttgtccaatgcatcctggttgaccggccccctctttgaaccctttcctcttcctcctcctcctcctcctcctcctcctcgtccaccccgggcttctctaccccctcttccagctccacccactcgaggagcggaaggtccatcagttcccttggggttagccgttcgcggtcccctactttctctacctcgactgtatttcgataatcccccagcaaaccagtcggtccaatgagtacagtcggtcctatgaactctatgaagcacgtgattcgtacaagagaagaagaaaaaaaaacacataaaacgtacgtagcagcgggcgcatcagtccctccgactaagcctccgagtcggccaaacaggggtttcccctcagccggtccggtggctcggacagttccaggtcggggcagtctgacaggcgcgtaggtgatcttgatcggttcgcctgtccggacaaagaaaagagatcagtttggatcatagatcctgtatcagttgatgatgatacgtaccgttggccttttggccatcaagcttttcaaatgcaagcttggcgtcggaaatggcggcgtaagtcacgtaagcaactccggtagaccggcctgatcgatcgtactagatgtcaagtcgaagtcaaacaacgatggtatttttctttcgtcagaaccaagtccacgaacgaagacgaaagagtgtctagcgaggctcacctgatgacgcagaaatttaaagtaagaacttgcgtcactttaaaaaggttctttcttttctctctgggattcccatcttttgttctttaaattcttgcccgagatccaacgcaacagccagcacccgacgcgtatgtgatgagaagaactgagaaaagccgacacaggaccaggtccactctctagacgacaggacgaaagaggcccgtaatgtcttatctcacaatagagtgaaccagtttgaagacacatggcgaaatgacaagagaaggaaatggtaggaggcagaaagtggggatagctgctggtgctggtgctgagttggatctcgactggtcaaaagtggggggaactaagttcttactactatcgatggtccttcggcgatcttgcctgcctgtgcaaagattttctgtaagggttgggataaccgacaaagaacgtttcgaatagatgtatcatatgagcctacgacgcgttaaatccgagggaagtaggaacatacgaggacatacctcgagctgaaagttttgaatctcatagtgaaggccctcgatcttaagcttagcggaggggttagtctgtgaatcagaaccgatctgaccgccttgtcggccaccttttcctccgaacatatcatgtcgccacggggcgtcggtcgaggcgggaggaggacgcttgaacgagagatatccagcaagacaggtaaaattcgggtgatgaaaagataattatagaacacaacggtgacaaggagttcaatcaacctggatgccaactgtgaaaagcgaaaggaacatacagtgtatggagcactaccggccgctctatcggctcctctgccagcgcctcctctgccggaaacagttcgatctcttctagctggacctcctcgagcagaggtgttggatgttttcttgttcttggacgcgaggtcgtcgagggacatgtcgatatccatggctgctgtatttataattgggatagaaacgagagcacaaggaggaggaaaggatgaaggaagagatgggtttcgatgatggttgatggtgaacaacaaagtgagggttttcccgccttgggatttgtctattagaaatttttgtagtctttttgtcatttgttctaatgctcatctgtagtcttcaccagacttgttcagagcaaacgtagcagaacacccacgacctgttcctcgcatccccacgttcatctcgacatgtatctgttccaggatagcaaggataatcgaacatgataatgctgataggctggatagggaaagcttccatagaatcgctaattctctctcatctgccttgctatgttcacgtctttgtaatcacctccatttctcacaaagtttctctgattactcttcatcaatcagttcactcgatggctgctctgcctgatcatatactcatgtcctccccgctagcgcttgttgccaaactcatgtatcctatgattcataccatcatgacttagccccgaggcaacacaatgctttgggctcaggcgtccgccgggttagtaacccgttgggtaaacagtctgcatgtgtccctcgatctcttcaccttcccttctctttcggctcgtccttcgacagcatcccgagttatccatcaaggaagaaggacaaaggatgaaacatcttgctctgagccaaacaaagaagcagacccttcatgaacatgttaggttcattcttgtcgccgagtttgatattgatcaaggctcgatcatcaagcatcagtacccttatccagtaacccaggccgacaaccagtgcgtcctctgtattctcttgaattcgttattctaaggacttttcttgctctgttcttgcatcatgacacttggcacgtcgggatgagctcatttatgtctccctcttctttactcttagtgtgctagctgagctgatgcttccagacggagctcatctgcacaaggaggaccataccgtgttttacctgaatcaagtcccagccaacactgtcagagatactgctcaggaagctctcagtagtctgggtgagcagaccaacacctctgaagaatccagtgatgagtctagaagatcggtcttcgctgtcgaaggaatggagaagaaggagattctttacgtgctgaacgctgtcatgatgaaggaggacaaggcactcagaaggttagactgtgttcctccttcccttcctctccctttttcttgtacaatagactcattttgtcctctcattctccgcatccacatcaacagaggagcagaagtcaaagcgattgccatttgtacacctcatccatggattcaagcttaccaggtcagtatgtctcgttctctctcaatcacacacgtatatgttgaccatataccatctgtaatatataaacatctacttcccatccacccctcagcgcctgctaattctttcccttgaagactacttcaagtcaccctcggtcgatgttctcgagaaactgtttgacgcgctcaatgggatcgatacctgtgggatgcctacattctcgagagacgaaaaactcatcctgcgcgcgagtgaacgtagaaatttgttggtcgacaaatttagagaagcacagtgggatagtgagagaggagatctcttggataaaatagaccaagccgaggccaaagatctgtcgaccatatgtgtagcctccacctctgcctctgaagcggaacaagacaaccctaagcggaagtcgaacgcttccgctgcttctcctcctagaatcagtaccccgttatctagaggagatcgttcacctaccgcctcaagctttacatcaaatcattcgcctttaaactctgtggcttcgggatctcggttttccatctcgtccttatctagttcgaccgacttgatttttggcttgtcacttccgacagggtcttcttccaaacggacggatgtactgacgaccgattttttgaccctcggcctgccgttcacaggagctgatggcgtgagctcgcccttaccgactgctgtggacagaacaaaaaaagggactccaaaagatacaaggttttttgagacgtcggcaagactggacggaatgtttgttccgttcccgatacagatcccactcacccttttcgaagaggaagttggcgaagttggtccctgttttgtgaacttctcttatctagatcttgttcttagactaagcaacgttgtctcatctttgttaaaaacgatctcagttctctctcattgccctcatcaaaaagttttccccgccagcccaaggtaatggcaactttcccgccccattcatcccgtctcttcatacatctggcccaacaactcatccggtcatcctcctcttcaacgcgctcatcacccaacgtcgaatcatctttctggggcatggtagagaggccggcgcagtcgctacgatggttcacgctgcctgtgcgttaggcagcggtagtggcagtgttctcagagggtttgccgctaggtgtttcccgtatgcaaatttggccggattggatatgctcgaacaagtgtaagagtttttttttgtacgtgaatgttcaatgtaggccaagctaacacatattaccatcaatttcatagtcctggcttcatagcaggtgtgaccaatccccgattcgaagaccttcattccagatgggacattctctgcaacatcgatacgggtcgaatcactgtgtcaaaggacatcaaaccggacggccctttccccagtccgaatccgtcctcgttcaccactggtaacttggggcaacaggcaggaggtagctcgccgatgttcagtcctttatctgtgggatccgctgtaacagaagaagaagcaatcgaatcgagccagataagatctcagtcggaagaaccatcatcgccacagtcgatggcaacacctccgatgccaacgatggcgacgatggtaacaggtaatttcttcactgcttcagaatttggcatggtaggcacagatgcagggatgtcgaccgtgacggagaaagggaaaggaagacaaggaagaagtgattcagtcgtcagcggatcaggagcagcggggaagagcaacctgatgggggcctggggagatacggatgcgatttttatggaagaggcaagtgaatctcttctcctctcaaaccacggaaattctggtctacactatatctaactggtccactcccgcatactccagatcacttcacttatcagtaatcattacggagagtctatcatccgagctcgatttgccgaatatattcaccgattcattcgcttagcttcccgatatgaggaagagacatacgcgccttcctcaggcgcccgaatttggtacccgtccgtaccctgtgatcctctgaaaggtcggcttggttcgggggctattctctgggaaggagaatcatctgcttcacaccccgatcttgggtatcacacgggtgggcttgcctcatcaactataacggcagcaacggtgacagggaagaaaagggagagtggcggagtaggagcagcggagaggaggatggtgaagacgtttgtcggcatacatggtgtacgaaggatcgagggttggagagctactaagagttacgagctttggaagcaggttcgatcatctccctctctttgttctttccaactgtgttgatggacagcttgatcctgcaaacatactgatagaaccggtccccatctggccttctatctaggactttgatcaacatgtttcatcgagcacgcttcagtttgatctgaatcatcagctctcccgacttcggaacgcacggtccatgtctactggcgaggcggagctgattttccgatcgttaggagaaaacgtcaagacatatgaccaggtcgtcgaggtttgtctgaacatttgctttgtttcttatgatgataggctgataatgtgctttacaacgttggggcttaaggtgctggcacaaacgccgatgagcatgggaggtctggttccattcgcctccgggttgtttcacaagagcaaccatgttaaggcgtacacgctagatttctttgataccctccaacaataccctgtatgtcgcgattctcttctttgtggagttttctctacttcctcatgacatgagtatatcaacatcagagctgacctactgatacgtactttgcagattggtcgagcattcctcctgcaacttaatgctttcccaagacttgcatacgctcgtctttctagtgagaggagagaagctgttgaggcagcgctaagtcgtcaacctaagggttgagtgatggtgatgttggcgtatccactgtgtctagaatcccttgattcaagtcgtggtggtgtgcacgttcatgtttagtttccttccccctgcacactgtcttcacacatatccgttgtacattcttcttcttgcctctctccattaataacatacttgtacatatatccatccatagatattcataaagataccatggttccacaacgatgcacagactgattagataaaaattgcggcattgattgtttgctcttgtattacgtcactgatactcgtcactcatcacgctcgactttccagccctacttaaggccaccgaggagttcgtcttctgtgtgtgtccccaacatcatccattgagcttaacatcatcagatcaattctgctacaaactccctaacatcagtttatcaataacaaaacaatgtctacttcccagatcggagctcacgctgaatgtgagtttcgtcctcctctcttccatcgttcgatctatcgctcccgtcgtttttcttctccatgctcttctcctgatggaccgtgatcctgatataagaaatattctttttcatgttttattttccatttctgaatatatgaaactggtatcagacatcaagggtgcgaccgtggaagcgatcggttccttgacgggttcaaaagaatggaccgagtctggagctgataccaaagagcacgcgatcggtgtatgtcgtcccctacttccatctatgggaacactacgattctcacccatttatttgactggtcatctcacgcaataattacaggatatgcggtctgccgcttcgtcctcccctcacggagagccccactcgtccaccatcggttcgatcgaaaagaaagcaggcgagctcgttggttgtgaaggtatggttgacgaaggtcagcgagcaactgccacgaccggagacgatgctgtcgctgctcctcattcggtcgccggagagactactgtgcctggaacgagcacattgaccaacgaggcattcgatcactcaaagcaggtctagaagtaggaagcggggtgtgatgaaggacgctcacgacaatatatccaccgaaaggaatgtctttgtatgcctatgtgtatttaaaagaacaatggatcaacttttttgatactaccacggatgcaagcaacggcaaaccgatagacggttgcaagatgaagagcgagtttatgtgggtatgatgagatgaaggccgacaaacctcagacgattatccccacagccgttataaacttggcacacatacaacacactagttcttatacaatgagcgccaacggacctgacatctttatttgctcttaacattgttggtgatgggtacccgcagcttttactatcatctccatatctgttctctagtttatgatgatcttcaagacatgtgttccagaatgtcggagaagtcggacgccattcacaatatcacgccgatgaagatgagattctgggaatttgggaatctggaacctgtgcaatcagaggaatagcaacaacagcaagatacggggcatctatccaacgtcctctgatgatagaaaacagcttagagatcaaaggatgaaagagatcgtttggattgccaatacgagtctcagtgttatccaatgatttgccagtctcgtttctgagaacccctcaagtcagcaccccatattgtaagctcacaaatgagctctttctttggcgtgcgttgctcattcaaaccttcaagtgtctttgatctatttggacatgatggaacttatagtgaaccatcctgtgacttgtgagaccttgtttgcagccccttgtgtacttgtctgcgtcgttgtcatcagtcgagactgactttctcggttctctcatatgacggtatggggtcgttcgtgatttcccccaaaagatcttgatatccttctggcattctgttttatactcatcgacgtctttctgtcctacctgttcaggcttggggtaggatctagcttggtaatcgccgctggtcgttgtgtggctcagctctcgttgttgagcttgatattggatagtgtgttcgattggggaaacatatgggcggtcgcagcgatcagcctttggctgaacatcgtgggcgcatgggagactggttcgtcaaatctctctcatccccttttgatgtgttctctttgcctatctgaaactgagatagactggcgagctcactcctgtttttgagttgtgcagtatataacaaatcccaacagagagtcatctggatgttccctatcgtgctcttggcgcttatcgcaagtagtacaccgatatgcatcgccggaagtgtagccatgcagagaaatcctatctggaatccaaagcaatatggtacttccattggagtctttactaggaataaagtcacaagagataaccaagatctttgagttatattagttcccgtgttgggattaatcttgggatctatcatcgcaactgttagtttgagtgtgtcgtttgtcttggttcgtccacttccttcagaattgtgtatctttctttctcctttccttctttctggagctttagtgattccatcggaactgaacaacgagaaaaaataatgcagaaagagtttaccctctatcgagatcggatacagaccaagctcgcaatgggagcttcccgatttgagatttctcttcctgttgctaggtcggctttgaaacttgctctctttccgactatcaacgatatgaggtcggtcagatggtttcgtcttgccttccttcgcgtgcattgattgccattgtttgagacgttctgagagttgactttttctttgcgcgcacatatgcacacgtctcatttttttctcaagtatgattggtttggtagccatcccaggaacgatgacgggttctctactaggaggtataccgatagatcaagctgccaaactccagagtatgtgtccagaccgtgcatattcgaactagatctgggttgttgaaatcgtttctcttttgccctttgtgttcatctagtgattctgatgttcagttcagttccatttcaccgcctttcgcccacatgtctttccttgaagttgcaactgattcatcgtattactttctcgattccatccctcccccccatgttatccgtcctcagtgatcgcaggcgcatgtggcttgtctgcgtttcttgtagtcatcctgacatgtatggtcctgatcgactctgatcatcgggtccgaccggaaaggacattctaccaagcgagcatcatcagtggaagtcttggattgattccttcatggatgtcgagtatgaggcagaagatatgggtgaggggggaatgatgtacaagaagggcctgacatcgttctgtctaaagtccttcgcttgccgacgtgtcgttttcgttttcttcttccttgatcggcaccgctttaaccatcgatcccccgaagacctctcccccacatctcaaacaatcccagcctttctcttgccgaactttcaactcactgctcccttctcctgaaaccatcgccatactgagttcggatcgggaagattctagaagcgcccctccgagacacgcataacagtatatacagccggcccagcaatctgcgcgaactggtatatggactgctaccgactcatcctcttcctcctcttcctcctcttctttcggtttctcttcctctaaagttgagccgaaagacggattcgatgagtccgctgattgtgccaacggagaaagctgaggaattaatggcatagaagggatcggaccaggcgcacatggcccattcccaccggtcttgtccgaacgggagtaacacagcggacaggcccgcctatcgatcttgctgtatatcccttcgtgtggtcgatgactcgagctggactgaaagagagaagaatccgagttgggtggtgctgtttgtgagttcatatccgagcgtggtttcagggagagagatgagggatatatcggaaggggatcggtcaatgtagatagtgtagaagtgaggccatgttgtatccgagaaagagggccaaggacatatggagccaacggaaggatatgaggcatgaattgctgtcatcaaaaggagttcatcgtcagtgaagagcccaagaaacagatatgcaagccatgcgagtgaattcgaagagcataccgataacgatccccagacgagttgacggttcatgaattcatacgacaccattcgtgtcagcttggacgaagaagggacaagcctgagccccagcagtctggtcaaaagtgatgggtagcttttcacaggacgagaggaaatcggacatacatcagcaaacgcatctgaccgagagagacaactgaagagacttaccgtccatcgtagaggaaccacagcagccccgccaattcgcctgcccggccgaggtcttcaagtttgttcacaccatcccagatccgtttccgcaagctccgacgaggaagatcaggccatgatctggagagagcatactgcttgaatcgctgaaggatgtaccgggggaacatttgtggagacagaaataagtgtagaagtagtagagttcgtactagaataatcaattcgatatctaccgtcagtattggacgaaactctcctagaaaagaggatacagaggaagagtacgaacgacgatgcttggatgacccgccgttccatcgttcaggcttgtacttgaggttttccagctgagacccaggagtgacaaggcgatcccacatacagtacttgtaagtgatcaaactgatgagcagatacaactctggctggaacgtgagcttgtaagaagactgtccatgtgcaccaatatgatgcattcagtctgtcgttacgtgagagaagcgatccatgttttgagagtatacgaaagaacgaacgccaaagttatctagagaagaagcgagacctcctccaagcatattgaccaaagcgtcatccaactcagcggcatccagctggcctaccctgagaacgtttggaaggaccgaacgatctgccatgggacgatgggagtgtgtgcgtatgtgtgtgtgtgtgatgagcagctgatggctggatggacggacgaaggaagaaggtgatgggcaagtaagatacaacttcggttaaaccggataaaatcgttccggccagaactttcatcctttcatcgtccatcccatctgatggtttcggggttggttcgtgcttctttgttcttgcttgcttccgcttagagtgtttggttgttgctgctgttcacatgtcacctcacgtcaccgctcacaggttggattagtgtcaagttctcatatcagatccaccggtcgctgcactaggggctctgcatctagcaaccaaccgtccaagacgtgcattcaacccaactagatcaaccttccttactcctctcgatgctctttgttcttcgcctagtccacccatcagactctccaacccgtccatctcaccactctctccttggacttcccattccttctctcctccgtgcgctttggcatgctcttccgcctgagggtctaccggaacgacttcagacatacggacgttcgacagatcacgaagcaagtcccggacatcctcaacgatggacgcacgatcggagggtgacatgacagagatcatccttggttcgcacgtttggagatgagaagacgagggaggacaaagcgaagcgagaagagaggatgcatacccccgaatgaagcctagcgtccgagaagaaggcatagattgggcgaggccttgatcgaatccggtctggatggtagagagcttgccgctcgagataccttccttgtaccctacctagatatgacccacgccaggtatcaagcacacagtcggatataaacacatgtaagcgtaaggagagggtccacactgtcgatgatgaatgagaatgagagtgctggcatccatacattagtgaatctctcatgtagggtagaccattcctggttcgaactagccgtgttgagggcgctcgatatggctggcacctcggacagccagtcttcgtcttcgtcatcaatgtggttgttgctactcgtactatacatgttgaatcaagaataccctggcgaatagatcaacgctgaagaacgagtgatgatggtgacgatgatgatgacgacggtgcattgcaaaacacaaccaaagaaacttcaaagccatgtctttctgttctcctccttccatcaccaccatcatcattgtgtctgatacctcgcagcgtcctaacgtgggaagagactctgtcttcttctctactccctttctctaaccatcatgtcggttgacacgccgatgcttccgagaaagaaacagattcgtctgccgtttcaaccatcataccttccgaaacacgccaacaagtctcaacctagatgcgccatgtgagtgtctcttcctcctttctcgcacctgtggagccttcaatcaaaacaaactattctcatgaagctagttctcgactgatgtgctattcctgtttttaccgaaaaccaacgatgtcagatgtacaaaacaacaatcaaaatacttttgcccccgttgcaacatcccgtactgttctctcccatgctaccaaaacacatcgaaacactcccaatgctcggaacccttctacagacaagagattgaactcgagatgaaggccgaacgaggagaaaaggggagcaaagaagtccaagaggcaaaaggaaagatgtgggaaatgttgaaaaagtttgaggaaggtataggtggtgatacgctggaaggcctcgacggattcgaccaagaaagcgaaggagaggttgatgatgaagaggacgatggactagatgagctacaggccttattggaaggatctaaactaggtgggaacggttttgtttgttcctcccttcagggtcgtgtacacgagtttctgatacacaaagctgatgtcttttggatcatttgtctctctccactcatgtatgtccatagacaacttatccccggaggagctactttccttgcttcccccttcacttcgatcggaattcatctcatccatcagtaccaactcgaaccagccatcggcagtgattcagacattgttagaatcagaagagctctcggctgacgcggaggcgccctggtggatgcctgtcgaaggagaacgagtcggaaaagtcgagggggaccatgaagaagaacaaggtttcttggaaggggcaacggccagggataagaagaaagaaacacatgcggtgccggatatgctcaacggaccaattgtcaaaccgacagaagcagcagctgaaaacctgatgtataacattctggctatcaccatagcgtacatccagatatccctcgtctatcggatttctccttggaccctgctatcgacatcgctgaagtcaaatcaactagataggaaggagacgtctcaacaagcctgtgaggacttgatgaaactcgttccgttcttggaagaagcaggctcaacattactcttgaagtcggttgaggatgccgaggtatttgtccgatctttggccgatagcaatgtacgtattgcatctactcccttctctgtttctaccacctgctgcttaagcgctaaacatcaattgcatttccctcctcatggtatttgggattgaactatatatctagacaacgattccctcatcaattgccaaagctcatcttctcccgctcctcgttccgccacccacgattgccgttctatccgacatcaacacgacagttgatccgtccattcctctagtccaacccatacatcctcttcaacggcttcttgcggatgttcaccgaactctttctcaaagtctatcctcaccctcggtacaccgttcaacagtcgatcgaacctacaaagcaagttcactcaagtcgacatcttccactcgaaaacgagctatcaaaaaattagaattcttagtagcttgtgtaggtgtcatcccacgaacgacatgggtccggttggggaatgaggctggttcgttctacagtacaaaagaacgtgaggaggctgaggagggagaagaggtcgataaggaaacgaacatctggctgatcgcacaagaagaccaggtccgagacaaacagaaagaggaacggctgcgagagagaggaatgatcgagtcgattgataaggatggagaagcttgcatcgagacactagatgatgagcaagatgaaatcgcggacattgcgataaacgaaagacgagggggaaggattccttctgggagggttatagaaattggatgaccgtttttttttgtcttgcttcttctggtatccgctacatatacaactatcgaccagcaagcccattcgagaagttgatgattcaacagaggaaggctttgtttggtttgatttaaatctcatgttcatatgatcgttgattcgaaccacccatctacactcacatcaactcgttcaacctcctccctcaaagattcctcggcactcgaccccaaagcttctttggcttttctcaatctcaaacaagccaaatatacagactcagacagcgggtccaacaataatacttgcttctcgccctctctcgaacaaggagattgatcagaacaccgcttagtatccaatgccgattgaatcctggaaaccgcggattcgagccgatcgagtttgttccgatagctggacaagggctcggcagtagaggagaggtaggcagaggcaacagtgatatctagttcggcttctctaaatcggttcggaggttccgtcgcaaaaagaacgaaaggcgcttggaaggcttcgactaatgaatctgtttgaccagccaaacgtatttcttcagtcgggcagaccaaggtagaaaagagaggaaaggagaaaatataaagactagaacagggaacgtaaagacatactgatagatcgttcatctaggactgtatcccacaacgtctctctccagccaaccatctctgccgctcgttgtttagagaattcccaccacttgatccaggccgtctcttgcgccaaagatacatcacttgacggaagaacgatccgaccaacgagatcactcgctaaagaacggatttcttggtcatcatcttgtaagaatcctcggatgagccgactcagagccagaaagacttttgaggaaacaatacaggatgttggattgaacaggacgtcactagcagagacaagtgacaagattgtagagagtcgagtctcttccgactacgaatgtgtgtttcagagaagtaacaattcagtcaatgtttcggatacattggcaagagggatcagataagggatcactaacttcgttctcgtctgcagagctttcaagcaaggcaatatactgtgccgcttcatccagagtgacatcctgtttgttggcgaggatgaaacaaccaaagatgagatcaactctctatgaagcttgggggaggccgatagctgaactttgaaacaacatacgatttgaatgttcgcgccaagatgtcgcaaagcaacttgcctatcaggtaggttcgataaaccttcaaacgcagccagacgttgagtgaacgacatccttcgatcatccgtcctgttgtctccctttccagagtgttcatcggtcgactccggagaagtctcagactttcgaacatccttccatcgagcacaagccgctcgatacagatcatacccagggaaatttttcttcgcctcctgatcgtgttctcgatccaaggtagcgaagttgaaaatttcttggaagtatcctattggaacatctgaagacttggtctctagcgcctgaacgaccttgatatacattgcccttgtaggtccacacgggttcatgctcagcagattctctcttccatcaagcacagaatggaagacctggggtgttgtcaagaaagagatcaaacatccagtattttctagtagggcaaggacctggaggaggagaccgtgtgtttggttctgacttctgatacgttctttccctaatccaagagatatgatataatcagcaacagctgaccggtgtatcaatgctggaagtgcttgggatgccgccaaccggatctgaatagtccaacaaacacaacaaagattcttgagtaaagagccaagaacataacaaatgtgtgcgaaaagagatatgatcgacggtgaaaactcacgtcgagctctttgcttttagagagcgcctgaattagaggaacaaacgctagctgatctttcgttgcaggttctgatgcctgcaagttctgaaacacttggaggacagcaaacactgaacctgaactgacgatctgatgaaaggaagaaaaaagaaagaagcatgcgggataccaaatggggttaagcggacagaaataaaaggaccataggccgacaatgaagatcaaggacggcagtacctgttcgttcgactgtgtagcttccaccaagactctattgaacagaggtaacaacttgggatacgaggcgaaccagaccgtgaagtactctcgatgttcgatggtcatttcggcttgacttcgacggtcaaaccctcttttaacgagacttccgagcagttgtaagccaacgtttcgaactgttgacgtatcgacaaaacaaacaagagcgggttagaaagcttctcgagttttttttgtttgaggcaagataataccaggagcgaaacgaacctccccaggttggtgaagccaatgagtccatagcggtcatcaccgcacgctcgtaataagccggaaggtgagaagcaagcttcgcatttaaacacacaacctatcctcaagaaacccgaacccgaataaagaggaaattcccacgattttggtcagcttgagcacgagaaatatgttcggtattccattgtccattcgatcgatcatgacttacctgaagagtgttgatagcggcgataacagtcgtaggctgttggtccgatttccccagttcaaagagcgcctcgaaagcgatcgagacggtgtttggtgcacccaacatgacggccaagagaccgtaaggaagtccggctgatcgacgaccagccgttctgtgatctgctttcaacgcgtctaggtgatcctacataaagtcgagtacaaagacggtaagctccggtggatactatccgccgttgtttacatgtctcaagaagaatacaacgacagaaagggaaaggcaaaaaggaggcgacctacatagacccaaccaagaggcaactttgagaacccgttcttgacgaccacgccgacaagttcggagtaggcaggaaatatcgaaagaaatgcgcctggatgtctgatttcgctgaggagatctctatagagcgcggcagcttgaacgatgtaacattcttcccagattggtgagattttgccagaagtatgtgaccgaccggctcgaataaagaggatggagagcagagtacttttggtgggaaacgcgaaaaccttgagctgctacggaacatctatgagtcaaaaagagggctgtacatacctgctctccttcaccgccctccaagcccaactcaagatcgcactcttgatctctccttttccgcctgctgtgtttgttttctctagaccatcagtagcagcagcggaagcagcgacgacgacagccctagcctcctcatgatctgccactccatcttcgacttctactgattcggacgaaagaacccgacgggtggtttgccatacacgttctagaagacgaagcgtccggagaaagatgggttgccaagttgacgattcgacttggtcgattcgaggaaagatctctcttcgtatcaaagaatggaaagtgaacgatacgtgtttccatcaccaatcagtgaagcacgataaagatacaactcagagaaaacagacaaggtaactcactgaagagcttggagtaaaccgtggactgggaacttttgagcggcttgtacgatatcctttacagagatatctactctttgttctaggttgtccaagatcttttcaacaaaagatactgtacaatcccatgattgacaatcgatgagttttcttttgttctcgccatttttcttcttgctccgcgctttgggagagctcaccttcttctttctggccaccaagattagctttgatatgaaagactaatctgataccaagagcgcccgtgtgcgaatctgaccctcttgggttgaacaggtaggtctgttttgcttctcgctcgagttggtctatcagttcgggtgtgtccagtcctgggggtggagactctgtagagccgagtctgggttggcacggataatggatttgagaaatgccgaacaaagcacctgaaggaaggaaaaaggaggaagaactgacagatcgcaggcggcctctctgatctcagcatacgtactcccaaaacatctcaagattctcctcgtgactctcgcaccaccatcaaacaagccgactgctagaggatgatcgttcgtggcttgactctgctttgaggaaacgtttgagtattctacaaagaacccggcggaccgtataagatgaagtatcttgagagagaggattgttcgcgggtaagttgatcctggtcgaagatttgtgattgtcgtataaaccatccacttttttgtttttgggcaggagatcaatatatagatacgaaaaggtcagcggttttatacaggcgcgatggatgcgagtcataaaaaggagggaacacacatcaatcaattcccgactggtttttaaatccttttcaagttgtttaaccttctcctcatcatccagctctggctttatactctcctttagttctgtggacttggctgcacgcgctcgcttggctaagagtttagaaagatctctgtgagtagccgaagtagacgattttatccgtttgagaaggtccgccgtggattttaaggtttgttgtctcgttctggtcgaaatgagcgtgtgagataggagacaagagatatgcgtttggtcaggagcaaagcaagatataagaagagggcagaagtgagtaaaccttggggatcgaaacaaaaaagaaagaaaacaggagaaaaggtcgaaggaaacaaaagagtcaaaacgaggaagaattcaagagagcacctacctgctatcccacaagttcatggctcccttgaagaagagtctgacaacattggcctcggcctccgtcaatggagtgttgaccgcaggtctctccgtgactagtccaagtacggctagcctgacggtatcattcgagctctgaagacaagtctgaataaggtcatggctgacggccatcttcccttcttgagctggttgaccgataggtgagcagagtgagaagccggctccgagagtggcaagtgagagatagacctcgtctttgagcggatgggttggatgagtgtcgagaaggatctgcgcgatagagagaagggcatacgggtttgactgagtcaacggacggagggtgtgctggaggatgttgaaccggatggtctctgtgtcttgggtttccgttggtggagagagaaggatttgaagaacttgaccaaccaagatctcccaggtccagttcgaggtcgaggtggaatcggatgggtagtagaggaagatgatgaaaagaagaacggcaaagagatgacctctatagcttgcaaggtctcgctcgggcaatagatcgagcagttcagtcggaaggtctggagcggaggctgaaagttgcagggagcaagaatgaaggaggagtgcaagaatctgaagaggagcctttgcgatcaacgcttggtttgaagaaagacatttttcgagtaacggttgaaggagagaatttttgctgatggtatcgaccgaggggagggaggaaagaaaggatgcgagggactcgtaattttgaatagctccccaggcagctatactttttgccttctcctcgctcgctgccgagctcgatactgccagcgctttccatactttgtcgccgatagctagctgtcggctaggctcgaataaggacagagcgatcggtatcggatctactgatgcgttcggaggtgctcgtaggaacacggcgagccgcttgaagattgaactgagtaggccgtattggtcctgagtgagcggttggccgtcgttcgcggaagatgggtcgagagcgaggttgaggtacgtctcgagggtagctctaaaggaaggagagcaggatgcaataggttccccaatgcaagtaggggtgtaagagtgggtgagcttcaggtagaataacctgtgaaagagctagaaagactgggctgaccggtcgaggatgtcttgaccgtcttttaggatggacagccggagctgtcggacggtcgagctctgttcctgtgagcgcataagatctttgagactctttctgctgaaaagaaaaacaggacaagtgtgaaccagatcagtagtgagtataataaagctgctgacgatggcacatgtagctgaacaaaccgacttggaaggtgagtgagcggaggaaggttgaaaggaggaacgatgtccaaagacgctcaacatctggagttgactagtgtagacttcggggtcctggttaggatatgtgttctttccttctttctcgcaccctccgtcaggtattctcatgtcttttacatagctagcagaggatagagaacgaggtggtcgttgtcagagtatattttggtgttcctctgcctcattatcgagtgctctgtgggatctctcagctgacggggaaacacatcatgccttgtctctcagtgttggttgcactaggtattgagcacggagctgcttatttgttcatgtccagtgtgatgccacagtaactttcttataccgaacgaagctccgtctgtcgttcgtacgtacatccaaccatccacccatccactctcagctctgtctatggggatggtgagcaagcatgggtgatgaaaagacaggatggtgacagctcgagagcgcatatagtcgacattgtaataggacaccgtgaattttccaatacatattttgtaatctttcccaacagtccggcgccggtcactccattagagaattcttactcacttcattagacaatccgcccgatttttcctatcagcctttctcgccttctccctcccacccttcatcatcgggtcgaagttgatagacaagcatcaacacatccagctctccctctctcacactcttccataccctcattcaatcgtcacccagctactcatatggccgacctggttgcagacactttggcccttagtctggattcgccgacagacaagaaagctggcagctcgccccttccacctagttcgaaccgttcgtcctttttcttgccagtgtttctttcttttcttctctctttttttttcctctttctttctctctcgatgccttggatctctctctctttgtcctctctccttttcattctccaagtttgtcccaatgtatgttccgagaagagaataggaaggtacagaaagagaacaggagagggagagaacggtcaacgtccgacggcatcgaagatcgatcaatctctgcccgctctcaagctgcccctctcatcgatgccacacgtctagtcctgaggtctctccgctcgacctgttccttctctctcgctcccagtatcgcttcatcagccattccaggtccagaactcaaccaggaatccttcgtccgcctcttcgtctctcctgtctgcatctcgtacatggagagacagagacagacagacacacccacacatatacgccacgatctgaccatcacatccttttccttcgtatttgatcttgtgtcttgaatttgttctcactctctcctctttgtttttcccttctcattcggttcctgccacttctttcttcgtcctcgctcttcctatctcgtaccctccactgttcgccttggttccctctagactccacgccgccgtctttcagtgcggcctcatccgcaccaaacgttcccactcttgaatcaacctcaccccgtccgcccgctccgtccggctcgttggcaggagcgacctccggtccccgtccacccccaccatccatgtccgctcggagactaggcatgaacccgaacggactaccagctagaggacccgtcctcggagcgaacggtcctcgtccaggtggtggaccagccctgatgccaccaggcctggccgccaagcttgccgctcagtccgcacaaaggcaagccaccggaggtccgtcccttaaaggaccgatcaattcgtccagtccggtacctccgtcattgatgaacaggccagggatgggccaggcgactgctagcgcccccggtggtttggcaagcaggcgagctgccgcggctgccgctgccgccgggggtggcccagcaggcggaatgggaagacctccgcctggaggaggtattggagcgaggaggttccccccaggaagaatccctggtgctggcggctctggtggtatgcccggtggcatgacgttgaacggcatgggtctcggtccaagaaaggacgcgttctcaaactttggaaagatcgtgtatgtcttcatctttttctcttgcaatttttcgcttaaccttagcatccttgccgacctcgaccccgacttcttcccttttttttttggtggtcatcctccagtgatccatcaggtcgattaaatttcgcatccaaagcggtcctctcggcggacggtgtcgacttttcatccggtcagtcttacaagatcaacatgtctgagctcacccttcaggacgagcttggcaagggtcagtacggtaccgtccagaaagtgttccataaacctacaaaggtcgtcatggccatgaaggtcggtcgttcttttctttacgatcactgtgttcgttctcgcacaaccatcttacttttccttccgcggttttgttctccttctttcttcataggaaatccatctggagcttgatgattccaagcttaaagggattctcatggaacttgacatccttcaccgagcggttgcgcccgagatcgtcgagttctatggtgcgttttttatcgaatcttgcgtatactactgtatggagtacatggacgccggttcgctcgacagagtttatgaagacggtgtcagtgaggaggatgtcttggccaggatcaccagtggggtcgtcaaaggtcttggtttcttgaaggacactttgcagatcatgcatcgaggttagtctcttctcgatcatatattcttcttctcaaaatcattgtggagagtcgctgattaccagctcttcgtaactgctctactcgcttccgattcagatgtcaaaccaacaaatatccttgtaaacaggaaaggacagatcaagttgtgtgatttcggagtgtccggccagctagaaaagtcactggcaaagacaaacatcggttgcgaaacctacatggctgtttgtccccccatctgcctctacacttctttttctctcgccttcgtacttatgctttcatcctctccatctcgaaatctttcagcctgaacgaatctctggcgagtacgcaaacagcttaggcacatactctgttgcctctgacgtttggtctcttggtctgtccatcattgagaccgccatcgggaggtacccgtatccgcccgaagtgttctccagtccgctcgcacaattacaggccatcgttcatggagaaccgccgacattgccagagacgttcagtaccgaagctagagacttcatcgcttgctggtttgtaccattcgtctatacttcaaccccttctcgatcaggttttgagggttcgttgtgactaatgttttattcatctctttctttagtcttcgaaaagaaccgacagcgagacctacgtacgccgagctgctcagacgtccattcctactggccgacgtcggtcgagaagtagacatggtcggttgggtcgctcgaaatttggaaaaacgggtggcaagaggtgcgccaatcatgcctccggccgattccggaccaaaggaaggttctgcaccggtggtcagtgctcctggaggaggacccaaatgagaaaacatcagcacagatgccccaattccattccctttttttcaactctatattcatcctttttcatcttcttgtctatcacccttccttcatcatcaatccgttcgatcgtgcggtaacattctggaacatctttcttcccaagtgcctctctgcccttttctcttggatactcgatttctttctcttacatacatgcgatcatcgtgtctttcttcctctcgatccttcctctcctcttctcccctctccttacaagcttctgatccttactcggttgcctctagtctttcctctcagaaacctcactccttgtcttcgctatattacaccaaatttctatttttcttccatctatctctttttctttcttatacatacatcgcctgttctgccctatccctttctttcatcggtccgttcgtccgctcttgttagagtcttcttctcctttcttctattcgctctcttctcctttgttcatctgttcgtctgtttcctcgttgagttgttctttatcgttattgatgtatccttgattactttctctgtctcttttatctccttacccagaaaaagaaaaacaccctctcttgtgttttttttcttcctattcgaagacagagttggatcaacagagagaaggagaggcgaatcgatcgatagggatttcgttctacatctctttttcttttcttttaaacttcgatctttgtctcgttcctgataccttctgacggtctatcgtcctagtcgtgcgtcgcacatcgcgctctccatccggcaccatctatcttccccaaaaaacgtatgaacacaaaaagaacaacgacaaaaatagaaataaaaacaaagaaagacgaacaagaaaaggaagcagaaaaaaaaaaagaagaggaagagggatcaagaacgtaaagcacaaacggtgtcatactctactctaccgagtctccatgggatcccgctttgtgcgtagaactctcgggggtcttcatcctacgtttcatcccgggttgcaagatggggttcaaagaaagcaaaccggtttcgaggacagaaagagtcaaatcgggaacagttgggtttgactgtcaacatggggtggggaagacaggaaggaaacagaaagagcgacgtacggggcctagattcaacacagtcgaaatctgttgcaacctgatgaatttctctctcgagcctccaaaagatgtctgggtggtaaggaagtttgcgatcgatcgtagatctctatcaaaccgtagtgcgccgagctagacccgtggaataaagcacacaagacaacccacccggagagaagaaagatacacggattgtcaggatgacggaaacatgattttgaaagtagacaaaagggggggagaggggacagacctcggtgaatttcatagtcattaacaatttctcccatggtcggaccagtacttcgacgctcattaggaagaacgcttggtagtttgcgtccgtaaatgagtcctaccatattttcattccagcccatgttgaggtcaaaagaagaaaccccttgtcagattcatatgcacgttcagaaatgaagacagatgaaagtctcaccctgtaaccctcgaccaacgcgtcccatcctctagcaaatctttttctgacgacgtcttggaactctgcttctgcgtagctatcttcgtccaatgtataggtaactcctttgtagcaatcttcaataaatgctcgcagtctcggtcgaacgagttggttgaatagttgatcgaggcttgcctgtttgtgggcgtgggttatcaagaaggaagtgagcttgatgttcgatggactaaacttgatctccacattttatctgtcgacgacagctcacaaaaagacgcaccttgagagtcacccggaacttgtcagccaatgcattcaaaggcgcgaaggctgcgatggccttctcgacctcttccgtcaagaacgcctgggggattgcgtcactctccagaatctcatgtagaagtcgttctgtgtgatcagccgaaacgtccaaatcatttgcgtatacctggtacgttcaataaagaacagatcgtcgatctatcatcagaaccctctacgagcataaagaatgagagagataaggacgaaccacaaacgttcctctcatctctctctctaatctctctgcctcacttcccgccttcggtccacctcctccggtggtaccaccctgagtggctccggtcacacctgcacttctcacacctgcgtacacaccgtccatcttcctcttcacacccccaaggtaatcaatttcgatcacttctgccactctggccgtcattctctccaacgtactcagactcgatccggcaattaatcggtacaacactgatttgagcaaatagaacgtatcgtccggtgcggatgaaaggtgtggtctagaagatgtgtctgagatggacaaccggagagctttatcggtcgtatgtcggaggaagaacgtctcaaggggctcatacacattttgaaggctttgatggaatagttgttgagagccactggtctcgatcaggttggttccgtcaggagacgactgggaaggtgggagtgatggcgggaaaagtggagagtttggattcgcagaaggcggaggtactgaacccggatcgacgtcctacgtagacaagattttagatgaatcacattcaagcccagacaagcacacagtccatcagctcaacagaattctatcggtgccctgaaaaacaaaacggacctgtaatcggccccataagaaacgtcgatagagtccccaccggctggtcatgcctgttagctctctcaacaacttgtcgatttccctcggatctggtcctgtgtcttcgtcagccggatgaggagtaggcgtcgagctcgagggagtgacttttctattggcgttatatgtgttcagcagcgaggtggcagcgttaggaagagaggataggtgagaacttgacaggacactttgaggcggaggtggcgaaaagggtgatctagcggctgtggttgcgttcttagtggccgacaactatgtaccgagcaacaaatgtgatcaatcaaacgaagaagaacagaagatgcgttatgagatgatggagggaacagaccaatctgcgaaccctcctttcctcctcccaaccttctagcaaacctttgactactcggtcaacctcttcctgtaatcgaccaacaacagccttcatccttcctgatccgtaatatttctccactactggttgatgctggtctactatcaagccaatagactcgaatagagccgtaagatgagctatatagtataacggagaggaagcttggaagtttcaggtgatgtcatcagacgtatgagatgaacatatatttagtattgggtcatctcacttgacaagcggaatgacgggatatctcactctttccagcgctcatgtttcggcctcgaaccagacctacgacaaagtcaccatatgattccagtccctcgttctgtgagtcggttcaccgtgtcaagagcgagttatacacgagttgagccagaagacgaatgtgttcatcaaacccgttttacacagacagctgagtagtctcgccatagtttgacttacttcagctccgatctctggccataagcgaaagaatcggctagttgcaacctcatctcgagaagctgctgctattccgaattgacgagaaaagatgtgaagaagctgggatcgaaggtcatgtaaagactgggagggaagagatggatactcggatgtaggctgagaataattttggcgatgatcgatatgcgcaacttgatttatatcagaatctggaattgtaatcgaagtggaagaggggatagaacttacaacgacccgagctgcaaagccgccttccatgatctcctgaggaacgtccatggctcgtcggcaggatctggctgctgtttcccagtcttgggatgcgatggaagtccttaagatctctaaagaggtctatatacacacatatagttcgaatgagagtgccaagttggagaatgaaacgagtaaactgataagtctgcacagtcacttggatgtgttgccttcgctcgtgtgcagtctttgacgagacatatgagtagagaagaacggtgacgaaccttgagctccatcacttcattcagtctatcgactgcttcccgaactctcttcagctccagatccagccctctgacctttccgccgaccctctctgcgatttcattaaccaccccgatcctctttagcaggccttccttcttctctgcgctccgtccgagttgtccacctcggctggtcccatcgccatgctcgtcacttcccacctcagcctcgacctgctcaatccgaggaagcagttttttgatatttgtatgggccgagtcgatggtagttcgatctgataaaagagcatggagatcctgagagagtgtagactcgagcgtctgaagcgttgccaagtgagggagaagagctgaggagagtaatgtcctaggatgaacacgagaaggacccggtggcggatcgaccgaaggcgtagctgcctgaatgtccattccgagacgcaagctagttctactgatgagtacgacgagtcactgtttgaggtacagttgaaagatgggagatgaaatccaaagagccccggagaattgagagtagcgttggcagtgagcccgtgcgaggctggttagggttaaatcccacgtgttttgtgccctcgcgacgcgtcaaagaaacgcgtcagatcgacgcgtcggtccagctaattacacaaccttctcggtcactctggccgtcttcgtcctcgccctcgttctcgacatcatctctgtgtcgtttggtctccttggtctcttttctgtttctaatttccaacagcgataagtcccttcggaaatttaggggataatcaagaagtttgatccaagttttcctcagatcggccgatttttacccatgccacgctccactgtcggcacgaccaagaaacgtcggactttgtcacacggcaaaggagcgacatctacatcctaccaacaaacctcagaagagggagagggtgaagacagctcagatgagatgctggacctcatagatatgagtaccgaggacggacaggactcatcgacagtagatgacgaagcatccgaagccacaccacagccgccttcatcgccgcatcttccgactccgatacctgttcctgtccttgaatctcgtcgtgctcaatcaatcaaacgggcagccgctttgaggatcagaacatcagatcaaactcctcttagctcatctccgatcgtgtcccgagagttgaatcctcattcctcctccctcaggcgtacatcatcctccatgtcatcgcccaggccgcacccacctcttccaatccctctggtctcctacctttgcagtcaactgctttcaccatctaaatcttctcacccaggaagatcgaccacgcctctaccgaacttgtacatggctctgtcactgcttcgaagctctctaagtgctccaggagcgagctctggcccgagagaagaaatcgaaatgaggctgctggagggatctgtcggagtagaaatcgtcaagctgtcattggggatgggagttagaaaacatttagatactcaggataacgtctggagagaacgaggtaggattgaggctaaagaggtggagcggggactgggcaaagcggtgagttcgatcaatggaatacatatccgtccgcttgactgcctctcattcttcttcctatcgttgtatgcacataagatatcactctgtcaaagggtgagtatatatgcccatttatctattgaaatcttctgattaaacctcaatcaattgccctttttttttaaacctttccagcatccctctctagcctcgcaacatctttggcgcttggtcatcctccagactgatgtcaatgccttacttgtaagtcgtctctgcttctcttggtctgacagtgttcagtggctgatcgatggctgcatgtattttaattataggggaaccacaggattgctatcaaagccctcaaaaaagcactggattcgccaacgttcgtatattcttctctttttctctgagacaagtgtaggcaaactacgtttgcgtatctctcgtattgatcgaagcattcattggtgtctttatgtactcagcctctcactagctgcccgcttccaacttctcctctctcttacaaaccactacatcaccgcttcgcctccttctttgtctctcgctttgtctacactctctactctccactctcttgccacaacgaacgacgagcctatattagctctcctttcctcaatcgcaaaattaggtatcctggctcgagaaggaagctggcgagaagctcgaagagtgattgattccgttcgggcccacccagaagttcagcctttcttgtcagattcgaccgatccttccaaaactccagctgatacagcccgacctatagagggcgtgaaggcaaaggcattggagaagcagttgctcatacatttcttgggcttcgccgcgctcgtctacaatcatcttggtgaagctcaagaggctaatgcgatgatcaaggttcttcatgtcaccttggatgaaggcaatgagggcaccgagggactaggagggggagtttgggaggttagttcgaacttactgttttggacactcatatgtgctgtgaatacgattagaggtttgctgagcgtccatcttgtttgatgctccttcagatacccttgcaacctactgctttcggaccatatagcgatggatcgatcagcgtcccacttcaagtcctgttgacacctccgcatattctatacgtccttgcatgtctgataacatcgctttccaagagagaccctgctgtcaaacggcctaagaaacgagtgtttgcagaggaggggatcaggcaactcgaccaaggaatagaggcggcaccgggaatatcttatccaccgtttgctacggtattgcacgtaaaggaatgggaggtcaaacaagctacgatgcatgctgagcttcagtgtgagataattagtgttgccatcatccgttcagaatttgaagaagcccaggaggtacataatcttctcttttatcggtctttccgacccctttgcttaaccacgctaatcttatatatctcatcacacccgaagagcatcgatagtctaatagcctaccttcggaggaagtctcttttcccctccttcagcgcacaagtaactcttcttcaagcccatttatctcattcgacacttcaaaccgaccgcgctttaatactctaccgagtcgctcatcacaccgcgctacagatgtgcacgacgtcggcgtcggctcgagatctggctttagcggccaagttgggcgagatgggtctaatggtcgggctcggtagattggatgaggtcagaacagaatgtgaaaagattgcgaagaagtcttggggaaatggattaggagagacaggagcatacgtcgtcccagctggctcagctacggtaggtcaaggaggtgaaccaaggtctgaagcttcgagtaaaggagggaagatgagagacgttacaggggctgagaatgtggtgttgaaggtttcaggaggaatgttgttggctttgatggagaaggagattctcaaatcaaagtacgtgttcctcttctctttcacgatattgaacttgaaggcgcatgtctctcagctgatctagtcgattatccttttctttccttcttcaagacaacatctgagatcctgtcttgagctagctacaaccgctatagacaacactgcccggcccattattctttctctaacggctgctctctacttggtacgtctgattaataactccttcgttcatcagtgccaacatctcgttctgtcgaggaatactgtccttagctttgttcatatgttgaattttttaatacctcctttatcacgaaactagaacactcgagctcagcaatcgctagtgatgcttcagacggcccttcatctatcgcgcctactaggaaaggacggttctcacggtcatgcagctctaggtctctggttgggagagaagtatgagagtgagtacctacactgtttctctttgttctcattagggttgtgtgtgacgcacagaaattcctgacctagtggtcattggtcgtcttggtacgggtataggtgtgctgaagaggaacaaggatccaaatgcggctggagtagcgaaactgtaagtctcgggtttcaaatacgaccagacgatctgtgctcaacctcggtcttgtttggttgctacagaaaccaacgacatcgagaaaaactcgccgagctttctgcgtccctcccccatcctagcccaatacagccgaaaaccgagcatcagatgatggagtgaatcatgaatccatctgtcttttgcctgattctctattattcatgctttacaatgtttgatttcacctgatattttgatctatacacaccaatcgaaagaccgattggacgtttcttctcttctttttttttttgcaagtgacacgcaggaggaaagcatttcatatctcaactttatccttatcccacgctctggcctctccgcgctttgtgtactgcatctccattacccctttctccctattctccatgtccttcaaccactcgggtttcgaagcttctttcttctcttttcgtcgtttccttcttcgcctctcggtagatgtgtctgaatcggatgaagaagatgagccgagaacattctttcgagattttcgagccgcttttcgatcggccttctcttgtctcttcttctcctatgtttgtaaaacgaaagacaaagacgtagaccatgaatcagaaatcatcattctccccttctggatagatggaaaaagctaaggcggaaagaagacagcagacttaccttcttggcccgccgtttagcctcctccttttccttcagtagatccaacattcgttcccaaccttcgcctactaaaccctgtttgggcacaggcgcaacgtccaacctagggtcgtagtcttcttcgaaatatttgtccatcttggacggtttcgtgctttccggtaaggacgatggtggcggcggggacgatgcgttggggtctctggcatttgattttatcggtagaggtgatccagcatcccggccgtggacgcgcgggtaagtctttgaacttgacatggagccttctcttgatagagacgaaggcgtatgggtgtaaggcgctttgacgatggaggatgggggaggagcgggagatcgaacgaaagattgatatcggtctgttccaggtgtttggtgagtcatcggtccgtctggttcgatttcgggggagcggtctttgcgacgcgaacggtgtcgagaggaaggtgttccccgttctttgtcgtcttggttgtagtgacggttatcgtctgaatcggactcgtagttccgcgattctcttctccgtttcgacctttcgtccgtctctctcgaagaggaaaccttgatctgatccctatcccgctccttgtctcgcctgctatctcgatcacgttcccgtctgccatccctatctctatctctgtctctgtccctctcttttcctttactttctcttgctctacgatctgtccgtccttctctttcggcttgctctgtgatatcatcccacccgctcattcctctgggtggtgatcgagatcgagaccgagactgtcttctcgatactgaacgactggatgaatccgtccggtcgagagatcctctggcgagagaagcctgttgacgaagcagagcttggttgtggtcatccactgagcgaatcatagaggataagaatcgtttgttcgttcgtgtctttggagcggccgaacttgtcgagctggagaagaggaagaagtgaaagacaaggaaggatggttgggacccgttagatcatgcgtttgaacgttttgtatacatcaagaccgtccttaagctcgtagctttgctggagaagtcaagaaggagaatacgaagagcacgaactctgatcgatctgaataagctcctagaccatattctttccagatcctttccttctcctttgcttcggaagcgatcaacgccgctacgtccgcgtcggacagagtaccggaggccgaactcgaaccggaagcggaagtggctgcgagaccgagagatgctctttgaaggtgaaaaataatggagcttgaagaaggagccatcgatgagaaggaggcaaagcttcagcaaggaatgttgctgcttctgtcggcgttggtgtgatattggcaatagcggggtgttgcttgtaggtggtgactcgatagaaagaggacgaatgttgaaattcagatgtcacttctatcgctggctctgttcaagttccgcttcttcttcttctcgttccgatcttactaatcgcttttgctttgtgaagtatcatcgatatcaatcttgagagatcccactgaccaccatcacaatcatctcgaccaaccccgtctaccgctcaaccgatggctacccctcctttcactctcagctccgctcactcgtacgcttggtctattcctctcgctttgaaattttgactcatctttgtgttgcatcctccgttctttcattgaaacggcacaaaccaaaaagaaaagtgaagatagcccaagcgctgtggaacacccaaaacgcaaacttggtgacagccgcttacactacagactccgtctggcgaaatcgatcgacgttcgttacaggccatgaatctatcagacagttcttgacaagcaagtgggagagagaaaagggatacaagttaaggaaggaggtaagtcgagcttggtcctttcctcggtttgcatgcgcgcatacatgttgacatctatcgtttctggtcggcgagaatccgaaagttgttttccttttcggagaacaagatcgccgttcaattctggtacgagtattctctggatcctgcattgaagaccgattggttcagatgctatggtctcgaggtttgtgtcttttgtttcttgcacgagaatgagtccttcggagaaagcaaaggaattaagtagagaatgacgttgtttcgtttgcggtgaccttagcattgggtgtttgcacctgatggaaagatggcacgtcgacaggtttgtttcccccctcgattttgtctatagggagacctgttacccaaagaaaccgagatgctgatctatgtaggacgcttgatcatatacagatgtgcggaaacgacatatcgatcgaacctcaagagcgatggttcaaagatgacatcgaccctgatgcgagttaccgtctcttgtttgcgctcttctgaagatttgagactgactgattgttctcggttgaaacagagcgtggagatctctgctgaacactggacgttggacaagccggtgttccaagagtagggatgataggtcctttcagtgaagagatctagtattatgcatgcgatattacgtatggagacttctattggtacatggtagtaggatacaacttggaaatcggacagatgcagaccgtaagatgcaggagaaggacagaaagaaaacagacgacatccgaaaagaagcgagagacaatttagtcgacgaacctgtacaaaggacaagagaactatactgttagcctttcgatcgaaagcagacgaacgggcgcagacgatcgagtgagagaaggaaagcaacgactcaccacggcgcacgacagacccattcggcatcatccaccctgccaaagccagagagatccactcgatcgcttacgacgacgacgggcagagcggacatcacggctctcaccatacgtgacggaccggcttcgctgattgtttcctagacttgatattgtagcaagagagagcgagagggtgtggatgaggatcgatcccgatgagcaagacaagcaggccaacaggttaaacacgtacaggaatagactgatggacggatttggtcagatggtaagatgcatagaacgatccgcctgcgagcagggcacactgcttgagcacatgggaagggattggtacgagaggcatgataggtgtgtgttatttaaggatcgggtgcttgggtagtgaggcaataagataacaaggcagtagatagatatacgatcgataagagaacgaagaagaagagaaagaagaacgactctaacggaacgatgtgcatctttataaagcaaacgaacgatggagcccgtcgagtcaaacgtcagcgaaccctctgaccacgggatctgccagcacgggaagcgttgtcagcattgcgcacacccggcactcgctcgctcgatcgatccattcatccatccatccatccatccatccatcctcagacgcaccaccgcgacggaacgaattcctgctctttcttgaatctggtggagtcgtccggggcgggaagggatcaatccttggctgactaagcgaattctataagccacgaggcttcgtcgccttccggtcgattcttaggtcttcgatcttccgtcttcgatcatccatcagcttctcgttctttccaagagagacagtgtgtgtgtatagtgtcttttatgtttgtgcttatgtttgcgtgtgtgcgtgtgtgcgtgtgtttcgaataatcccgttgatcatcgccgcttgttctgtagcgtgccaattcattagatcttttcgccgagaactttcatccctatggctccctcttccgctcctccggcatcggcctcgccggctcttgctttgctcttcatggattcgacagcacagactgacctgccgtccgatctttcagaatacttgtcgtccgctcaaactcttctcgcatccttcccaggtgacggatggggtaaaccaaaggtacacgccggagtcgtggacacgttcaaaacatccggtaaacctatcggttcggttaccgccgacggacaagtctggtgcgcgagaagatcgatccatgttgttccagaaggataccaggccttcaaggtagaacaaacttcttgcctattctcatacttctagttgatatccgaccggtgcattacccacccgttcactcactttcatccgtgttgactgccgatgaccttccgataccttgttggtgttacacccgtagaatggactgttgatcgatcatgccaaacacgagtcagagtatatcccagcgctgaaagaaatccgcctagtcgactcgctcaaccctgcagatggatcgtatactgctcaaagtgcgttgagaatgtgtttcctccttttttttcccattcaattatgtctcttcacatcccttgtatgcgcgcgaggcgatgttaactacggattctatgcggtttcaattatttcttcctcactcattctcattctcattctctcactctcacccacccacatacacacactagtctggagcttggactaccatcttcctagaccactttctcctagaaactttgtcatcctcttcttaggaatcgaaaccatcgttggcgaagagttcatcaacatctcgatcccggtcgagaccggccagccgtcagaaaacgtgaaaaccggatcggtgagaggacgttatgtcagcgtggaacgagtccggctcacgggtcacaaagagaacgaagtagagtgggtcatggctttggcttcaaccccaggtggggcaatccctcagttcatcacaaattcttccctgcctggagagatctcgaaagatgttggctactttctcaaatggcttgagaatagatcttagcgtgtgtgtatatgtatatgttgatgtatatgtcgatctgaatgtctgctctaccactgccaacgtcctctgtcctcataccatcagtcttctctgatagagagtgtctccttgcagtctgtaaccatggtaacatagacccggttacatccgaatagccgggactctgttctaccggcttgcccaaatcatctccatcctcatcctcatcctcatcgttgacctccgacctccgaccacggctctgttctctgtcctttgctttgctatcaagtcttcctggccggcctgactcctgtcggacacagatcctcccaatcatggatactacacccagcctgcaacccacagcatcaggcccagcctcaggctcatcaactcagatagaccccggtcgtcagactctcctcgactcggctgtttctttcttgagagatccaaaggtgtgtatcccgaggagttctcctttcgggaaagagagaaagaagagaaaatagagcaacactttctgaccgtttactctgataaccaacgctcaacttgtaccaggtcgcgtcttcctcgctctctcaaaagattactttcctccagacaaaaggcctctctgatctcgaagtctcccaagcactttcgctcgccggatccaacgtttcctcttcctcttctgattccccttcggccccttcttcctctgctcagaagagaacatatccttcatccgatggaccgacagataggttctcaccgtacggccatcaacaagctcagatggctcgaccagctctaccaaagagagattggagagactactttgtaagtcgttgtcgtttcgatacgtcctacacactgcgtaaaagagtctcaagatgatttctgatatcattgatgccgatatcctgggtccgattctcttctggtggatcggaggaaccaataggtgatggctgtgatctctggagggctgatgtacggtcttgtagctctcatcaaagtatatcttttacgtttctctctcagttgttctgttaccatgctcttcgaacaggatataacctgatcgttttttttaaaactataccttatcaaacatctaatcacctcgaacaactctagcattatatccttccccacctcaagcctccgccaacatcaatctttacccaaaccagtcaagctatccaagcacaatttgaatctttgaccacatccctccaagcactcgtcacctcgaccgaacagctcaaagctgagctcgagcaagacagagaccgagtcagaggtttggtcgaggaggttgagaggacgttaagtcaagttagaaagagggaggaagaggagagatcgtggagggaggaggtcatcggtgaagtagagggaatcaaggaagaactacccaaagttggttttcttgttgctacccattgcccacagggcttgtacagacgtgctaacccttctatcgcacccgttctccttctcgtacgatttagatgctttcgtcgcacacaactcttctccaatcgaatctgacgtcgcttcagacagaactatctaccctgcaacctcttcttaactcccgatcaaacccacccacattttctgccaacccccaaggtcctcaaggaatcggtcgtcccatgggctataacatcggtggtatcggagcgggagcgggttcggcaggtggaacacagggaatccctagttggcaacaacagctgtcaaacggatcatcgaccggtagtccagggatccctagctggcagcaagcttcagcaagtgaaatcccgagttggcaaaaaccagcggctgtgtcttcggggacggaagacgaggcggccaagataaagaccgaagaagttgccacaaaggaatgagagagctgtctgcctgcctgctgtacaagttttcttttccaattttctttttctttctctttaaccggccttattctatggaatctatgttgtattgttctctgcatgcttatgaccaaccgtcgactgaagacaaggagcaagtgaatggcccgtcgtctaagaatggccgaaggagggtggctatgaaacgatgacgcgccgggttacccgattttgccggtcgggctcaaaatgagattttcgcctccttcagttttccactctttccttgaccatcctcatccccttccgttcgtttcatcgctccttccttcctcttttgccactggaagacatcctgtcccttcgtatttagtaccagggtcgtttcgttggctctttgtcttttatttgtattcttctcagtccttgtttctctcttcagtcttgttcgctcctcaaactttcggaatagattcgtgttcataccgactctccatctatcgacacctccaatctatattcggcctttcaccacacttttcttcaaatacaaacaaggatgagctccaaaatgaagatctacgctttgcctcttgctaggaaagcaggatccaaacctctcgttgtgagtctctccacctgtcaaccgtggtctactcctatttcttgtcttcttttggtcttacacgccggtgactgatctgattagaactcgcttgtctgtcctccgtttcaatgcgccacagtacttttatacctctctgcctcctccatcctcaacggcgcccacgcactcgaaccctcatcctgataaacatccgctccgcctgaaaattgagcagaaactggacctcctaccgagcgcgcctctgcctctccagttaacagccaaggcgactgctttctggatggatttcgggaaaccagatgcggccagttggaaacagaagattcataagctcggggaacgttggatggataaaatcgatttcgaggagtggagtctgaagagcgtagaacatgggttggtaccggctgatttgttaggggaaggcgaggaatcgcacggtaagatcaaggcggctctcaaaggcgtcccggaaaagggaaaggatggagaacaggaaggtgtgatacggacccaaaatgcaagaaagcagagcgtggtaggtctcttctccctcgggttaatgtgaactcgtatcggcctgactttgcttctttctccctcataccgatatttcgaccagatcgagctactgtatccggaatcgcccaaaatcgacactcttgatacatttgaggactttcttaagagccgtaggtccttcatacccctgttctctctactttcctcttcgaccacctcgactgagaccttcctttctcttcttcgttcttcctgttcgtcaaaatgtaggccaaccgttccacgacaagatgttcaaacgaacgctcgcactcgttccagctgccttagcattcggaatcttgccgatcgtaccaaatttcccgttgttctatgtcggttggagagcatggagtcactggagaggtttgtcttatctgtctccttcatgtgtctctttggatatctcttcattttctccgtttaccttctcgagtcaaggagaaccgcgctcaactctcctttcgtctgttgtgcttcttcgattacggaataccaaatttttgataaaccagcccgaaatgcatccgcgctccttctgaacctactcgacaaggaccgaataaagccaacggaatccaaagtgctcactgcgctatacgaatcatcctctttcggcaagaagacaaagagcaaagagaacggcaaacaagaagaccgacaggttgaacggttcttgacggagaagggcgtggaggaattagtgggtcaggaaaaactcggagacgccgccaaggaagaggtacgtgtctttccttctttgcttctatcgttgccgctttttttctccccttcttcttttgatgtggctgaaagatggagatcaggaagctagctgaactaacacatgggacacttgcatctccatctttatgaaaattggattcgatcagatccttcgagcggtccatcagacagctatccggttacccaagtcaaaccaagaacagagcccgacaccagaatcacacaaggaaaaaacagactagaagcattcc

SEQ ID NO: 1578 - DNA, 21733 bp, Xanthophyllomyces dendrorhous
tctttgcccctattcttttccgtcccttcatatttctctacatctttcttcatctgatttttttttcaatttaaaggtataccaccaatcgagcctgtacacgtttccctcccatcgattcatcttttttcttcatcacaaatcctctcctctttctcgccttctcctcgattttctcaggatgtgtaactcttcctctcgctcggtctcatcctcacgctatctttgtcccttgcctgtcttcccttctttattaaggaggcatcacgattctcttgtttcacacagaataaacaggtcgttcactatagatgtaacggtgtgactccgttggtgcaaagccaaggaagcagttatccaaaggataaagaaaaaaaaatacggccggaggttgaacatcaagagaaaagaacgaataacatgatacatcgaaagaaagaaaaaaagatatacaacattgaaaggaggacagatcggatcgaatcgaatcgaatgggagaggagaggagaggaggggtgtcgttccctccttttttttcgtttaatatatgaatgcctagtctcatcgcaatctgattttggaggggtcgttgagagaatgagaatgtggcggcaagagcagtgagcgtccgaggagtaaaaagataaaccagccgagagactgaaaaggaagaaaaagataaggacatcaaacaaaggttgcaaggagggatgaagagatagtaggaaagatgaacgagcggtatctatatgagcgtgatgcgggtaacctcccgacacaggtggagggtggagaacaaagaaatgatgccaggatatgatagaatgacaaatcgagacgttatggagacgttatgaaaagataaacgacttgccacacggagggaggtaggtggtacaagatagaaaaacaacaactctggaagcaaactaaaggcggtaaaacaaatacactattcactagctgcttgctaaatgtgggaaggaaaacgatgggcgttcatcacctaggttcagctgcaattgaaggtggcggtcagaacagcagtcgttcacaaatgtgatgtgtctgatcaatagaacatacccaacgatgagccattcaaaagcgatcacgtcttcatcaatcaaacatatcgtaacattcaactatctagaacaaacaagatcgttatgtcaggtgcactgtacaagttaagagattggttcatcatgttgaagggtcatacggaaacaggtgcttgagtgcgtaaggacgaatcacttgaaatctgatagtcatcatgaaaccccaggggagacgtcagcctgcttccgactcatgtacagtcatgatcaaacttactctaagagggttcgaacgtccggtagaacctcaagcactattgattcaagctctccacttactgaacagttggcctttcagccagactgagcgccatgaacgcgggaagtgaaatcgcgcatgagcatctagacacacggaaagatgaggataacggatacaacatactctgccaaggggtctggcgcatctcgtcgtatgtctgtgtcacacttctcgattgctacaagcaggtcgttctctgtcgcccgttctagccgattggctctatcctctacgctgaccgtcactggatcccttgatgtcctttcatcgagattcaactttccgccagcactcgatcctatgacactaggcagatcatcgacacccataacggatacttggtccgtcacgctcagaacagggactggcgctgggacctccaaaggagttacaggataactcgcgcttatgtttacctgcgagacactttcattgttccgtctgtctggttccagatctacttgagctgagagaaacgggaaagtggggttgataggtgccgattgagttcgttgaggcatagcaaatgagggtggtcggagttggtctaacgatattgggtgtggttccgcaatcgagttctccaagctggcgtctgctccgtagtattcaaactttgagccggtatcagctttcatctcctcgtcctcctctgcctcatcatcgccatcgtcgtagccttcatcagcatcgtcttcgagagaaaggatgacccccttggcctctgcaactttttctcgaagaaagtcggtgttgaacagacagagcgcgcgttccttcttcttgagggtcaagatcatgtctgcgatctcttctgcgtatgtcggttcgatcagcgagatccctgctagtaaccggttgtgctctgttttaccggcaagagaattcgtacgggatagattgggtgttttagacaaagtgatttcttctcttgatgattctctactcggttcagtcttgatgacgacgactgaggggatttgaagctaggagatcaccaggagcataatcaaggcagaacggtcagtcacgatctatcactcaaatattggcacctgccgcttgaatagagagaaaaggaacataaacatttacgttctcatcaacggattcctcgtcagccgatccttgagtcatcgtcggatttgatccggtcagcatgctgacgagttggtcgaccccttgggagaaatcaatggatgtgatagcatgttcacgctttccctgctcgatcatgagcgcttcgtgtcttttttcgggactggaagagaacaagttgttacggctgaggctctgagctctcgtctggaatgtcatctggtagatcggaatcgagtcaagattcttaggagatgattctttctttacgcaaacggagtctatcatacgcacggcctctgcaggatcactattccgtctcgaatggcttcccgactcgggcgccaatcccaaacccagacctagacccatactctgtccttcgagatgacccgggattgagggaaaggccgcgtggtatccaacgctagggccgtcgggcgagcccttcaatcgaagctcggccaatttctcccctcggagttttttgggttcatgaagccgtaccaccatgcgtttggatccaagtagggcgcctattcagacaccagagaacacgtctttcacaaatcggtaagttgtccggggcacaccatcaatttaacaagtactgaccgtccatagcgactaaggcagcatgggctgttcaggataaagtggcgttggttagctcaatgctgcagacgtggtcaaaaatcatcaagttgcctaccctcttgaggtgtctgatagctgacaaatccgaatcctttactgtttccagcgtcatctcgcatgactcgagcactggaaaggcaagagagttgttcacatcgaagggctgagcggacgtaatcagacctagacgcacacaggtttggtaaaacaactaacctgacgattcttccaaagactctgaagtgagtgaacatatcattggaactcatcgaagggtccaggttctatagtgatagtaatgagtacacctatcagcagacaatcatggaaaaagagtcgagttcactgagacttgccttgcaaaacaaattacaagggtcgataagtcccgatacgctcgtcgaaccaggtccgaaggaaggcgcgggctgaacttgctggccaggtcctgttggatagacatagacagtcaagatgcttgactcaggtatctgacaaaacaggcaagaaaaaaatccaaaaaaaaaaaaaacagaaaaggcagaaaagaaaagtgggcgcaccatagtggccagcgttcagattcggactcgccagacccaacatatttggactacttccattcatgatgggcatcggaatctgactgagaggagggcttgccttccaagaaccattcatcccaccaccgttaggaacgaatgaaggggcaagtggagagaacccgaggaagggggatcggaagtagtaactcgaaggagaagacatgttggacattgaacgaagattaggggatagcggagcgattggtattggtaattggcgacgtggattgtaaggcacgatagatctgtcggtttgataggtgaatttggaagagatcagaaagagattttatgcaacgatatatccgatgacagggaagagttcttacagaacttcgccagtgggcatgataggctgtggtcatcaccagcgcagatgaagatggagagtgagtaagcagacaatctattggaccgtcggaccgagaagatttgaatgattacagggtttatctcaaaccagcgggcatcgtcctcataccaaaactcgacgagcgcttcgggagaatacccggtgtcccaatctatatgtcaaatccgacttatgtccaggttagtaagcatgcatgagaggaacagtcgaaatggtaccatgcagaataaagggagagacaactcgctttgatgcggcaggatcagagatcgtagagcggctggcctgagtgcttcccagataagaccaggtgaggtcccttcggggaacccagagatgactcgcggcacactatcaacaggagccgggaggggaacgaaaggagggggataaggtgaaagttgaaagaggttggagagagtggtaagagccttctcggctacagaagaggaagccaaagacggaaaaatcgaccgagatcagtgagtaacatgtgaggtatagatgtaagtgtgcgctttgggtaaaggcagaccgacctcgaacagaatctctaaattcgacggttcctacaccgacatcaagaacggcaaggaccataacccagaaaactcaggcttcaacactctacaaacagaggttgctatatgtgaaagccacttttgaagaaaaagacacaccttcgatagacccgtacatatcgaccgcttctctgccaaggttcagtctgatcggtagacaatcctgaaagagctcggcaatctcaccattggacatgctcgccggaagattggaaatgtgaaggatcgttcctttctagaaagtcgagacaagatgtaattgaaagaggttagtgacctcgagcaagtttattaaaagcgaacacgagatctcaagcgaaccaaatgggggtgaggtcgggcgttgaacatgatgatgtacgtgtatgctgatgtgatggcgtgggattgagattgagattaagattgcggacgttcaaggacgagactcagatctatatgggttttaccagtcggcacaacgttaaagactggagagacccaaaagatagagagagagaatgtatcagacggtgactgagttctgtgcacaaagagaaggttgaatgcaaacgagaccaagggaaacgacagaagaccgagcgagaggaatgtgagagatagatagaaaagagagatggaataatcgattggtctttggcaggaacagaaccagatgcacacgccaggggagagcgcgataggcaaaggcgtcggttgggggtgcaacgcctacacggtcgccagctcgtcttctggctactcactcaatcagcgtccacctgaactatcacttctttctttatcccgacgggcttgtgatcgatatcatttttgctcgagagagagagagagctcaagcacacgcacacacacacacatactctattgtgtacacatccttacgcacttaaacgtatccactcactcactcactcacatcatcacatacacactctcactcacgcactcactggattcttgttcacagcccaggaaggcaggcggtcaggtatagtcagcaacacaagtcaatgagactatttgtcagtcgaccggtctaataacagggtccagctcatgggttcatattgataaagggtccgaaagcccgatggcctctcttggaacgatcagatatgcacattcaccccggtacagcttcgactgagcgaaggaggggcatcactcatcgggtgggagtgtggtctagatatgactaaaagggacagaaacaaaccaaaaacagagcggacctattgatggacagggtcgactgacgtaatagctttctatcaaaggcccttgccgaggaacacgcccgattcgctcctctgccggtttccgctcgagccggttaagtccggaccctctgatctgatctcgtctgatttagtctaatttttttttctgtcgtctcgtctcgacatctattctccgatgcggatctagaccctagatcttgtccggccaggtcgttctacaggtgcgcgtgttctttgctcttattgacctcgagactgtttgtttgaatggatggatgaatgattgattgattgagtgaataattagatatagccaggcacagaatcacattcggagatgacggtgagtgagagctggttaagcagctgacaacatatatatgcatgatggtttctagtgaagggaattgaatgtgtttacgtgtgtctgtatagttatgatagattacaggaataacaaagcttttcttcaaaaactgtgtgtatctatttgtttggtaagcagaaaaggggaatgcagagtaataaaaagataatgtatgtagacagagcaggtcgttaaagagtttgtacagacatagaaggcagcaagggttgaaaccgagcgatcgtaaacgattgggagacacaagtcagaaatcgagatgaaaggagaaaaagacaaaaagaaaatcgaagttttgtaaagttagcgagaggaagaaaaagagacaggaagagctctaccgataactggggcttcctacgaggaacggagcgtttgtcgggggcattgacaataatgtcgaaacccccgaagaggacggtgatgatgaagaggagaaggagaacgcaggagacttcgggaacgaccgcgggtttcgagcaaatgtaagcgtcggtatagacgttttcgagaagggcactgcagaagccggagacgaatcgtcagcaacaaagttccacacgacaaagggaaacaacgaccagacttaccagcaatgccactgataaacttcccagtcttctcagccgatcggcccttcttcgcccaagcctgcacaggaacttcgtcctcatccgccagatccccttcatcttcgtcgaaatcagaatagtcctcatcaaacgcattctccccctcactctctgatgagagctcgtcccgctctacacactcggcacattcgcagtcggaccctgcggagcgagaaggagaaggcgaagctgatgccaggcgagtaagatccaaataagtcgtcgatgggggcgaggtggacagaataggagggatcgacatgtcgacaagtccttgcggctgagccgatcgagcagatacctgagcaatctgaataggcgatgactgaacgggctgtcggacagtcggctattcgttcacaatatgaaacggtagtataagtggactggctcgatcgaggactgggcggcccaagaagagaaaaaaaaagtcaaacatacatagaaaaacctcagtggcttcctctgatcggatcgacctcgacctcggtcattgtcctcctcgacttcctctaccgaggcaaccttgaagcttctacggctactgtccgaagcagaggatgcaggcttggagactggaaagctagcgagaaacattgttggatagggatgtatgcgtgctagatgtcggggttgacggtgaagaatgggaaaggatgttcgcttggaagttgggttttaaagtaaaccttctacactttcaacagattatacaggagaagaaagatgataataaagagatatagaaacaggaagaggtcagcccagtcattcgaacgagaccctgtccagtcggagcagtcagggtgtaaaaatatcagtagaaacaactagtgaccaacctgatgtactctctatcgatgttatctaaataatgctttgagtgctggggttgtcgttgttgtttgtggtcttggtttttaagagaaggagaagaaagagggaaaaactgaggaaagagggtttatagatactcttcggaccaacccaaagccgttgtctcgatggcgtgagtgaggcatgatgtttgtctgagtgtggtggaaacgcgtgtcaaaatgatgaaatgaaataagatggcgtgcttaaaaaattcgatcatccgaagcgcgaaataataaaacaaaataaaatcttactgaccaatacacaatatcatccgtatatttcgttctgcttcgtcatgtttccttgtctctagtgattggtgatcgatgatcccgccaagtcactcatgcgatttatctacttgaattaccaagaccagccgaggataataatgagataagatctactcatacaatctgtcacgtccgctgggacatgcatgtacattatggagagaaacagagagaagagggatgggtaagaatttgaggacagaaaaaggaagagcaacatcgagcgaaacacccatgatcgggctcgacttgcaaatacaaccccaaagtcaagaaaagaagaagtaaagaataagaactaagataaagaaaagtataaaacaccaggcaaaaacagctgatggaggggaatcaggttagaagatgagaacaagtatagaaaaaagtagtcgtgaagaacgatccatgcgaaagtggacaagaagcaaaaggcccagacgaaggggtagttgagtgaaagacgagtggtgcgtgcaaatgataaaaatgcagagacataatgaaccgtgagggccaaaatgaacggaaaaaggattttgtgtggtagtgctgctgctgatgatgatgatgatgaggagtgtattggagaattcaagaacattgacagttcggatggaacaattctaaaatgagctcaattggctaggaggaaatctggccggtggaacattgggtagatggtggggatgatgaggaagcgaaggataggccgatgaatgcatcggcaagcgacccttctgaccattagggaatgaatcgactatctctttcggcagcttcggagacccctctgtgcctccgttcgtgagctgggctacatctgtcaaaggactcgagtgggagactccgttcatcgatgtcggcagctgaggaatacctaacgatgggctagacacaccattcatcgatggtgccggacggggaccagctccgttcgaagacgcgacccgacggagctgaggaggctgtggcggaggaggagcaggtggtctgacaagaatcacaggaggcggacgttccggactctcttcggctgcccgttgagcagccatgaggtgactcgaatcggttgataggagcgcgatatcactctcttcaaacagacttagtctgactttgaggtgcctagagaaagaagcaaaaaggtgataaagtcagaacaccagttgtgttccaaggacgatacaggcggaaaaaacggaaacaccacgaacctctttccgtattcatccacgacgagacgctcctcgtcttccagacctcgagtacccatacccacaccaaccgcgccaagctctgagtcgtatcgccaacgttctgatattcgtcgagcatagtcccgttgatcgtgtccatgggatgcgatggaaaatccttcgattccatccatcggctgagacgtgtccttagactgttccagagttggtctcgaatccgaacgaagggaggaccactggtctgggaagagctccgcagaaagaggttctgatgatgattgagtatagtaggatgatgtgcgaggagacgcaacaggaggatgttgttgacgatgatgttctgatttacgatcaaatcgcatgatacctcctcgacctcgtcgcggtcggaaggacgtggcgaaacggccagaaggccgagcggaggaagttgttgatgattttgcagcagatagtactgaggaggaagggaaggcagaagaaccttcaggtagcaacgggcggaaatgacgtgcaggagtaggaggaagcaatggttgatatgcgacctgaatgaagaagagaaaagaacaggtatcaatataattctaatatcggatgaaaaagactagcatatgacatacgtcggtttgatcttcccattggtaatctccttctcgtttgcgagccacgtctcgctcgatctgcattgcaatggcaaccattcgttctcgaagggcctcgagaggataatggcgctctccgggctctcttctctccttcccttcgataccaggcgccggacttccagtggcagagccactttcccggccagtcgttccattctctcgttttcgagaagatttggacgctttgtcctcctttaaagaactgagaaccgactcggctgtcttcgattttttgttggccgaaccgatgcctgttcggaacaagagctcttcttcatccggtctgagaggttgggagggaattttacgcttgatgtcgataagtcggagcttagcatcccatgcgtctcgctcacactgaataagatctgacttgcgtcgctccctttggagagtgtccgatgccagctgagaagctttgataagctcactctggagcagaacgagacgatctactgattgtgaatctgttcggcgcgtctttcgaacagacttgacctctcgtcgccggaagcagacatatggatcggcatcattggattcgtcatgctgcatgtcggaagagtcggaaaggaaaaaagaacttgagatcagaaacaaaaaaaaagtccttgcacacaaaccttccccaagaaacaccgccgtatggaaaggatactcacgttaagctggggaatgatgtatcggccaccgctggcaagtttgcgttctttccagtgaggatagatagctttagccatgcgacacagaatgccaggcggtgggacaccggcgttgatagagtatgttgggaaataggtaagaggtaacggatgggaaaagaaagattccatatcagtgagagctggtatgcgagaagtgtcctgaagtacacgtgaaagcaaagcaatatcaatacaacgatactcgacgttaactataaagatgtgaagaaattgtacatactgtatgcagtgttggcacgcgctcttccgtccacttctccatcaaagccatgaccagctcgaactcgtcttccgaaataactgatggaacaagctcctccttttcctttcctttgatccgaaggccacgattggggtcggacagaccgttaggcgcagaaccgttggcgatttcccctcgagcaagacggttatttttcttgagccactcgtcatctgtctcatctaatgtgtaagagaacccaaggccagacggaccggcacatgcttcctcaaccgtatcggaaaagcgcacatagccaaccggatcatgccagcgctggggctggtagagagcagtataattagtgattactccggtagcatcgggtgtgggaatggagtagagggcctcttggggttgtgtggtcttgtctggggagccacgggctccagcagaggaactagacgcgactgtacgtgaagaggcagaggctcgtatggcggctgctgaaatagcagcctggagatgatgttctagaagggacaatcggcaacaaagagaaaagatgcattcatcatgatcagcaaatacatcatttctcaataggaccgataacaaaatggttggcggtcaacagaatcacaagacggtgaaaacgtaaggatcgacaaggagagaagattaacgatatgcgagagagcataaagcgcatgcataagagtcgaaagatagacatcatccaagaattcgtggatgtatattgtttgttgttggttgactgatcctggtctcgtgggtcgtgtgtgcttgagcaaagacggaataagaaagaaaatccccatctcatcccgtaatttccgccgctctgccgcgagatgaggggaaaaaacaggtggcaaaacacggaaaaaatgacaggaacacggcaccttgccacccaaagggaaacccatcctccagaccgatcgaatgatgttgcaaccttcaaaaacgatagcaatgaaaagagtgatctcaccttggtcttctcccttttcgactccgtcctgattcaggtttgttttcgagttgtcgtcgtccaaaatgaccggctcagctccatcgatctccccccggttaatcccgagacgagtcttgttggtgagcctggcctgccttcgggatttcagcatcgggttgaacgaaatggatggatgggagtagagaatgatatctactggccctcctgaagagatctgaagcgttgaaggagggctttgccagggctgatgagtctggaaagggcaggggcaggaggaggggcgaaaatttgcacttcccgccacatcaacgatggaccggttgggcgtagaggagagagaaaaattacagagtccatttacttccgaatgccgaaaatctaacttgacattcgcgtccacgcgtagacacaacaccacacaaacacaagataaccagactatccgacaaaacaaggaaacatcaactacaaacacacaaacatccttctctctttagctttttgttctcttgcgtgtcaattgtttgctctcagtacaagatctcaaggggaagagaatatgggtaagtgttgcgtttgcgcgccaggctcaaagctcgagcacacctgtgtgggtcaagaagacaatgaatgagtacagttcatttccaacccgagacagatgatgaagacaagacatacaaggctgatcagtaaacgtacggattcatggctgaatctaagaaaagggactacacggccttctatgtcagctgctacacatgaaagactcaagatcgatcctgatgatgaaaagtcatactcaccgtcagtgatctcaaatggtcaaccatgtgtgcgctacggaacgagcctacatcttagaatttgtcaagactacgctcatgttatgattagaggaaactatggtgataaaacacgcgtgtcaattcaccagtaacagacgtggagaacagaagtggaatagaaaaacgtacctagaaatacatcaatgcgcacatgtgccgcaatactctaacttggccaatctgaagaggcctttagttaacactacaaaaccagcttctggtatcgcatgaattgagattgaccacatccctaccctcccagagcagcctgatgacaccctgtggtgtcttacaaaaagcatgaaacgtcgtagatcgtaaaatgggcattcttcacaacgctggtttttattttattttattaaggagcctaaactttcacatcgttgggagtaggtttcgaaactccaaccaattcggggtgcttgagagccatgatcttgtccacaagctccttttgatgagtgttgttcctggcctgcatgctgtttgttcaggtgaagttggggtcagaaaaaagagagaaccgaatgaaaggagagtgaagtgaggaaactaaaagatttccctggagaaagtaacattgaatgccaagaagtgatgcaaggaagatcattcacgcacatttgagagtagatgatccatatagggagacctagaccgacaatagtcacgagtgaagctaggaaagagaccagacagtttaagaacatcgatttgatgagtttctatagacgagataggcacagggctatatacagcagaagaacagaagaacaggaggatcaagaagtgttactcactaaggaaagcatggaacttcttccttcgtggaggtggggggggcaatttctgattgttcaaaacccaacgcatacagaattgtcctttcaggaagattcacaaggaacgcaaaaagttagcgagttttctctttgtaaagacactaacgtcaaagctaaagacctagatcgcaaccacaagaggaaaggaacaacgtttgcgttagctactggaagaacttggcatacacctgatcaaagacatcttccttggcctgtcaaccaaagcttcagacctctaaactgaaaagacatacttttgaagaaggctgtggataatcctcagcagtggcagcaggtagcctggatctccattgactgatcgcacccgtagattgagctggagagatagcggtcgattcagaggcgacagcagaagccggattcaatggactcgacctcggagctgctgatgagcgaaaaggagatccgaagaagagtcgagaaacggaaggtctcatgttgtcaacaagaagaagtagaggaagcaagaagaaagagtaggaagtattgaagggtgtaaacgtgtggacgatgggagtgaacggtgtggagtgaacggaaggtgctgaagagtttgcactacatcagaacgcccccgacccgacacagttagtccccatcaatcttaggtaataaatcataaaatcacaactgaagttagtcatgtttcctcacactcgatactcaaacgtatacgtctatccagacaacatcaagcatgtctattgtaacaacaggtagatcaacacacatgagttcacatttagaacaacatcaatctaataaaaagcgagaatagcgcctatgagctaattcttgccaccatccttccagatcatatctttctctatagcttgttcaagatcctgttcagcgctctcagaatctccaaggcctgactgctcgaggttttcttctggactgagagaatcacattcacatagggatttagtatatatgtcttcatatcagagcgcaggtgggaagagaagaaatatgagatagactcacgttttccagatgtttttcgcagcatgcatcaattcataaagctgtcccatttgctgagagggaacaagcgagaaacgacattttttgataagaaaacagaaagaaaaaaaaagagaaaaaggtcgcaagatgacaggtacgtacctcattggacatctactcatcgccagaaagagaatatttcaaaagttggatatttagtctaacctcctgacacgccaactacgagtcgcaaacagaacacggtcataccttctccaatttctccatatccaatgttcttcctcgatcgagctctcccttctccaatgaatcaagataatgtttccattgagataagaatccaatgatatgtaacgggttgtccgtcgatttgtgccgcttaaactctatcagaacagagatgcagggtatgtagcacgaacaagaagaatgccaatcgaggcgtatgtcaatgcataatccgttgtgacaggtacatgaaggttactgatatgacataccgtctcgaacataggtatcccctaaagaacgcatgtctattggaagctttcggtgagctcgaagtagccgtcgaaacaacctaagagacaagtgatataaccatgattaatgtcaatatttctagtgttcgctcattagtgaacggttaccccagatgggtatgagtccactctaggatcgagaaagtagttcgaagctcacgggatcggcggcaggagggcgacactcgcttctctgacatcacgaggagctttgatgacggtggccgcatatctgacagccagagtgcgttgcatcgtgcgagaaagagagagaatgagcttgagctaaaagagaagagagaagagtgggcgaaagacgtggttggctattatgtctaacacgaagttagatgatgatggttatgatggccggatcaaaattcgggcgattcccttcgatccctgaaacatcgcgccgttcgatattttgtctctcagtgaccttcatcaacatccaatgatctccataaatcctaaccctgtcgtcgactcggcatatctgattcattcggtatgtgaatacatcagtacccaatcgagttaaggtgagaagactgatatatatgtgtcatgattccaatatataaaagcaagctcaagatgtcagattgtcatgcaacgagcagatcgaacaggcggctgaatctgtgagtatcctcgcttgcttgagaccaaacaatcgaaactgatcagattcgtcttgacaaccgaacagctccttccctatctgacaacatattctcctctcacgtggcaaactcaaccgctccatctactaccagcatcaaccccctcttccaataaatgttcgctccaatttccgaaactcaaatttaatcaggacgataaggcctgcttagactggatctttttcgtatcatctttgaatttttcgttctggagtgatctgccctctggagagaggtggggaaaggaatggtatgcggatggatggaagggactaggagggaagaagaaacgttgggaaggctattggggactcttagccgtcgtcaactcaggtacgcactcttacccagatttgcgtatgctaagcaactcgatctaaaggacttattcttttacttcgatatcttccttcgcgatactagctctagagaatggacatcccctcacagacccttcattctattcatccactaactccgccgatctcatcaaatctcttttcgcgccaacttctccatcaaaggaagaagttcctcttcttcaagatcggctttccattctccagaagaacggttctatcctctgctcgcctagcaacaactacaacggttcctgggctggatttctggaagatttcttctccaaagatgagagaagaggagcgcttgatcttgtcaaagaagtcgttagagtcttcgagagttttagggacgagggattatggaagggagagaaggtatgcttttggaagagagctcagatcttagttgcagagacgtggtatgtttgtttcttcacaaacgcatcaatctagccccgagtttgctgattgttgatgtaaaaacctgattttatcttgaaagggctgcattctatccttctgattcatcgatacctcatcctatcttccctaatggtcttggagaacttacaatgttcccagactatcgagtgcgtgcttcttgatcatatctttgccgtcttgtatgcggaatcaacaattctgacttgattatgacgggacctctttaaatcattatcaggttcctcaacatttacatacgttgaaactgttgacatactctccctctctatacgaaaccctttcctcgcatgctaatcttcctcatggatcgaggctcgagatggaacttcgcgctggctcaatcgtcgccatcgaggaagtcagaaagacccttcgacgacttcgagatggggtcgatatcgagagtgtggtgttagattttctgatctgggatttagccaaagagatggaagctaaagcggcgaaggaaggaggcaacttagtagaatgtcaccgaacgaggagtatatattattgaacgttgattcaacttgtgtgatatgaactgcatggactagctatcccacaggacttgaccgcatctgcatgaatgttacctctcgcaaccctaacaaggataaagtgacgtcatttctctcataaacaatatgtaacggtaggatcatcaacagctgcttgcgggcagccgtgatcaagcatgtcttagttgatcttgtggacgactctcctttcaacttcaagtacatcccttaatacatctctgctgacgataccacaagtacatccacatccacatccacatctaccaaaatgaccaatcctctgcaatccctctttgacgctgttgtgtctgtcttccgggctgtttatgatacgttcgtagtacatctttgtttcaaaccttttgaattactcattgacttcttcttggtttttctaattataatccatctggtgtatccttgtatcaggttctacgccgtttgccacacaatcttctctgtattggagaatgcgacgatcctagtctggaacatcgttactgggatcctcaagacgacattcaatgtatccgaagctacattagaaggcgtcgccaagctgttcgtcgatgggctagagcttttgtggagtacgttctgttatcttcactcgaaagataagatgctatctttacaagcgtacgagtaactgacgataagtttacggaattatcattcgttttgtggggtttcagataacaaattggttatcggagctattgctttggtccttgttgtccttcaatctcgaacggctcagaagacggctggtaacataaagcagaaggctaaatctgcttaggcagggcactcttctttcctttgcttgattagtataatttgaatattccaagttgtaataactgtcttcctcatcttgatttctattataacctcgtagtcttatcttgtatcaatgtttacatagtttgattctgacgttcaacataattcagctattttgtatacaacttctcactatcaccttatcaaacaattttcagctatagaaatacggcccatcatgaagcaaaggatgctcagaataatagaacaacacaagaaaagaggagttggcactataagatatgagagaaaagcgatcagaaatgaatgtgcactaaaagatatcaaggaagtgaagtggagtctgggtatcaacggatgaagtgcgtgaagtcaatagtaagagaagaaggagatattgagagaaagaaagaatgggagaagcaaaaacgctacagcagctaccatcggttaccgttccactcatcatgctctccagcatgcgctccttgttgtttccggcctagctgctgttgttgatggtgatggtgctgctgttgatacatagattgcataccccccattccgaatcctaacccaacctgtgccttcatattaagttcgcctgccagcccttggccaccgggtcgatacatttgcgctgcattagctccgtacatggctcgggccagatccatcgagagaatttgagaagagatcgctccgttggcagcataattttggaagtaagggttgaattgaagagaggcagggttcaagccgtagccaggggtgataaaaggaggcgaggccggactaagttgaagttcgggtcagaaaaacaaggtacaccgtatgagtaacatgattgagaaccaagtcagatcccaaaagaaactaccaacgttcgagggccggtccaactctcaggactggaaactgcttcctcttgtgtaggtgagcctttcttcgtcttagcagcatcttctcgcacgcccttttgagcggagttatcagcaaatcggacgaccttttatacagattgacaaatgtagacaagatgagctattcaaactttagtcatccttttatacgagagcagatcaagacgtaccaaaggagcacttgcgcctgacaaaatcttgccatgaagcttcagggggtaagttgaacgaagaggcgacatagaagggaatcaagaaggtgagctgcatatacaacaacttctcgcgaggcatctatatttgtaataccttgtcaatcattagatgagcttcttctctggtttgaagtctataatgtcgaccaagtaaggttcactattcagcatcaccaagaatgcccaacagaacgagtattcttaccgaacaagagcctgagacacgaatttagatgaaaacatagataaatattcggcgcataacaaaaaatggaggatttatacatacgacaccctttccatcgaccccacctttgccgctttccagcattttgctcgaaacgatgatattgggcacaaagagccgctggaataagggtagaagtgatcgtacagttgagtttaagaaacagatagaattggtataagatgtgcgttgctgacctcgagagcctgaatatgaacaatttagagaaagaatcagcagtgttcttcaaacacacacacatgttcagcaacgatggatacgaacctcctgagggtagttgacaggcaaactatagatgtacatgaaagtcatcagcaccaaagcttatagacgatagagtgatacctgacatttactttttaacatagaggttggtctcgaagggatctgcaagctgtgatgagaaaagcaagtcagcgcatggtctggtaagcattgatgcagatacaaaaagcttaccctctctagcttctctttgagggtttcctattcgcgcataaggtagacatcaacctagatgagcatacaccccatgtagaagagacaagagagtgaccaaccttagcatacccaactttgtaccccttttctgacaaaccttggatacaggctacagcttgggggactgagcaagagacagataacatcagattaaactcctacgtagacaagaacgaatccgacacttacttccagcaaacatgatgaatccaaaggactttccctcgccaggtttggcgacaaatctcgcacttcgaacagttccaaatggagcaccgagagcacttaactgaacttcgttgcatgtgggaggtaacctagacaggaacacttgattgtgcacacaaagcatgacaggtacatcaggtacagccgaggtaccaatgttttcactgaagcagcacataccagtgggagttggggtgggaggaacaagggtcggagcctgcaaaagctgaccggctgcactcaaagtgataaaagtatgaggggtcagaagcgctgcgagtgttttgatcagatcagaacagaacaggaacaacaggcacaaaccctgagggccaaactcattcatggcaaactgaggagtaatctggccagggtgtccagacagagtctgggtttcgggaatagccgcaacggttgcatcctggtgagtagggtacattgtcagaaatcagttagtttgacggaaagaggtcgggggtgtaatgggcgacagggatcaatgggatggtgcgaaagatcaaagttgtatggataatatgcgagtgatgcgatggagaagatgagttggccggagattgatatcggctgttttgtaacagcaacggtaagtggatggtagggaaggatgtgccgggtggaagattggaagatgagctcgatagacgggacgaaaagaaaagaggaagaaaagaagatgagaagagaaagaaagaagaggaactagtcgaggactatctttataatgaataattgacaggaacaggtcagggtcgagacaggatctgtgaagagactagagaagaagaaaacaacaagccaacaaacggagtggtcattttttagagcctctacgagggacaatacagggatgaggcacaatgaagtttgagctaggcaaccgatcagcagccggtgagccagcattcatgtctctatactcatgatcagtaggggcaaggaaacatgagagatttgatcaggcagcaaagtgtttttgaggcaaagtaagcaaagtcactacgcatatgcccattctttcaagtctgtctattcgtccaagtggaagcaagggtgacgccttttctccgagaaagaactaattatccaaagacctgccagcgatcaccatcaactaatccaatctcccttcctccatgaagctccaccaagcctctgacttccttgtcccttggggattcactgagtatcccacgctgatcctccctgtcacacattatagcccctgttcgagcgtcccaggctcggatacgtctatcctgacccgaagctaagatcgtacgagatgaagcatgatacaggagagggagacccgtcgagtatgtgttttgatgcgatggaagagaaatcaatggtgaagtacagggaaccattgtcgaatgtgctttggtgacgttagaaggcaaggtcggagatggagagaaccggctaggtttaggaagaaatcgaagatcataaatgttcaactgtttcaaacatgtttattg

SEQ ID NO: 1579 - DNA, 2645 bp, Xanthophyllomyces dendrorhous
ggtagagaacggccttgaattgtcagctaggctttggtgagagaagaccggacgtgactgacgtctccattcattccaccgcaacaaacaaggcctccccccatatccaccatccctactacgggagtgcccaatcgaatcacctcgccgccctcacccagattctgtttctgccgttgaccttgcggatgcatgcctcttccaccttgccagctagaccgagtgtcaaacagcttgacggaacctgaacgaaggccagccaaaaaagtcgagggggaaggtgagaggcaagacatacagagcacagatgacttgtcggtagcgttaacctgaagatgcggagaatggattggagacggcgtgctcaaaatctgagaatcgcagccttgaaaaggatgtcatgaatgatcaaatgattaatttggaacaacaacgatcaggtttcttctcgtgtcttgaatgattttgatcataggacgcgcgcgaaagcacagacctaacacaatgcctccactaggaaggaacaagctggaccatacgtctgttgccttttgaggtcggatgataaacattggtgtactctcctgatctagaggagcatgcaagagtcctggagacggtccgaaggaggtagctatgaatctatcttgatgtatattaatggatgtaatctacggaaagtaagacaatgaaaagaccaggcattagtcctcagtcaacaagcctttcttcattaaaattctacgaacaggactgttcatcagatttatccggaacatccatccagacgaagaagacatgttcaaagaatggatcgatcctttggaatcgcccgccaagactacgtcatctttcgcctgttgaggcatggttgtggaacgttcaagaagggcaccaataaagagtcagattcgtacgagaagaacaagttcagagctaacagaatgctacatacagctagacaagtgacgaaggcttcgggggtcgataatggtagatagctggattccttcgagacgaagcctaacagcgctgctctcgataaatccctgctccagcgggcgtcaaaccaggagatgttttctcccctatatgaggacacgtctgataaagagaagagacgagagtcatataagaagaaagacttactctcgagacctgtccaaacttctcagtgctatgtttcctcttttcatctcccacaatgctccaaccgtcccacctcctccaggaagattgaatgctctctcctttccctttctcgactctttctgtaatttctcaaagtgacgcttggttggttggtcacgtctttcagaggaccgagaggaaccagcctgagatgaagaggacgagggtgttgggctgacgtgaccgaaacatcatacaatcaacacaagggccaaagcagtcgatagattggcatggttgaataagctagtatagaaaagcgacacagagccgtgtctatgacaatgactcaaacgaacaaatatttcttctttatgggatcatagacaaatcctgtacaccccgagtggacataagcaagctgaagatcaaacacaatcaaagatgaccagctgactcaccaggaagctcgaacgcgaaagacatgctgatatctgaccagataatgtgaactcgagtcactgattgaatgtccgagcgctagcgcttcctaaaattcaatcggcggtgcgcgattggcaaagtcgcctattatctcaagatgggggtagtaaccggcaggttattctgtcggctaaataactcaagcgacacttaagcgtcttatctctttaaaggtctctttcaatctctttctttcctctagatctactttttctttcgcccacgttcagatcctctcatattcttctgcacaacatcttactcttcaaaatgattaccacctccgttcgaacgactgcctcccgtgtgggcgcatttgcggtagccactcaggcttccgctaggggattcgccactccctccactaccaatcatgaggccttggtcacgatcggtcgagagcacattactcaagcaacgtgagtacatgtgctctagaattgtatcttgacaccatttcttatgaatgtattaaacccagtggtcgaaagtgggacgttgttatggaggagggtcagggcttagaggtcactctaggagtatgttcaatcttatgtttcttcgtgttcgaagatgtgtgattcactgatgttcaaaacctgctcaacgaatctttgaaatgtaggatggccgaaagatgcttgatttgtgagttcaaccatccctatcctccttgcatgcagattcgagttatttagacctacgctattctcttgtccctgttctgtgcagcacgtcgggtatcggagtggtaaatgcccaccgctgatttttggcttacaccgagaccatcgagactgactcggtatctttcatctgttgatattgtagaccaaccttggacactgccacccaaagatcaccgctgccgcccagtctcaggttgcaaagatcgttcacgctcagaatgctatcggattcaaccgaccgtacatccagctcggtaggtctcttcgcgtcgtgtacttgtatatctgctgttcatcatcattaacattcgctattgatac

SEQ ID NO: 1580 - DNA, 7935 bp, Xanthophyllomyces dendrorhous
ctattgatacagtcgaacgattgcttcagcgaatgcccgatccttctctttctaaattcttcttatggaactcgggctctgaagccgtcgaggcagcgatcaaagtaactcgaaagcataccggcaagaacaacatcatagtcctccaaggttcataccacggccggacatacggtgcttctgcgctcaccaagagcaaggtgatatactctgagggagtcggaagtgttatgcctggggtgcacacttgtccgttcccctactggcacagtcttggagttagcccagatactcctgaggacgagctagtcagaatggcagtctaccaattggaattgttgctcaagcagaggtcgagcccaatcgatactggtaagtatatccctctgttagtctcatttagacgttagcttcaagtgactcacgattgatcttgtcgatggaaatcatcttctcagccgccatctttattgagcctgtcttgggagaggggtaagtctcactaccatcacatatatctagaaacgggatctaacttcttttgttgatttggtttaaccaacagcggatacattcagactcccgctgcgttcctacgcaaggtgcgagagatctgtgacaagaacaacattttgatggttgtcgatgaggttcaggtcagtcacatggaacacaggctgatccatttctcttcatatgtcatctgagtcaatatttttctcaatctttttttccgcaacatccaaatcttattgtccatgttctcgaacctcagtccggatttggccgaaccggaaaattcttcaacattgagtattcaggcgtcaggccggatgttcttatcttcgccaagggacttgccaatgggtatgtaccacttggcctgttcgaagtttgagatgtctctttctcagttagtagccatggctaagttgtaatccgtctgtcctatttacctgatggaacagtttccctctctctggaattgctaccaccaaggagatcatgggtagcatgcctcctggttctcttggaggaacttatgctggaaatgccgtgtcatgcgctgctgctgtcgccgttcaggatgtagtaagtttacttttgttcttcctgtacatgctaagcctttatgtatcgttgacctaaaccttgtcttcttccatttctctatcagttcgacgagcaggatatccttggaaacgtcgtcgcacgatccaagcagatgtttgatgctctccacaaggtcgccgctgcgcctgagacgtctcacttaattgctcaagtccgaggttctggtgtaagtaatcgacatatagtacaatcgctccctcttgaatcgattgctcattttatttttggttttgtggcattgggtacagctcatgatcgggctagagttcaatgctcccaacgacccgatttgcgagttgtcgctcaagagcggtaaggcgatcccaaccaacatccataatcgagttcaggagaagtgcttcgagcagggtttgatgctgctcaccacatctatctactctgttcgttcttttcttacatgtttcttgctcgttaagatatgtggatataagactaacattgttgtttcgcgcctcttacctcattaccttaggttatccgatttattcctgcgcttatcgtgactgaggaggagatggacaaagcgatcaagattatcacccaagcgtacgttgaggatttatttcgtcaagtatagcgccccgaatacgtccacaatgtgactaacatctctttcttccattttgggcttatatagtatccaggaggtcgcccttgagggttagaagagttcatgatcaactcctgaattccatataagaaggtcatatatatagcctaaggtttcgccaactcttgtgaactcctcataaataacgttgtacgactcgctggaatgagacgaaccaaatcagtctcaccaacgttcacttcattctcttactcttgtacttaattctcgactgccttatatctgctttcatgtctttctggatcatatataaatttgatgttatatgggtttctcataaatctacaaatgtgcctacatgcatcagaagtatgtcgtatacatttttgattaaacgttggcctaaataagtcatctcattcaatgattactcgcaggagacaacacccgatgaacctctggaccccttttattcagtcagctgtttccgtcttctctccatctcgtcttcttcaggtgctcatccgttaagctatgtctcgtcctacgtctcctgcctcacacacctctgaacacgaacagatcgaggaacgacgacaacagcaacaggaacagtccactccttcctcccctactcgatctcctacatctctcgacgaccaaagctcgaccttacctctagaccctgaagaaaccttaccgtccgacaccgatatcgaaacatcgctgaaagctgatgatcctcaagcaactgagccagagactgtagacctgaccgaaacagctgctcacccagattcagtcaagccgtctccagagacagtggtgaacgatgtacaggtgtcagaagaagaatctgcattgctagacgactcgaaccaagagggaccaggtttgatgcgcacaaagatctcttcttcaaagaagactgagcggccgatgtctgctcatttgcacagctctggttcgtcttatgggtctcaagatcctaacgtagtggtttcagaagaacgatctgacgccgttatagacttgacgtacgaagaaattgaacaacgttcggttgcatcgtcttctaccttgagatcatctctacctgtatcgacagaagacatgcccttatcaaccacaatccctaacgcatcttctttgaatgagcctgatccttcttccaaacctgtttcacctactacttcccacttgtcgacagacaccgcttttgcgcttgcttctaagccgaaaggagatcgaacctcccttctgctctccaatactaccaaacaacactcccgatcaagttcggccgagggtcaagcactccttaaagaggagttcgataagatacgacagtcatataccggtcatggatccccgaaactataccatcatcggggcagcagtcgggtgagcttacatggaaaaagccctcttgtaggcggaggaaatgaggaagatctttgggacagagtaaagacgggagctcatttggatggccaagttgaaagaaccgatctgtattcgagtgaattggcagctaaagatgacggagaggcggaagaaatgttcgatgagccgctagttgaagacgacaatggaggagatgttgactgggcattttggggagaggttatgaatggtgcgtcccctttttacaaagagagaatctcctataggtactaaatagtgtttcgtcttgagcctctcaatctacagattatcaagctgttgctaaggaagatccggcaaggcttagtcaagctatccaggatggaatcccagatgtgattagaggatcaatgtggcagctcagtaagtgatttttttcctcatggagttcatcatcaagactaatctaattgacttcaatttacacgttgaacattcagtgtcgtcatcaaaagattcagaactcgaatctctgtattcaaatttacttcaccaaacgtctacacatgaaaaatcaattcaaaaagatcttgctcgaacctttcctactcatgcattcttccaacgaccgacatccatgttggagcgcacaaattcatctgaggacagaggtaggggtcaggacgagctgtataatgttgtgcgcgcttacagtttgtaagtttttgatctttggccgttctgtgccccgagtatcgaggggcatcacttatgtcttcatctctgaacatcatcatggctagatatgacccagaagtcggatacgttcaaggcagcgctttcatcgtcgccgccttgttgctcaatgtatgtatgccgtgtcgttgatggtcttgcacttggctttgtaacgcctgactgatcagatgtgttacttagatgcccgacgaggaagctttttgcgtgctagtccggttgatgcattctgtgcgtagtcgacacatcggccgttcttccaagcgaacatattattgattcttgtttgatctcttcatctttattcccccccaaaattgacatagtacggccttcggacatctttcttaccagaaatgcctggacttcaactccgactatttcaattcgaccgactaatcgaagagtttatcccgttgctacacatccacttcgtccggaatggcattaaaagttcaatgtacgctgggcagtggttcttgaccttgtttagttatcgattccctctgcctattgtctatagaatcctcgacttgggtatgtccatcatattttgactgaatgagaacgatgcgactgaccattcatcctctgtcggaacacagtgtttgccgagggaatcgaggctgtattcagatttgctatcgcgcttctgctcaagaacgaagaagagcttcttgctcttgggttcgaagagattctgagttatcttcaaagcaagctatttgatacctaccgagtgagttacatcatgatcttgcacttcttgcattagtcaatcttgactgatgtactaattcctgccggcacttcttttctgaatacaaatctcaagattccacccaaggatgatgataaggaacaagaagaagcctggaacgcggatgattttgtaaaagattcatttgcagttcgaatgtgagttgccagaatttgtccttcgcgtctgttcttgaccaaagatgccaatccctcgctgactataaacgtatctttttgttcgattaagaacacctttccaattggatggctatacggccgagtggcaagatcagtgtcgcgctcgggattcacatgcgattgaggtcgacctgcttcgaacagctaacagaaacctttcagcacaagtgtgagaccctactgcattcatagtgttggggttatacacttcctatcgccagcgtgaagagatctttgacaaccttcttatggggcttatctcttcctaaatcacagtaaacaactagaggcaagcttggctcaactcaatactgaacagtgagtcttctgatcctactgtatgtcttctggcttgatggatgctaaacggcttctgtctcatctctttcttacagttgcgagattgtcaagcaggtcgttattcataaggtcgagcgggaagagatggagaatgagttggtcaagtacaagatgctgtgtgttctcttcttttgttttaatacttgctctgatcggtagccatactgactccctagtctggattctgtcggtctgatctagatatgctgagctgtctcatcaatcagccgagtccagacaacgatcctccggatcctctggcacgtccggcttttggggtttagggaagacgatgggtcgcagtgttagtgtaagcaacgtcaagaatacatctggatgagttctaagccttggtgaacactacgccttgaatgtatattttcatttcaatattatcatctttcttctctcatactcaacgaccatattgcattcataccttgcctccactttttccccattaaatctctatcttctcacgctgtctttaagcttcaatcccacttttttcacataccccaacttatacgcgctacccatttgatgatattcctatagagctataggcctctactatagttccacatttttgcatgatatgtcttgacgattttgtcggcggtctgggcaaagtcttgtaggaagcgactagaaggttaatcaccggttcagttggcatggcaacccaagggaaaaagttgatcccctatcgatcaaatgatgatttggacgcattacaaccatcaagcggcttacccttcacacatactcccaacacacatcatgtccgcgctttcccagtaccaagagttgagtaagtgagagtatcccatgtgttctctttttggcttgagagtctcatccttgtggttcgtgacagttccctttcttagggatacaaaccctcaggtccgacagcttgctctttccaatcttctcggtcaaaccgtgaagacatcgccgtacagacaagctttgttcttcccttcttcgaacctcagcaatccaagcaacacatcttcttctgcttcatcagaggttgtggatgcaggaaaggacgcagctcttccgtcgtcaagtaatgaaaagagcccattatggagtttgaagcttctctgcagagatcaaacgatgatcgcccacgatgccttttcggctttagttaacttgagtgattcggctctggtccagaaggaattaggagacgatgccttcttggtcttcttggtgtcttatattgttgtgcgtggattttgtcgctcattcaaggaaactctttgcaacatatcagcttcgctgacaaaccacttttcgcttttctctacaactgcttcgtattacgtgttaatttctttccatttatccgaatatgatactatgcttgcaacgtcaatatgtagaaccctacctcagtcctctcttccctggcatctatgctcctttccaacatcacctcctccctagcaatcaccaagtcactctctacccttctcatccccttcatccctctcttgccaaactcgaccatcaacccgcctcacctccagacgtactatcttccttcgtccagatcggcttcagctctgcctccgcccaacatggcgcttcccaaccaggaagtaacggtcgaatatgtgccttgtttgagtctcttggttgaggctttcatccagggtgcggcagctggagagcctggaaaagagggggaagaagcaaagaagggcacgaggaaaggagattgccatttcctggcaacagttttctcaaacttgtctatggtaatttcaacttccttccagtcaagatgaacgaagtgaacaagtcatgtcaactgatctggtcaacgatctatctgttagcttcctccaatccgacaagctcttctgtcccctgccgtcgaatacccgaagcatccggagtcaaccttacctgctactccagaagcgcttcgatcggagtctctgcttagcaagctattgatcttcactgagcataaggatacgattcgacgaggaggtgtgctcagtacgctcaagcacattgccatgagtgcgcagactcatcccctcctactaactttggaaggtacgtcttggaaaaatcccccatcttttttcagaaagcatgtatgcgtggcatcagacgtttgcttggattgagggtacgagagctattcactcatgtctatacgtacattcgtcttcactgcttccaacgatatccgcatcacagactccttgattgcggtgcctcacctttcggacaacccccttgcccgttcgggcgacacaacatcgattgagattcgaggagtggatgtcctacccaagattctcggtcctctgatgggtggggaagagatcgacttggacgatatggaaaaattgccatcagctttacagttccagccagaagacaagcagagggagcaagacggagtcttgaggctgacgtgtgtagagattttgttgcttctttgcacttgtaagtttggattagcacttgttcagatgttctttttcttcacacgaagagagaaaaacgaacttatgtttttgtcgtctttctggatgacgaacagcgcttcgaggacgaaatcagcttcgagaccgaggcgcgtatgtcgtcatcaagttcgctcataaggccgagaccgacgaaaaggttcgtttcctcacctgctcatcctctttagactcgctctcacactctgtccttttttttcgactcctttcaaagattgccga

SEQ ID NO: 1581 - DNA, 39648 bp, Xanthophyllomyces dendrorhous
cgtaaatctgcttcagcgagaagaaggtcccgacactcgaatcgaggagatcactccggacgaggaaactgttgacagtgaggatgaaggaattgtcgaggtttgaaagaaagaacgaacaggagaacttcgtattcgtatttagatgatcatatgtgcttatccttcccgagcgctcttggttgagcacctctaagtgtggacctcgcatgacgacatgaacatctacatgtgccaataaataatgtagagaatttgcctataaagagttatttgtcgaaacatcgaatgtgtaacttagccaaactgaatgcacgatgggccagatgagaaatatgggaggagaggagatacggattctatgctatggaagtggaagaaaaagaaaatgtctgagagaaacgtcaaacgatcaaccgaggtaccaccagatcagagcgaagcagatcagtgtgcctgttgcgcccagaaaaaatatgatagtatcttgtttactgtagatgattcacgcaagtcatttgggcaagcgataggtttaacaagccaatcagttcgtcggcaggatgtctctctggatcaaatgactagtaaggacggaaagagatctaccttcttctttccacccagccgacgacttgtctacctcctttaatcccgtttgcagcatcgagtaacctttttctggttcctttcagccatccccgttgttcaaccaaacttcccaagacttccctaccttgactgatcaatagatccaattgggtctccgcattatttacgaaaccttcttctcgaagcgcgtaagcagcagacgcatttgacgtgccggagtataacgaggcgccattagaagagttcatttgatgaggtcgagggttgtttggcctgtaagagaacggcgattctcttgtaggagatgacggaggatcgtatgctgatgaggatgaggacgagggttgtggctgagattgatttgacctataccggggagtgggtgtctgggcactctgctctaggagatttgaacgcgcagatgaggcagacttttcataagagagataataaacatgagtgagcgacgttgaagcgagcctagtgagcaaagagaggtttactcacctgagcggccttttctagctttaacgcagcgaatcgatctctgagagctttgaaatcgttcttgaacttttctacacgtctgttctatccagagattcaacagagagatcacaagaagtatccaaagagaaaaaatgaaagaacatcagttccgtccaggtgtgacgattgaagaatcagtcagctccggaaaatccgaacatatcaagaaaatgatcttacgtcagggctttatcctttttagacgcgatgatctcctttttggccatggattcataatcatcgatcgttctagagagagccgctatcgaggctgtgatctgtcctgtagattcatacattcacaaagagaacgagaagagcgagaaggcaagtagaggaggcgaccaatacacatgtgaccaacaaataggttgagagatcagatctgtaagatagccgagtagacaggctagtagaccacctcgtatacatgcataccatttagggaggcagaggaatctagctcggactggagtttgtccagatcgttgttgagatttgcgaattgtttgagaccatgggtatagagtgagttcatcgtggtccaagggttgatcaactatcgacggtacaagtcaagaccatggatagaagaggtgtagcaatgagatcacgtgattgcctatgagccctgagcatgccatcaggctgacaccaaaaaattctgaaagccgttcaaattagcacaagaggatacattgagcctttggtgaatacctttctgatcagtactatatcaagccatgtcttaccagctaccaccaaacgctgctcccttggaggataacgacgactattcctcctcctctggatcggataccaccgagtgtgacaacttctcaaactgggcagaagatccggaggacgcttcggcgctcgccgtgcccttgttcggtcagcccggagagcaagttcagaacgttcaacaggccatggagatcgatcggtccaagggatttgatcttgagcgagaggtcgagagacttggttcgttgacccgtttagttatctggatagtacagcgcatcgttgtggagttttccagccgaggttgactaactcttctattaaattaggcttggattttcatcaacgtgttcgactgatcaaccatatcagaaagactgtatgttcttttcagtcagtgtcccgtgacagatagcatacgtagttaatccaactgctctattgtccgtatcatcacagaccccttccgtcgagactgttgccaaacttaccggaaccgagaagctcttccaagatgactcgcttttgatcccagtgttggagaatgacgcttacctccgtaagttctgtcgttcagcaacttctcttgtctctcagtatcgctgaccctattattatcaacctcaaatctgaaatgccttgcctgttctcagaggtcggtgactcatgggattcggactcagatgaagaccttgatgctccttctcagccccaatcttcctctgtaccaaactctcaaactccgaaagaatctgacgcagagcttcagaaggcgcgccgcaagattcgaagcctcgaggataagatcaaagctcttcaggcggaggcacaatacgaacttggatcgttaaagaacatcttgaaggaccgaatgaacgccagcaacggtgtcgaatccagagaagttgaggtcaaggacggtgctgaaggtgaagggaagaaggtgaatgaggaaggcaaaggaaaaggaaaggaaagagacgatgatagccactactttgatagctacgcttacaacggtacatcagcttttttctcgggcagtcatcctcaaacacagctcagcaaagtgttgactgatataccttctttctccacgtgtcctgtacagatatgtgtgtcatttgtctttcataaccaaatcagctcagaccgtcttggatggaatctctaagtttatattgacacagaaacgctttctttctttgtgttcatcgcttgcagccacgagatcatgcttaaaggtacattcacgtcggttttctgatctcagcgttgatagtgttgacatatacttgtccatccgttacagacacaacccgaacaaaatcctacgctattttcattctttctaaccctcatcttttcaaggacgccgtggtccttgtgagtttccatcttttcagtcgtgtaactatagattccttcaaagctcttatgttccaattgtttcatctgcttgtataggatgtcggatgtggaactggtatcctatccttgttcgccgctaaggctggcgcaaagcatgtttatgccgtagatgctagtgatgttgccaagtacgtatttctccttgtattctatatatgtgtgtgtttgaccatttacgcccgttttctgatcaaatttaggaaagcgatagaaaacatcaagaacaacggttatgctgacaagatcactgtcgttcgtggaaaggtcgaggatattcagctgcctgtcgaccacgtggatatcatcatttccgagtggatgggctacttcttgtccgtctctttatcccttctttaatttctatcatgaagttgatctttgaaacgctctttctgatcattcgacgtggtatttcttcaacaggctctatgagtccatgctcgattctgttttggttgctcgagatcgattccttcgaaagggtggtgtcctcgcgcccagtcagacgaagatcatgttggccggtgtggactgtgcagacttcatgaagcagcgagttgggttctgggaagatgtctatggtctgtagccaatttcctggaccgactgtgtagagagaggaaaaagactaatcttgttgctctgaggtctttcgtaaaataggatttgacatgaggacgatggcacaagagatgaatgaggactcattggtcgaaatcatggaggagtccgagttggtgacttcctgctcttgcatcaaggtttgtttctctcctcttgtctgatgcttctttttagcgtaccatcatcataccaagctcacattagatacccggaatgaaaaaaggacatcgtgatttcatcggcaacgatcaaatcgctcgactttacgtcacctttctctatcaccgcctcaagagacagcaccatgcacgccttcctcggttactttgatactttcttcactcctgatgggtcagcggtggatgaaagcgtagaggtggatcttttcagacacgatgaggaacttaaggttgaggcgaaagacggagagaagaacatagtctcattcaccacaggggtaagaaactgactccatgctgttatgttgaagtagacgttcatcattgacttgatgttttgccgatcatctagcctcaaggagtcccgacccactggaagcagactctctttatcctcaaagagccgatacgacttcagaaaggttagctttaacctcctttccttttcccatttgtccagaattgaatttcttttcctgaacaccacatactttccctctcctctgccttgctcatgacaggagcgaccattaccggaacattcctctgtcaaaaatcctatgatatcaacaaccgagagctcgatgtcgagatccattatcaaattacggagcctgatggttcagctcgggatgcttctggacgaacgaacgtccagcttttcaaggtcaggtagagcctcggctgattttgagaaaggagtaacagagagggagaatatgacattttttgaacaccgtgtgtctgtaggttctaaacatgcatggtacattcacgttgagtcgaactagatttttagaattagtgtgaaaggtctcttctaagaaaggatgcactcaaacttttggtcatgagagcaagtaaaagaagcaagtgagcacgacatccatacgacaatcagaattgtcccacctttcgcgcaagccggaggagagaaacctctgatttctctatcaactcctgttccgattcctctccacaccatcttgttcgagacaaacataaggacacgacttctggcgctttctggatgtaggcgaacggcgttgcacatctgctgaacccggatgaccttctcgagaatgtggcgccggatgaacgaagcaccgctcttcggccgatcacacgttcttgtaggtcaacatttcatccattttctttgccatgattctctgtggtgacccttttctccacttgaacctaaggagcaccttgttaaacccattaatgtgaccctatactgatttgtaacagacgcatttagagaatttctgaagcgaatacacgcaaagtgttatttgtgatctgggcagtcggctgccgatcttttcatcagccgtttccggcccaacctaaattgaactgactgaacggataacaaataacggacctccgtgtccttttgatcgtctctgatgcattccattatcatcctatcccgttggggagtcttcttggttttttcttcctgattctgaaatttttcggttcttcattctataaaagcgctctgtctccggtgcaatccaattcttactcgttcttcagcccatcgcatctctcacaaacttcacttcaaccttcctgttctcacttttcaacccaacatctaatctctcatcatgtccactgataaagtcactttcctcctcaactggaaggccaccgcctatcatcttcccatcttcatggctcaggccaatgggtacttcaaagatgagggcgtcaaggtcgccatcttggagcccaagtgagtagtcgtttgtgcttgtgatacactgtcataggctgatcaaacattaaaatcttctacgtcgtctttagcgacccttccgatgttactgagttgattggagcgggtaacgccaaccttggcgttaagggtcagtctatcaatgtacttcttttctcatccaagaccaaactgatcccagacatgttattccacagctctcatccatactattgctggaaagtctcgaggcttccccatcaagtcattgggaacgctgatggatgaacccttcactggtgttctctacctcaaggtgtgttctttaagtttcttctccctctttgtttgtgactcataagccttttcctttccttcaagcaaaacggcttgactgaggatttccaaactctcaagggcaagaggattggttatgtcggagaattcggaaaaatccaaatcgatgagatcaccgctgcctacggatggggccctgaagactacacccccgtccgatgtggtatggccatcgctgagaaccttatttcgggcaacatcgatgccggagtcggtcttgaaaacagtacctttgtctcctcaatcaactcatcaaggtctattctcacagccgtcaactaactggacattttgctttgcttgcaatgaatctttatctggggacctctcagtccagcaggtcgaggtacgatagatatctctccttgactggtcacctcttcctcgaagcacaaaaagtttttttttgcacgcgcgcgcatgtgaaaagtcagcgggcccatctttgtagcaccacgctatcttactagtaggctcctcttcccagggcattcccctgaagcagcgagtgccttcgaagccgccggttcttctttcatctcacattcttcgctttactgagaatgatgtgaggtgttttgagaatctggcttgatgctcggagtgctgagattacatcgcctgaacttgaccacgtgaccgcgtggctaagaatgctttagaggaagccagtcttctacccctcccccttccgtccgtactcactattgtccttttcatcaaaattctcctacttcgtccatcttctttacagttagagcaatggttgatctcccagggacgacctatcaccgatgtcggtatgcagtaagtttccatctcaagattcactttgtagaggttgccgaaatctgagacttaactttgactcgctctatcttcattattcaagccgaattgacaagcttgccaaccccgctcttggatgctgctgcttctgctcggtatgttcagcctatgacagggttttttcaagttttactttgacactgactgcttcgctttttgatttctgcagatcttgctcattggtaatgagaactggatcgacgctcatcctaaagaaaccgctgcagtcatgaaggccatcaagcgtggaacagacttcatgttggccaatccggttgccgcctggaagcgatatgtcgaattcaaggtgattccgaatacgctcttttcaaacactccgagatgtgagctgacacatttgtgactcttatttcatatccagcctgttatgaacacccgaatcaacgcgcttcaatatgataggtctttcaactatatgagcagggaccttgcaaacgtttctcgagactggaacaaggtacgtttaatcaaattcgcccttgagtacgatgtttattgattctcttctgttcgacggctttactcccaggtcactggatacgccaagcgactcgggatcgtccctaatgatttcaagcagaactacaccaatgagttccttgtttggcccctcgagaaagaggccgaagacggagaaatcaaacagtcggttttcttccctctactccaatctgtggatggcaaaatatagactcatatatgtaaattgatggttttctacggtacccaggcaagaaatcacggccatccaaaaagagatttctcagaccggtggtcttcttttcaaagccaacgaaatcgctgctactgcctaagcatctttaaatagtttgcttcttctatagaaagatacatacttcctttcaaatatcttctcctctttcgatcgttagcatggtgatgtgaatgattcaaacggtgttatgtgtctcagagagaaaggagctgaatgtacaaaagatacaacaagattgttttcggagattatgatctttgggcggaggagccttaacgtctgaacttctctccgttattgtttgcgcacagagacttcaccaaccctggcgctccgtcgctcactcgctaaattcttcgatttgtaggtccgcctcaccctctctactagccatcttccaacccttctactctacactcgctaacctggattggaagaataaatttgtgtcaagaaaaagaaagcaaaatgagaaacacgtctccttctgaccggaataatatcttctttacatcgatcgttcagcaaaatctctcactctagacaacacatctgccaccgatgactcaacaatatcgttcgcttgatctgcatatgctccggtcaagtttagtgtaggtttcgtttctatttttcctcggctttgttcaaatgtgtccgggattgatgctcattttcaaccgtgaataacactacagatgcgaactatgactagaatatacttatgtcgtcagcgagaaccatcactgtcttgtatcgactccacagcagtaagtcaaattgggctttgtatcaatattatgagcgcatattgactctatcgtgcacgcgcgcttaacatctcactcagctcttcatctgtgtcaagcaatcagatctcggtgtagatccttgatgcataaaatcccgtctgaagggttcatcaaattatgtgattgagttggtaggctcttcttgaccttgacgaccgaatgggactctgcttgtggtggatagcgcaacaagatattgacgtttttatctctctcatcatctacttatcaggttttgacttttgccccagtattcatcgtcatcagatgctatgtaatccctggaatccacataacaagatgctactgccgacactgctggctgcacctcaagacgtacactttcctgtttcatacattccgaggacccggtcttattatcattaaaaagattgtttcaaatctgaccgacctattgtaatacatgagtctctcatttgatgactattgacatcgtcttttcatatccgttctgtttataatctatgtctcatcgaattcacctatatttgagactgacttttggaatgaataccgcgctctctattatctatcgatcgacagcttgcattacacgaattagagggaggggggggggaatgttgtttctgtcaatatctaccaggacgcagacaatgagatttgttcggtctccacattcatgtatcgcccggtttggagttaatcctttcttcacagtgcttagctctatatacttccaatcgtaaggcccgggttatagttggtggagtcatcctcaatcggataaatcattcttttccatgcgtcatctttgagatatctagcttcatcttgaaatacctgctcactgctgtatgcttattccaagatcgatcttctatctgtttgttcctcttctgagaacattttgtttgatctatgatacataaccttgataaaatgtgagaatccttgttattctcattaccaatcagcatctgcttatgatcatcccagattttacatctatatgcatataaatggtgaatcgggaaaaaaatagaaagaaaaaagaattgaaacctggagttaaagatcgccgcgttctagaaaagatgaacagaaagaggatgtagggcgtcgcgagtttacattgatattgacatgatgatgtgttaatcaaaagagtatgaagatgatgatgtgatatgtctcgaccaattaagtattaaaagaacgccaacgaattaagatgtcacgcagtataagtacacgtgtattcatgaggagaatagagaaatacagactggtggagtaatgaaagagtatgtgatagcactggctgtagatgcggaacgtgatgaagatacaaacatatgcttgtccaaaacgataagatgacagagagattttacataaacatgttttctgtgaaaagcgtcagaatgaacaaatcagtttgtcatcttgaatacaagaaagcacatatggtagacgaaatagactaagacgtacctgcgagcttgcgttcttcctatataatattccagcgcgtacattcctcatacacaaatcaactactgactctgtattgaagaagaagaagaggaggaatctcttacctcgttctcgattgcattcgctctagcagcgatctgtccacctgtgtggactattggactaactgcttccctgagtggctcttggtggattcgacgctgatgatccagatgaactggaagaggagatgagccagatggatcgttcgtattagccacaccagcactagaaagttcatgaccccctctatgggttgatgaaaagtgggtgtgaccaggtgaaggcttcggatagacaggagtggtaggcgtgaagttacgcagggcgccggtaggaggcggtcggtcttgctttgtctaaccaaataaaatcatgacgatagttagcaagttcagagagacagacttgtgagcaaagaaaaagataagagaacatcaagcaaagaacgaatcaacgaacccctttccgtgtagccgcctttcctaaagccccgatgacgcctagcttcttcacgccttttttccagatatcctgagtgttgtattctttcggcatcggtcgagacaggacctcataaggatcggccggggcgggttcgtttcgaacatgagtggatgcgtatttcggttcttcatttgactgatggccagagaagataagtgaagaagtcgggggtggctgaggcaaatcctttgatttctcgcgctgaggttgtcgccgatgctgatgctgatgttgatgttgcggtgactgctgttgttgagttagttgatgttggtattgctgttgctgtcgggattgagcttgaggtgctagcgattcatcgtcctcatcactgtcatatagctcttcgaccacaactcccctttctctccccttctcgctgtgtatcgttggatcgaagttagcccgaactctttcgtcactcatcctctttttcaaatcatcggctggttgcgaactcgatatatcttttgtgggaatcatcaacttgggtggtggctgtttagacaaccagctgtttgatgagtgagtcgaggacatatgctgatgttgaggtcgcacaatcgaccgtgaaggtgaaggggagagttgatcaggactcatcaaaaggttataacccttcgtctcaggtaaggtggaatcttccagcatcggcggcgtaggaaggctagaggaaacagtcgagtgcggagagcctgacgggttggtctcagacggattttcaggattttcagagaggaccgtgtgatttttttcggcttgcgctttctgcggcgtaaaggagttgaagtcttcaaacgatccctcaggatggatagtgacctgggactgatttggacccctcggtgacggttggttagcaggtccactgggtgaagaaagcgatccagaagagtcttcgacaaacaaccctgtggcctccttttcaaacggccttcttgtttcttctatgatgttgcttttgttagcaacatcctgttctgttgatcgttgggtgcacaaggacttctgtccaggatctataactggggataccgcatccggcacatcacccaaaatgctgctcgcgatagaccctcggatactataaacatctccgtagtaggacgatgctgatacaggcaagagaggtgacagtgcctgatcagctggaggatagatatgcgtgttcaaggtgaggggtgaagatgatgaagatccatgagattcgggcgagccgtaaatgatgcctcctgagaagatgatgttccgttgtgtaggcagaagtgttaattgaagacatctaagcctaagtggacttcatcgacacagggatataagcagacaaatgaaacttacgttcttgcatttcgttctccactatcttcagtgatcttccgtttttttcgaactcgaacagtctaccatctatgatgacccttctcctcatctcaccctctttaaaccctttttccaagaaggataaataatgaccatcaatatctcttccgctgtatgatgggcctcgttcgctcgagcccgccggcgcagattcgctgaacgatctggagattggccttctttctgacgaagaaacagtctgttgctgcactctagaggctccgtgtgatccttctgacggaacggaaggtgccttcaaagatggactgacagccacctcttgagcggatctagtccctaaccagctgtaccgttctgagttgggtgactctctcgacgggttgttttgataggatgaggccgaggccgaggaacataccgaacgtctaccggacacatcctgagatcctatgtagtcgccagaccgaacttgtgtagaactgctagggccgagaagttgtctagctaatgttcgccttcgttgaagtgtatctgggttgattttagcatttgtcgtgcccatccggtgagaagatgatctgtcatgagcggcttcaggacgttgatgctgaattggcggctgaagatcttgagaagtggatgattttattcgggtgttggaaaaatctggtgtcccagaaacagatggttttttccacgcggagaagaacgaggagtttgcattcgaatgaccatgtctagggcttagttcatcggaggaagagtgtcctccaataggggtgagcgacatcgcagtatctagggaagccgatcgagagatatgcatggacgtctcaatggacgacagcccgaaacgcgcagtgttagtggtcgatggtgaagaggcgacaatgtgagagtgaggccgaggcctgatagaagtattcattgaagaggaaggcgaggagacttgaggagatgaggatacttgacccgatgcctgattcagaaccgaagcttcagatatgttgcttgactgagagggcttgagaggggctgatattatgttagggcccaatgatctggatcaacggagcacaaatagaaggaaggagcagtcagtgaacgagacaagaggaagactgagaacgatacgatggatattgaatgacaagaaggtataaagatgaggataaagtttgagagggatggaagagtgaggagagggaaggtaaggtaacgtgtatgcatccctgtaccagcatacatcgtccgttaattcctttccacctgaccaaccgaccgagctagttggctgtgtgccaacaaacaccgtccactacgttcaattgttttccaattgttttctctatgtgatatgcgacttcgatggacttacatatcgacgtcagaagatatcggaaattgtccagaaacgaccggacgggtctggttttgtccaccaacctgattattgtctggcagcctgccgacatcgacacgtccgttcacactttcagccgctaaccaagaacccagccaggccagatcttccgtcatgatcgataaggtagtaatctaaagagtaagtgagatagaacgccgagtataacaaactatgttcaacgcgacatcaggtacagatggagtcaacgagaaatcctatcagacggaagggtcggggatacacacccacgaatgacggcctttcagtgagaggcttcttatggtacttgactgtcaagcctggcgccttgttcgggaaaacctctttgaagctgttcaaaacggagtggtgcaagaagaccttttggctctagccgtccttgtcaagcagctgcttgcttttgtctgcccaatcttatatgatgtgctattcgaacttgtttgtcactcgcctcgaaggtggtcaatgattcaacatctatgtcacgtgatatattcgggccagtccgcttttgttcttgttttctttattcgctttgtctgttctttgtgtcgatagcatcaagtgtgacaaagggcaacatgttatggggggatgatcccaatctctttcagttctccccagagtgcgctcttcaccggctcgatagccgcctgcctctccgagccttctccccaacatacgcccagcacaacgtttgcccagctcaaaaacatgtaagctcgagcaagatgcctcagtccagtcggatctctcacaggaagaaggatagatagattgagagagatcgaggcctgagacagcaagtgagtgccttacgaagaagaaagatataaaaacagttcaggatacgtccagcgacacagagtagaacatcacgactgcaagacccaccaatcaatggccaaaagggtccatagccaagccaataaacctttagaactgcttcgcccaatttctcagcctcactccatctgccttcatgatgtgcgtcttcgaacctttttgtcaaatttgcaatctccttctctggtattcttcctataaattggccttcaggtcgagggatgtccggatatgctgtaggtttagcggacgcacgaggaagggccgggttcgagggaatcactactggcggaggtaaaggacttgaggcaggaggatcagcagatgagcagcatagcgagcatacgcagtcaaagtagtagattgttttgagagtttctcgtcgggttttgagagacgtcaatgggtctagatagctaatagtgacctttccaatgatgacacaaagtatacccataatgaaggtaagctagatgatttgtagatccggaaagaagctcgattcgaaacaggaagccatcagcgaagtaagcaacgaacctcttctccttctttcaacgctctcaacgttctcaatccgactatcagaccatcagctccccatgagcagctgacagcagcactgggcgcgcatgaatgattcaccgctctgctgatcggagctagtacggcatgagcaaagggttccaacttcatgtccggggtcgacaacacatgattgtttcgttgaaagcgggaaagtagactcgataaaatatcaggagtaaggtgggaaggtagaaaaggagggagaagctctggtagaagggatgaagaaggtgtaggtgttgatagtagagagaggaacgtttctgacggcgaagacgatagagaactagcatgtgccttcgtcagattcggcaaggaagcttcgttgatgttgctgaagtactgaactgctagcttgcacaacaagagaccatccgttcgctctgactcgttcatttggaccgatagaagtgcatgtcgaattcgtggaaggaccttgcaaagtatcttatgatgattcaaccaagctttctgttggcctggttgagagggccatcacatcaatctcgactcagcattccagatgattcaaaggtagaaagtgagcagagaaaggggctgaaacttacatgaagagtcacagtacacatcctctctacacattctacattctatcggacgagtaccaagcacctgaagacattcgtcacaacgaactcttttaaacgagtcgagtagcacagtcacagtcggtggaccggctatgagaagacttgctccaggattaggcaaagaccgggatgtgatacattttgatcgagcatgggaagagtcgaccagcttgatagcatccatcctagtaagactgatgatcttatatcagagttgatcattaatgtgtcatcaattaaataggagtccagggtcttgattatgtaattaccgcgtcgcgacgcgttcatcgcttgcttaatgacacgcgtcaaacatcttggaaccatcatacagtacccacacatatatactaagtatgcagagcacaatcttcaaagtaagaatcttcatttgcgcacatgcttagtgatcaagcgtctaggatataatgctgacaattggattgccatggcctcatctagatctttacaacaaagcactctctgacgctaccatcccaggtactcggctttgttgaaaagattctaatcgagcatgaggtcgaacgagatatgtgggcagattcatgtgatcatctggcaagagagtatatgaggggagagggtaagtgtgaagtttatgttcgaagagaattttgatgttgtagaaaagatatagaatcttatgccatcggttccatttagacccgtcgcctctggtcactttgaaggggatcgagcaggcctaccaggcacttcagctcaaggtttgttctctttcacctgctctgatcgggctcgatggttcaagtagttaatgactcccttggtggattgaacctgtcatagacggacatcaatgaagagaatgatccgtacgttcagatataccctcaactttatcatctgggtactagacggggactatatggatctcagatttcaaattgctcctctcgttcctcttcctcagcctagcagaatcgacggacgaagtaaatgtggagaatcacttcaaagttatcgattcatacaagatgccaggtctacgttttgatagcaaccgaggtgtttggtcggtgtgagtacatacgctttcttttgcttgtttatcgagtacttcctctcgtttccagctagttcaactagttttctgaatttggtcttctcagagctccccataaacccagtatagcggctccgccactttcaaaggcatcgttcttgagggaaagatgcgctttaatccgacaggttcgctatttttcgtcatttgttgtgagttccttgtgagtatcaaaaagagtagagttgacacaactcggtgaggacatcagattgttcttcgttccgaacacttcaccccaccagtactaggaggaagagacaaggatgaatacatgaaagttagtgattcaaactacttcggaagtttagaggaggcgctaactatagacatgcatcaacgctgggcaacaaatagttgaactcaataaaaaacctactaggtcggccgaatcagaggttcctccttctgggcatccttggtcgtacaattgagggagagctctgcttagaagatggagacggaaaagtgaccttagatatggatgaagctgtaaggatacgcatgcttgacatcagattattcttgtgcgcatatatctgatcagaattgcggaggctgtcgtcattcatactgttttgttcgaaaacatgtatagacaccaggagaaggactgttcaccgagggctgtgttgttctggtcgaaggcgaatacacggacgaagagaggatgagggtaattgaaatggggcatcctccaagtgaaaaacgggcggtcgctaggtgcgtaatccctcatttgccactccctttcgttgattcatctctgattcagatataaattctgtgtctctcgctcaaatctgcattttactgccatcagatctttgtacggtcatgtagatttcttaggggtaggagctacctctcagaaagacgaggtacgtaccacttgtctctatcgcgttatgattttttcccttttcacagcctgactgttcgaattacatcttatatgctcactggtccatctatacatacacacacaggatcgatttgctccactcatcgctgccaactcacatatctcattcgtgatcgtgtcagacctgtggctcgaccatcccaagacgttttctaacctgcgccggatgtttgaagtttacgcagggtcgacattccgaccgttggcatttatattttgtggaaatttctcgagttcgagttgtatcgtcggtggggcgagtggactagcaaaatacactggttggttttgatctcgatcctcttgatcataagctttcagaacattgttctaaatcatcttgatctgtacttcttcagaaaacttcaatcagctagccaacttattgtcttcgttcccggatctcgctcaaacttctcactttattttcgtacccggcccactcgatccctgggggtctactacattacctcgtccgcctattcctgatacgttcgtcgctcgtgtcaaggcccggctgccaaaggcgcaatttatgagcaacccgtgcaggatcaaatactttgaccaggagatcgttatctgtagagaggatctaatgggccggatgttgagaaatctagagggtgtcaaggaaggtgtcaaggaaggggcggatatgaagaaatatgtgcgctctttcttttctggtcgtactttttacatatcatctctcgctcatcttcttttcattgaatcagcttgtacaaacgattctagaccagtgtcatctctcacctctgcctctctcggtccgaccaacattatgggactttgaccacgccttacgtttatacccaatgcctactagtgtccgtcttttcatctgtattgatacccaaagggataatcgtttgtgctgatataccttacccggtcaaattggacgtgtaccttcatcatatctgtttggttgcgcagcttatattggcagacaaatacgaacgatatgagttgacatatgagggatgccatgtattcaacccaggcagcttcattggaaactcatttgaatggtcaacttactatccgtctacgcagcgctcggagagaaggtacgtgttgttccttggtcttcttgtgctttgtggcctagtgaagacgatgggatccttacctgcaatgttctcctcttatctcttcattgctgtagtgtgttatctgaagattcatgagcctttgtactttaacttttgtcgattcatttttctaatgtgatctacattttgaagtctgctgttatcgatctgatcaaaataaagcgatcggcaatactgttgtaaccctaaagatctagaatttatagatgacgtaagctgtggttgtatacgtcattgcccctctggggctcctactcatatcctattcgaatctactcaacctcttccttctctggaggtttccatctcttttttttcgtggtcttcgatgttcttataaagattgatgcttcctaacatcgtacgaaaactctctttcttccctcgaaccctttgcctatctcaggtcacaaaaaaaattattcagcctttccctagacccatcatcactaaacttttcaattcctctcctccactcaaaagtatgagctcgcttatgtccacctcgtttccatctcacaattttctggcagaaatattttcactaatctcacctttctctgtgtgcatgattgaaaaatctacccaaaccagtgccctcttacgacgacgttgaagttatcaccgcctatgaggccaatttgcctaccaaagcattcgagcaggatggagctggtctcgactcggagatgccagttttggcagagcacacgaagctcgaggcttgggatgagaacggaaaaccctacttgaaggagtatgagggtgctggtaaactgaaaggaaagattgccttattgactggagcggattctgtaagtagtcacacatcatttgaagtgatacgacgattgactactgacgcaaatgatacatctttggggacaccatattagggtatcggccgatctgctgctatcatgcttgctcgagagggggcctcaatttctatcgttgccctttctgaagagaaaaaagagtgcgttccctaagagagaggttttttctaaatttgtgcgccaagcgcttactcatctactcctccaactttctcttacttgattaatttagtgctgaggaggtcaaagctatgatcgaaggcagcaagtattctcctcaatccaaggtgaacatcatctacgccgatttgtccaagaaaggggacggagaagccaaacgaatccttgaagagcacactgctgtgtatggtcaacggttggacgtacttgtgaacaacgctgctcaacaagtcacacagaaggatttgacaaaaatcgacatggacgtcgtcgagagaacattccagtgcgtgtcttccgttcttattctcaatgatttggtcgtcagtttaattctctaatccatcatctcacccgtttcctgatattcggaattcaggatcaacatcatcgccatgttcgccatcactaaagccgctcttcctcttatgaagcgaggatcggccatcatcaacaccacctccgtcaccgcctacaaaggatctggaggtttcatggattgtatgtctttttgtatcacccttatacaccaaccatctactgatatgtgacattacttctgtcgtcttatttccagacgccgctacaaagggtgccatcgttgccttcactcgatctctatccgttcagctttcccctaagggtatccgagccaacgccgttgtatgccttttcttcttcgttcatcgtcattgtctatcatatccgtttcccagttcctaacgcttgcttgcatactttgacttctgattgacaggcccctggcccgatatacactcctctccaaccagcagcccgaccgggcgatgagatcgacggatttggtgcaggcgctgtcccactacacagccgagccggtcaaccggcagagtgcggaccgacttatgtctacttggcttccgctgatgctaactgtacgtggcccccttcttgacactccacttaatgacaggatgtacactaggatgaatagctgatctttctctgcctctttccttcttgcctcttctcctgctatatgtgctatctcgaatatttagacgtgaccggtcaaggttagtcaaactttcttctctccttcagactattaaattgaatacgcaattgaacatttacctcttcgtcttatacattcttagttcttcacgtgaatggtggaatgctctgcccgtcgtagacgactgttttttatttggttgaatttctattcccttgtcggttgaaactactgtagctctgttccatgtcttcatctttgccctagtcctccgattgataactcccttttgttcgacgtgtattgcttggtctttgaaatttaaggatgaagagagagaataggaagagaacaaagtctgaaacagtgaaattgtcctggcagaaatgatattggtaacgctaacgattatgtataaagaaaaaacagagggaaagcgagagacaggaaatctggcccaaaaagagaaagaatgaaaacagacagattctactacagaaacagaagcaagcgagagctgcgagagaagaaagaagaggaatagaaaaggccacgtgtaaagaaaacaaagaaagaatcaagatgtatgcaaattgtgatgagtttactcgacggtcaccgacttggccaagtttctcgggaagctagtgattgacatggatagcagaagtgagtttagtctgacatcagacaaccacatgaagaaaggaattgaaagacgtactcgacatcgactccgcccataacggccaagtggtatgagagaagctggagaggaataacgttgatgagaccctgaagacagtccacagtgttgggcactcgaatcaatctgtcttcagaggagaaactgctgtcgttatcgttgcaaatcacgactaaaaggagatcacgacgaagggatatcagaaagaggaattaggaagagaagaagctattgaaaaattgactgaagaaactcactaggctgtccctttcgagccttgacctgctgaagagcgctctgcaccttagggtacaaactatcctgagtcatgataagaatgacactgtgatgatattgacaaagcaactaggtaatcagttggtgctcgaaatagccgtttgacatgtacaagttcacaacaaaaatactaacggaaggtgctcatcaatgagcgcgagaggtccgtgcttgagctctccggccaaaatctgaacaaccgcaaaagataagttcgttgggtcagcactactacacctgtagatcatagatgttagacaaagacaagggaacatacaccctcgcaatggcagtaagcaacctctttaatcttcaacgctccctccaaacaggtcgcgaacctagtgttaattcgagatcaagattagtaaggtcagcgaagttggaatctttcttggctagcgcgggacaaggaagcaagccggaacgcgatacgtactgatatcctcggcccatgatcaacaagctcttctccttggccaaggtatccctggcgagctgctggagctccttgtcctgcttaaggacccttgagatctgagcaggaaggtcgtgaagaccatcgatgatggactgtcgtcgttcgagcttggacaatcggtcatctgagaactggacagccatcatgaccaaagcaatgtactgagaggtatacgccttggtagaggcaacaccaatttcgggaccagcgttgatgtgaacaccacagtgagattctctggagatggtagatccgacagtgtttacgacaccaaggcagagagcacctcgctcgaggcaatatcgcatggccagaatagtatcagccgtctcgccggactgagagacaaagacacaaacatcgtccctgaagatggggcactttcggtccaaaaagtcggaagcaagctcgatgctgacaggaacctcagtcaactcctcaaagatcgttcgagtagcgacacatgagtggtaactagttccacaagcgatgaaacacattcgtctgcaccttcggatgacgttaaggtagctcttcagtcctcccaagttgactgtcctggtatcaaagttgattcgacctcgcatggtgttgaccacagactcgggctgctcgtagatttccttctgcatgaagtgatcgaactgacccttcatgatctcggcaagctcgatctcgagtgtctcgatagctcgaacggaagaaagaccgtcatctcttcggagtcgatgaatgtggagttcttcgtgatggggaaaggggttgaaagatcagtcactaggcctcgaaaacgtgtcaacacgaagagttatcagacgtacctccgtcggcgatgtgagcaatgtcatcatcttcaaggtataagaccttcttagtgtgctcgacaacggccgaagcatcggaagcgacgaagtactcgatgggctggggcataccgtcctcagacaagaacgccctggactgagttcgtcgcatcttggagttgggtccagtaggaggaggggcaaggaaggaggcgtcggtggcaggggctgagcaaaaagcgatatttgaaccaatgattagaagcctatccgagcgcgtacagtggctcacatctgtgatagatgtactcactgagctctaaggccttctcctggtcagcagccatctcaacatcgacaaagtctaccttgagcttcttgtcagtcttgacaccgatcaaaagaggagatcctcgacgagcaatcacaatctcggacgggaagtggcaggacttgaaagcaaaagcaaacgagccctcctatggtttacacaacagccattcgcgcacagtccgaattagtaaccgtgcgcatgccagtcaagtgtcatattaaactggtgaagtacgtacgagctctttgatgacagccttaataagagtggtaaaggtcaatcgcttagtgggctgggaatcatagatgtacttgcaaaggacggcgacggcttcggtatcggtttcggtctcgaagtggtatcctcgcttctccaaaaccatcttaagctccttgtctgtttgcgaatgaaagttgatcaaggtaagagatcacgctgaggatgaagcctacaaacagtcacaatatacgcacagttggtgatgataccgtctaaggaaagcagagaaaatatatcagtcctgcattcttctcgaatgtaccaagacgttgtcgataaagacaagagacgtactgtggacaacgatgaactcttgggaggcaccacttctgtgggggtggcagttcgtaggagagggagatccgtgagtagcccatcgagtgtgagatatcgaggtttgggagacgaaagtcttggtgaagtccgcagtggattggtcgatcagttttcgaagcgaggcaacctttccgacctccttgtagagcctagttgagtgttgaagagatgagtcagtgaacagatggggccgttgtgcctgaaatgcccccaggagatttcacataaagcgtgcgaacaaaactcacaagaagtcgtcgttgtctccgtcgattccaatacctgttgtaaggagaaatgagtatcgtcaatgttctgatgatgcgatcgttcggaggaccagatgcaaggcaagggagaaagaataaagtgcaacataccagcactatcgtaacctcggtattcgagccttgaaagacccttggtcaaaatatcggcgatctgctttcggtcctgtttgatatggtgatttttccgaaagagaatgctgtcagatcggtaaagggtaatgtgtgcatctatacaaggtgaatttacataccttctcaacgaggtacgagcagtaggcaaagattccactgcatcaaggcatgcaaccgggttcagtttatttttgagttccttgacttttttcttgccttgggcgatcaagcacaaggtattggtgaggagatcgagaagaaaggacgacggagcttaccacattagagcagaggggtaaagattagaggggtaatggaaagcggaaaagaacgggtaatgctgtgtctgaagaggggtgttcaaggataagagaaagagcaaaagcgatgaaagcagacgaggtgcttgaaatcaaaggtgaagaattccgagagtctgtatgagctgaaattcgtttcccgataaccaacggccaattcgaagcatatcacaacggccagggaagggagaaaacgagagtgaaaaacagcagagatgtcagaatcaagtttagatgtcgaaagcccaaagatttgtcgaggtcgagaaaagtagccgggtgagcagacagatgtgttcctggagagatctgttttgatttctgacgataactgagccaccgagtctgttctgctggtctctccttgtattctctcttggcctatgttgaagatgatgtgaagacaaagaggagaagagatagaaaaggaaacagagagggactcacgccaggaacaacaagaaagagagagtgtgtgtgtatgtgagagaaagaaaggagagaaggaagggaggatgagaaagaaagcgaagggaagggaagggaaagcaaaagaaaggcggaagggcgtgtttgttcgatgtgcacaggaatgccgcgtaaccaagatagcgccgctcagtcatctttaaggggggtgacgaactcttgactgtgcctgtgcgagagtttgttggatgccggtcttgccttgccttgactcgtatgctctcttttgctgtatctttattgattcgccttcaatcttttgagttgtgcatatctgactcatggttgttgtgctggacacccatgcgcgctcgatcgttcttatccgaaggaagtgaggaggcagcatgatccttataaacatgatgtgtatatcacgtcgtgcgtttagttttttgttgttattttcctctgctatttccttccttttcattattctgaaacctggcttcggacaaatgtttgatttgagatatctttcggcagggattggttatgcgatttggttacagccacgtggccagtgacatatcatactgctgtgtcgtccctctcgcgtcccctgacgacacacaggcagccgagttcttccatctcgacagattccattctactggtcaattctcgagtttcatcgtcatctcgtcccatccattagcctagtaaagctgaagctctgaaagtggggatcataaacctcaatatggatcccgagagtcctccctcaaacctttacttgactcctctccttccagatcttgagccatggctttcttctcctgaacagacctctcggccaaatccaccggcttccaacttgcttcacccggcttcgtctgcagcggcctttctctcaaacgcacgcgcgggtaactcgatcttcaatctgctgccaggtggaaaggtcactcctcctttgtcttcatcgccaaagaacggtccaagccaatcagaacccagtggatcaatagacggagacagagtcaagaaggtcaagtgcaaatgggtcgaagggtacagtgagttcaacgatcttgacccgtatgccgtgccagtggatcgactggtctttggtctgttctcattatgttttactctttccctttctaatccttatttgttcaagacaacaatctttacatcggtacatcggacggacaagtcctttggtatacctactcgacaaccgaaacttccatcgtaagcaacgttcaagtgtcttgagttcaaagctcagccatctgactatgtattgttcgtgtccttcaggatccttatacccttcgccataagcattctatctttcctcgccggccaatagataggatctatctcttgccgtccatatctaaggcgctcatactgtctggtatgctttaactcgcgacctctacgtacacttcagatcgaacactgatccacttgacctgtagaatcaacactacacttcgttacgcttccgagcttggaaccagtccttccagctcttattcaacccatcagaggagtcgtggccgtatccgtggatgaaggccatgagtattactcggccgatggagtggacgaggtagggctttgtgtggtcaagcggaaagtgatctcggttttgagactgggaaccagattgttccatgtcaaagtgagcccgcatactttgatatgtctagttgtttcgtcatgagtatctctggtgctaaatggccatctgcataatggtcttgtcaggaaatacctataccagaacccgccgtcctcacccgatactattctccaacactttgtcaagccgattcaaccaactattcactcgtctctatcaatgagagtacctctcttcccatcttaccactctgccaagcatctgcagaaggtcttgcgttcaagccaaagcccaacattgcaattgtacaggaggatgaattcctcatgacgagtctcatcaactcaaataatcttggtgccacgatcggattgtttgtcaatggcaacggggatccagtgagaggcgcgattgagtgggatggaagtccgagaagcttaggtccgtattttccttctcctcgttcttagacatcatgatctatcttttcttttctatggttgagtccctcgaacgagagatgcatgactcataccaatccctactcttcttatccaataataacaatcatcagtcgtcaacccaccttatgttatttccttgcttcgtaatcgtacgattcaagtacactctttgatctctcttgaactcatccaaacgatccctttaccgcccaacatggatgcccgtgttctcaccaaatctcctcagggcttcaacgtgccatcgaccgagcgggatacacttcttcggaagatgcctattcctcttcttcaatcaggacctccgagcaatttgacgaaagcttcttccaacaaatcctcttccgatgctggtgccaacgatgacgtagaagaggatgacaaagaaacagattccaatgtgtttccgacagagatcaatcactttgatcctccttccggatcaggtctaactcctccgtcctctccccctgctcagccagccggtcgatcatctttccaacactctactcgttcatctgtttcctcgtattacaatcctggactatctagcacgcctcagctatccaacgtctttgtactgtcctctacatcgatatacgctctcacaccaacaccgccacttttagcagctctagatacgctgacttcatctgctatcgttggatctggcgatataagaaagtcaggtggagggctgacagaagcgctgacgccactgttaatggacgcttcttttagagaaggaggtcaacaagacatagaggcagtccagttcatacaccataaagtgtttctcaaaggcttgagggaagctagatttggaagagttggagagagcgatgcaaagatcaaggaggacccaactggggatgcagaggcagatgatgatcagtcacaaccagagaaccgacctaaagtggacgtcgccaaagatggagaaggagaaggggaacaagcagagatgtggctgtttggagggggagacgtccgattgatcatcaggctctttgcagatctcagaagggttttggagagagagaacattggggatgtctgggtggaggacggtctggttgaagagtgggaaaaactctgggatatcgaagaaatcagtgcgttcttctttagattttgatctcatctgccttgggccccattgctaacaacatcctttactcactatggtcactctcacacgtacttaagttcaaactcacctaaagaggatatatgaccctcacatacatccgaacgtagcaagctctccatcaactcttgagctccacaagatcctactcaaccaggctcgacatatgctgcggttaattctggaaagagaacgggaaggaaggtctcgtcgacatacagggcgtaagcagatgggagtcagggatgaggaacgtaacggcgaggatgatgcgttgaacagggtccgtgtcggtcaatcctttatgatctattccttcaggagaaaacactaatctcgcgctttccctatcttctcttcaactccttcttctcacagattgtggatacgtcgttgttgatcctactctcacgaataggctcaacatcttctatccttgatattcttgatcggcctcattcggcctcgatggatcttgttcgttcgagtttggagatgcattctcgctggtttgcacttggcagatgtagtccaacatctgttgaaagctccttagagatgttcgctgcgtacgtcatctaacctttcttcatcataatcatcccatgtatgaacgttgcactgatgaattaactggaacgtcccgggagaacctgataggttggtggaaggtacaaaggttgatgaagactgtcctcgagacccgatgaacgagatcctctcgttgctggctcaaagtgaagacattccgctagttcgaaaatggggcctgtgggttgttgctagagatcccgaacgaggtctctcggtacgtttctttttcttccctgcccttctgtttcagacttccttcctttgtcactttccatttgaatttcttgttaactatgaagtctgttctgtcctgttctgtagctattcattcattcagggttaaactttgatcactcagacttggtggacgaacttcggcaattacaaccagaagctggagacaagtatttgcagcatgtggtgatcaatcgaaacagcttggtttgttcataaccatcctttggctctaatcctgaattctgatgaccgaattgctttcttactttgcctttgacttactttttgcatatcgttcctcacctgtccggtctaacaccgtgacaggataagaatttgcatacatcactggcatcccgttatttggagcgaactcgtcaagagcttgagaatgggcaaaccaagaagttcttcgataacgcatgtgagtccttcgtccaacatattgatcgtcacgcgtcttgattttctgaccgatacaatgccatacgctctcttatgcgtagtgatcgaatatcataagttgtcagattcgaaaatatcccttattcagcatttggcctcatttcttccggaatcacctgcgaagcagcttaaattcaagacgatattattccttcaaaactcagaattatacgacctcgagacggtcagggatgttttagatggatttgaaggatactggttggagaaggccattgtgtatggaaaggtaagcatctacgtgtgcattttctcgtatttctttctaccctgttctcgatttgctcatatccctcatcctcatctcctttaccttcacaaatacccgatcagcttcgaatgcatgacgcagcgctcgacatcttggcacgcgttttgagagatacattgacagccgagatatactgtattcaaggagagaaagtcattccttgttctgtcgggttaaacctcgctcgccggttccacttggacgaatggatggatttgagtagccatgatatcggctcaattggagcatcggaagagaataggaagagggagcttctgatggctttagtcaagatctatatgagcgatggcaacgagtgcgtcttgtttttgttcattcgctcttctgtgttcccctccagtgcgtgggaattaaaaactaatgaacacatcttgttaattacacgatcagttccgaatctacagccttgaaaacagctcatcttttgaacgaccaagccatgaatcttgatatagtagacgtgggtctttttctatgatctgtttcttcatcctttccggctttttgacgagctatctagcacggatagctgttgacatctgcggcctttcctttttgtcttgggtaaactcaatagattctggagctcatacctgagccttgggagcttcagcctattacttccttcttgacacggtccatccgtcgaacgttacatgatcaagctgaaggtcaaagtacgctcttcttctctcaatacttgatcctacgttctcttccaagctgacaatcagacttccgcctataatcacaaaacaaaatacaaaaagttctgagggcgctggcgacgtcccttaatttccagacgatggacaaagcactcgaagcgtttgcttcctatccacctattgttgagacctctcttgactctccgtcttctggagatggaggggacgtagacgagaagggcgaaaagagaggatcagcttatgaagagggggcaacgattgctgaaaagatcgtcggccatgctttggatgagcgagatgccacagtgagggagaaagaaaagcgggttgaggtcgatcggaggaagagatatgtggacgtggaggaagtggaagaaggactggcctgataggttttgttagaagcattggtgtcttgtaatatacccgcatatgatatgctacttgtcaggattgtcgttcttttgttgaaaataatggatcgtaggatagatagaggtgacttgtacattgagaattacattatcatacatagttttatctcttctccttctcctgtgacgcaggactatgctaccctgcctagcccgatcgaagagaacatcaacgactctccgatatccgatctttaagacgtttgtccatcggttcaagtaagagttgtcgaacccagccattcgggggaaagtctttttgccattggttgtgaaggtgaaggacaaagacacctttgtctttggaccaatcgagatgtttctgttttagttccccagattaaacgtggcaagcaagaaggtcagctctgaagtcgaagacgaggacgaggacgaccaaaagaaagacttaccttgagtttttccttcccacctttgttccacatgagtccggcgtaccaaccaggatcctttttgaacggatctggcaccctcttgtcttctctacaatttcttgggtctgcaaaacaccaaggcaagacctgaaaaggaacgatcccttgactgagtaacctccgatgggctttcaggtatagatgagatccccagtcggttgacttgggtcttggtggaggagatcgagccatgatgtgaaataatgagcagaggaagggagactgtcgatggaaatggaggagggcgccgttaagggacctatatggtttatctatgtatatggtttttttttttggttcaaatcgaatgatgaatgatcagaacagagcgatacgacggtgagaataggcttgcgcgctcaaagaagagaatggactgactatagcaatcccattgagtgacccattcgtcttccgtcaacacatgtagatctctcaaaaagatcatatccatgtctgcccagacacctccgtgtgtccacaagaccaacaacctgactaaatctccatcgacccaagctctctgatcttttatggcgccaccgaggagatccattctaccttccaacatcgtacccttcgccatttgcttgatgtcaatcttcttcaccttcaaattcttcccgtacagtttcgccaactgtgctaccctcggattgagttctactaggtcgacattcgaccaaaggatgaacgtgcttcgatctagcggctgggttgccaggaaagatttgattgtccattcctgtcgctccccaaatggtaggagatcccctctccaataggtatgatacgtcagatgtttcctctttgccagtagagaaggttgaatgagtgaagcgtaatcgaaacaatcatctggatgagtcagtgccaaggtcgactgaagttgaatgaccgagggggtatgcgagtagatggaggaataattccaagtagagggttggacggtcggtcttagattcgcttgggcatctaacgccgagggtgagaaacaggtctctgccagatctgccgtcggcgggttctcgagagagaggatctcagattcgatccatggtttgttgtacatcgaaaactcgacttgtatttcccatctgtatcgaaagacgtaccaaacggccatcccaagcaagaccgtcaaccggagggcggtcaatcggttaggaccccaaccagcaaacagggcggacctccagcttcctcgacttttctttgatttccgactgagtgtccctcggtaaggatgaagcgtaggcgagaccgatcttgagccaggaatcgctgctagccttctgaagaaggaattgggagggacagaacttgaggcggtcgatgacccgtgagggtctctgatgtcgtactcgtcatggtcgtgatcgtgatcgtaaatgcggtcgtggccgtaaccggaagaagatgattcggtggacgagaaggacgggaagtaagaacccagtcgactaagcatggatccaagaagagccctgccttgatgtatgatcgaacgactctgtcaaatgaagtgaaaaggctgctggaccagggaatgtgagccaatctgttttcaccaggacgagagaaaaacaaaagaccgaaagaaatcaaaagtggatggaggaaaatcaatacaagggaaaacgaggaagatgacgcggttccgatgtgaccagctgggcacagaattctttgtctttgaaccattcgggttcgtaccccaagtccaagttgatcccaaatgaacatccatcataagactcaacaataagcataagataaagatacgagttttctaagcaccgttcgtaccagagaacaaagacgcgactagacaacggtgagaaagcgtggtcgacagaggcatagaagggagagcacacggatgggatataaaagaacaaagacaagtccgctcagaggacaagcaagaggaacgtgttgagtcatcaaacgtagtttgacagatgagatgggagaggaggatccagaaaaggagcgtcaaagaatagccgtaaacaacagatgaagcggctcatgtgttatcgtcaggacatgagaagcaataaatgattccaagagtacatttcggtacaagaaagcataaaagagggatccatagaggaaaaagaggaagtgggtgcaagacacaagaaaagggagggcagaagaaaaccagagaatgggaactagtatgacaatgattctgagagtaaatattcaaaggtcaatcaatatccatattcctcggctagaatcccgcacaatcaaagataaaccactcgatcagttcaacgacggaagcgacacaagagagagagggcatgtgcagaaagactcactgtagatttcggcgatatgacctagtcgcttgtgcgctctcttagggttcattaaattcgacgagatctgttgagggaagagacacaagaaaaccgcccgttgaatgagaggtcaagatgtgcgatcaatcataacgatagcagatacgtacatttcggacgacactattcagagatgacggtccacaagctttgtgaatcaaacaaatcacggttccacagtcagatgtcagtcaaacgaaatcaagacacgggatcacagaagagaaagagaggaaaggagaagaagcggagtagactgacaagcaatgacgacggtgccttctgcgcaatcaacctcctcctgaatgatcttttccaactttggtcttcccggtctagccatctctgctacgacgttcagatcgtcttcatcaccttcatccaaaaattgatctttatcctctccttccttctcgacccggacgaagctctgcctttgttcatcccatgtgccaccgacaagccgtcgggtactttccgacccagatccagcaccgatgtaggaaacatcggtgaacgtctctgctccaggagttcgagctccttccgaccgaaagacatcatctgtggtgttgatacttgcgaacgactctcgtttgttccggtacggtttggatccagtccctaccccggtatcctggtcgaggaccaacgactgttggtgatcctgctgatggtgctgagggaagggcagatatgattgagccggcagagtcactacaggatcggccatcggagcatgttgttgttggtagtgatgatgattatactctgagagaccagagcctatgcttccagctgacggtccaacaggcaagggcggcggagcggcgagcccagacccaagtccaaatcctgacggtttacccgacttggcacgtttcctggaccgggcccttcgaatcctaccttccttcttaacacgaagagagaggtgtcgttccgccgcagtccgttcgttgtcttcctcgtcttggctttcgtcataatttgtcaactccaacactgagtctggtcgatggtctcccgacataccaggcgagaaatctgataggccgcttccccctctgcctgcagctgctgatgagccagagaggtaaccgagatcagcgttcgagtcaatacttagagcggacgcgatcgagtcttgcgagttggaccggctacgaatgcctttagcaaacatcggccgaggaggtgccagctcagcgtcgacgtgggcgtcgccatcgttggggaacaagatggatttttcggaaaccggtccatagtttgtgacgaagatgtcgatcgtcagttcgggtgctggtacgaggtcgatcgattttcggatcaagttcgacacccagagaatctcggcttcaaatgtgtatcatgaagcagttcagttggcgtggtgacttgagaaagattttaaagaaaagaggcgatagacacaactcaccaaactcccggacgatccaaacgaaacgaacgcgccgagtgatgaaacccttgcctcccttgcccttttcaccatgcttcttcctaccagctatacattcacacacgtacgccaagatggctactccaaagctgacacctgaaccaccacacacgatcaacacggtcgaatgttggccccatctaactctagctgacgaaccgtacggcccgtcgacgagtgctctgaagaacaccggttttgaggtcgaaagctttgtagctgccgatgtaaaataatacgagcttcgcttttcgtacgtcgctagtccctctccgctagtcgactcggttgatctgccggaagccatgcgacttttggtctccctccagagatccatcgtgaacccttttctggctttgacgagtaggacgatctcttgttcttcgtccgcgtcgtacacactcacgatggagaacgggtgagattgccagatagagatctctctgatctgaagtaggacgttctggccgggataccatttgaacggacgaggcagccggagtgtcagccgaatcatccgggagggtaaaacctgggcgagggcgtaaccggcaggaatgggcgctcggatcggtcgactatctggcggaggcgcgttgaatgaaaaggaagattctgcccgaattggaccgtgacgattagtgggcggtgaatgaagttggggtgggtacgagtacgagttatcaaagtttgacgagggggcagaatggggcgatagagaagagtgagagggagacttctgcagagactcatgttcggatcgatcacccgacaaaaatccatccgatccgtcgttcatcacgttcgaaagcaaaccctgggtataactcaatcgatgagggtaattcttactcgactggtttgacgacatgatcattgaactataacgattagggttatccgatggatgcgtgagctgctgaacatcgtacccgaccgagtcaatcgtgtcaaatgacctatcctgggacggagacgttggtgaagtgagttcatagtgggtgaggatcccatcctgggccactcccaagccagcggaagtgtcgactccgagtcgggtcatctcataatcttcatctttcttcccaaaggtgtgattgctcgacctcttatcggggtaggccaagccattcccgttgtcctggtcttctgcggggagaagagttgaacctagtttcgatcgttttgatcgtttgacctggttatttcccaagccaccccaccagccattgacccagccgtaccggatgaaccgccagagtctctctgccatccagagaccaccagcggcgagaggccaccaatagagttttggaaagtgtagtgcggacgtgatgagtgtcaacggtacgagcgttacgtgtgcaaaatagaaggcctggagagccacggaaagcgggggagcagcagagaaagatagaaaaggaagaatgatgaagaatggtaaggacactagtgaaagcggcgacacgaacagagtcaaaaagcaccagacaagaatattcatcaagactgacctcatagaacctcttccggacgggctgtagactgaatacggtcaacaaagaaagcaagatgaagctgacagcgccccagatgaatttgtcgtatatccagacgacctgggcaacttttcggtcagacccgtcgtttctgtcatctctggcaagttgaacgctccaaagggcgacgtgtaaggcggtgacgagccagacgagccgccctgaccatttatgcaatagggtgagcgtatcgtagaacatgtgggtcagcagcttgagggaaaatatagcgaacgggggtgactttagagcgaaaagtacagagagagggaaaagtgagaacgcgatcgacccagttcgggcgcctgaggtccagaaggccttatcgatcgtataactcggggtaaggttgacggtgggcgtggtggctcgtttaacaaatgaggtccggtaatcaaacaagtgggcgttcggaaagatatagtctgcgccgatgaagcaaaagatgagcgtaaaggcaaagagaaagaaaatagagacgatctgtccgttagaggggaaggagaacggttgttttcgtctgggtcgctcgcctgtgacagtcgaggttttggagagagtggttcgtttgatgatgatccgtcggacagaaaacttgcgccagattgcgcctggcgtgcctctgcccgtaccgaatctatgtccgagggagagcaggacaaggacaagagcgaagataaaatataatgtgtacgcgtatcggatcgatggagagctatgcgggaataggcgagaagaaggagaagaattttaggaagattggacgtgaaacgaatagagcgaacaatcgaatgatgaccaatgacgatgaactcaaagaggtcagcccgaaggaaagatggaaggatatgaaaaaaggcaaaaacacagtgaaagagagatgaaaagacaagaaagacaagaagaaaaaaaaaacaaagaggaagaggaagagaaaagaaaccccaaacgagaacacacctgagttgatgaatggagagataggccgtcacatagtcgtgatcgtctgctctaggaggaacggtcgggctggcgggacccgtagctgttgcagctgcccagtaggtgtctgttgaggtttttctggtggtggttcccgctgtcgtcttgagaacggtcgagacgatcgcggtacctgcgctggcgacaactgacgctgtggttgctaaaggaggcgtgtagcctttgtgacgattgtaaagagaaagggcggttagtttgccaagcatactgagaaagcgagaaggaggacaaacctccagtgacgatagtggcgatagtggcggcattagaggtggtagccatgaggaagtgatgtctacctagctatggcctgggaagaagaggccttctttgaaagaaggtcaaaaagacccgataggagtgggaacaaaaagacggagctagcgagcagacgttacatgaaagaacggctggtcgagtgagtattgatatacaccaagaggagcatcgaagatagataacacatacccagttggactatgagctctgtgtgtgagcagagtacgagtgattaagtgtactgggtgagtgagtgagcgagcgtgtagttgactgagcgaacgagaggatgaggaaaacagagcgatcgaaaaagagccggtgggaagatgcacgaacggatacaaggccaagagaaggcgggggggcacggccggttagtcacgaaggagaaacattgccggcgggcacgtggcaagtagggtcacgtgagtgaagcccaaatatacccccattggtcccaaacagtcctacgagcaccccaagcgcaacccccgaaagacaaactcgaaactcgatccggtccggaaggggtatcatcgactttttccttcttgaccttccctaacttcggtctgtctaacgattagtatgccttttcagggtggagggccgaacaggatcggggcaacaaagggcaggggcaagcggtgagaggcgggcgatcaagggcgaagaagagcatgctcacagggtttacaaatgctccctgaagttgaggtcagcctggatagtgaggcgtgtttgtgtgcgtggaaatgccctgggcgaaccccactgtgaactgtattctatcatgctaactaggcaatctctgccctggccctagccttgccctgatctcggctctgaccctcttgtgcctgccgccgccgctgctgcccttcttagtctagctcttcacgcttgatctcctttaattgcactcactcttctcgtctgtttatcccggaagtcaggttccttttttccctttcttttaccttttctctcctactccttcttctatcccttctatctcccttctctctttctcttctccatcaacgccactggtatcgaacactcttcataaacagattgctttctgctatggtcattcctacacaacctcatccggatgtcgaccagaacgttgtcttgtttcagtcagttgcccttgttgctgtaatctttcttcccctctctcttattctcgctctactccactcgtaacttattcacctacattgacatttctcatcgacatcgacattccatatcaacatcctcttgtcatatccacatccagactgggtacgttcctaagttgattcgtcgctctcctgaccacagctaacggactcgtatgcttgcccac

SEQ ID NO: 1582 - DNA, 18224 bp, Xanthophyllomyces dendrorhous
  misc_feature (16404)..(16413): n is a, c, g, or t
ctcccagtctactgcagtaccgccaggatcacaaactttcctcagaaagaacttgtcaacattctagaaacctgccggagggccaactcctcgttcgatctgcccatcaccggcttgctcatgtacagggacggacaattcgttcagttcctcgaaggtcgcaagcaggacgtcctcgacttggttagttctctttcttcttctttcaatgcctctcattcgttcttcgccgaagctaacctatccgagcagtacgagagaatctctggtgatcccaggcactacaacgtcaccaccctcttccaaagagacaccaaaggcagagactttggaaactggtccatgtctttccggtccgtatagaatcacctcagaatcttatcccaagtacgacctcctgcctgacaagtgctctttgtgtgatttgtcttctcttttctttctcaaatttcttcagtgacctcgagaggttgaacaggggactgtaagcccttactcttctttctatcctctgcgcccatccatgagtaacaagtggctgattcgcctctacccgcctgattattgatttggttgtatttaccatcatcgcacccctcactcgtcatgctctccctatcactctctatcattgctccgttaaaaggcctgataacccagagaacttgcccttctcgactcaggaaaagtatgagagcgatgctttcaacgacattatgcttcaatcccatgcagagcaagtttccatttcttgcgctcctttttctcacctgaccgggtctacagtttcagactaacttttcgtcttttcggggttttttctcacagttctccccagttcctggacaccatggacgataccattaggaacctcatcaccctatatcacaaactcttcatgcgactctagaccagaccacagacatgatcacagccttctcttctctcctcttcctcttctctccccaccctgatctccaccatatacacgcatacacctattcactgaatagccgtagacggatttttcaacttttacttctatcattcttatcgcttttatctacattataccacttttcggttcccttaatctcatctttcatcatctactcctgctcttactcttttaaacgatcctctttttcgctgcatcttctatattgtataagatagtctttttggattcatcggaatacatgttaagtcgttgtggcaatccatagcaacatctcctcgagcgcaaggaaattgtgctgattacgtaacgcgttcatagtccaaggtcaaatccttgtccgcatcagcccatcactttttcatctctttcctccctcccttatctccttctagccgagcgatctgggacaacatctgaacgagagccgagagggtagaacaaaagtactacatatagtaacgagatgtcgacaagcaggaacaacaaagcgttcaacaaccggcgtagtcatcctactcctcctgttaccgccttgcgcaggaacgacagtgggaacgggttttctgtgccaccactggcaacagtagcagtcggaagcgagccgaagggaagctcgttgctggtaaggaatctaccgggggatgtgacgcttaacgatgtggatgtatgtctgttattcccctctgtttctccgtattctttggatccatatctgacccttgctcccttttttctctcctgttccatctatctactcactatgatggatgacaatatatgcaaacacaggaacttttcaggatgacgatcggaccactgatctcttgtagattggttcacgattcgaaaggctcattcgaaggaattgctttggtagaatttgtctcccctttggatgtacgctttatctgtttttttagtcttatcatgtttcgatttgtcgagagtcctcgtccgtgtactgatctcgtctttcggggatggtcggtgtgagtctgataggctgtcaaggcgtgggagatgtacaacgggaaaaaaatcgaccaaagtacgtttccttccttccttgtttgtttgtttgtttgtctgttgtttcctcttttcctccatctcttttcccttcttttgttcttgccgatttacatgcatcggagatgaggagaaagtgcacaagcttactgaatctaagacacataaaatattggaaacgcctacagaaacaccgctcgaactccacctcgtttatccatcgcctccgaccgctctcgttccctcccttcctgcgcccctgatacccactgttcccagaccgacacctacgcccaaagcaacgcccacaggcccatccagtctctcgactcggattccaccgctcaagcccaagtccaagattggaaagtcccggccaggtccgggccaagcaccgttatccgctcggttaggcccgtcggtcatcccgcttgaaagccgattaggtccccctcctcacgcgacttcgtctttgtcgctatctcttgccccattcggttcaaagccgtcatcagcagagcccaaagtaggcctgggcggaaagaagaagaaaagcggaccgatcaagaagcctatcatcaagaaaaagaacggaccgaagaaagtacagaacgggatggacggagtgcagaggatctgaggatcatttcttccttgttttggtcactgttctcttctcttgccttgattgaattttgtttcgagaggaaagaatctcgaagaaagagaaaaagaaatggtttccaataaggaaaagaagaaaaaaggaagaaaaaaaaacgcttgatcatgacagatagaaatcaaaacggcaacagatatctctatgatatcgaaagatcaggtttggggttctcagtcttctagcacgatgtgaattgtctcttctgcgcttttcacgcccactttcccctctttcaccgccgctgcagcagccccctctacagccaaccccacagccacgggcaccgatttagaagaccaagaaactagccgttcagacacataatcaaacttcctctggtcaaccgcccacgtcttcgggatctcgccctggagtgcctgggcacggagggcggtgtaaatcttgtaggcgcagaaagcatcgttcgaggcgtctggttgggttttcatcgagcgtagcaaacaacatacgtgagataaatatgtttagagagaagaaagtggcccaaaaccgaaagggagaagaaagaagaagaagagataaaggcggctcacattcaacttgacgttcgttaaggatagcagactcccagtttgacatggtgactttcttgtgtttgaccaactggcgtttaaggactgttcctactagaacggccagtcctctgacctaaacatacacacacgcacacaagaaatccagtacgagtcgatgagcgcaagggataaaggacgtttcctaagactggagagactcactttctgaccagagatcggagggcagatttcgttgaggtccaccaagcctttcgtctggacgcccagatcgttgttgatcttgcttgcgtcggctaatttttttcggttttgataaaatcgatgtatttatcgtgcagatcccagaatgagtttcatgaggtcgcttataaagaaaagtgtggaagaagaaagacaaacatcgaatcccgacgccaagtttgattgtctctgggtcctccagtagctttttcaactggaaagggagcgggttcatgctcctgaactggatctattcacaattccccatgaaaccagaggagaaaaaagaagaaggaggacgacgactcagaatgccaacataacaatccgaatgatgagaaggagaagcacacagaaagcagataaagactaacgagaacaatcgtcttgctatcagccagttgcatcaatgccgtcggattttctttaccgcctttaatgaagtttggtttccactcgatatctagtcctatcggtctattcgatccgaaaccgttcccaagaataaatatcgagtcaaccatgaaaccaaacccgattctctcaggcattgtgaatttagtaggtcgaccagcgctagacgaaccctttgagtagactgacagcctcgttggcggattttgtatctcccacaatcaacaccatcggtccttccgttccgtcagctgatggttcttgatgtctgaacggaggatatgacgcgaaggatgctttgagttcagacattgatgattgcagttgtggcggttcgattctaatttgtaaattagtttttgtcggttattcgttatccccaaaatcacaagtcggagagaatgagatgaaatataagattccgaagatgagatgaagccgaatgacacgcaaacgaatggaagaatagcatggaaggacagacgaacctggtacttgaaggaacaggagcagttctaacttcagtccctacgacacttgatagttgtctcactccctgcgtcgatcccgctggttttatacttttggtctgtcgatattttttagtttcattctggcttgggccctgtgtctgaccctccggttgaggttgagccaaagtgtggacatgagcgtgggtgtgagttcgggattgggttgggtgctgatgataatttcgaggcatcgttttggaaatagcgtttattgaccgacgagtgtgtatccaagtttgacggacgactatcatctggattgacaagatggatcagagagtaccctggccggagagagaggcaggaaagaggtgagaaaggagagaaagcaagggagataagttggttcggagggttgatggaaagtagataggtttgttggatgttttgtctcgtttatattttcggtgatttcctaatttgttacctcccactttttatcgttatccctagtttctcatacaaatgtccttctttctatctttcgtttcttcctgatttttgtttcaatctaaaaaccgagatgagaatgatcatgcaagggaagaactgtataacgactacaaaatacaatcgaggagaggaaagcacacagaatataaggtagcgaacgagatatgtaatccgacaagagagatagaaaataaagtaaacccaagggagcgccagaaagaaacgctctctccactccacttcttcgtgtttttactttgaatattaagacggcgagatctatacagatctgggctcagataggttcagaacgagcccaaacctagactggagtcaagaggaagatggatgaaagactgaaagaatggaaagaaaaagaaagaaagaaagaaagaaagaaagaaagaaagaaagaaagaaagaaagaaagaaaaacacaaatgcaaacaaggaacagcacaatataagaaaggaaacccctcgaggatcctattccgtcacatcctcgaaccgatgtcttttcgacccatccggtccgtctggcgcgtcctcctctagatgcctcttcagcccagattcgcctccaccctgcacttgaggtccgccaagaccaggagaagcctgaggatttccttggccgagaagagcttcgatggagaatgatcctctccgagactcggagaataaggtcgagttcaacccatcacctacagattcactcgaaattaaattctgaatcatcgccctgtatgtttgtttatttgttgttttgtgaagagagagggaaaagagcaacaacgttcagcagatggacgaaagaaaagagacaagaagagatggataagaccccgtacatgtattgatcatccctgaggcccatcccaatcaatgggtttttcatctcctctccctctgcaatctctccattttgcaaagcctgagcgcccgtcaagagcgcatcatcgacagaaggatcagatagcggtggtcccgtaccgttgggcggtcgagggaccagttgaagttgttgaacagacgtcaagtgaatcaagtgtttctatatcatcatcaatcgccagatgtcaaatttcgatggtcagtcaatgggcgaaagcatgaggagaatgagaaacgaccgacctcaagtaaaccgaggagactctccttattgaatggtttcggcctacaaacaacgatgtaagcaaatgaattatacacacgaaaagagagcgcaccgcggatgcaaaaggtagggtgaagacatacagatgacccgtcattcctgaactcatgtacgacaacacatcctctggattgttattactcgtcatagaaatgattggcgctacatcaaaccaaatccatacacaataccacggtcagtctctccattcgagaagcaggaggataagacaagcaaacatactcatcgagtcaaactgtctgataagagacgtcgcggagacaccgtcaaggttcggcatcacgatatccactagagcgcgcaggacaaacagagtgaacaagcgagcgaacaaacacttcaagtcaactcggccgtccaggacaagaacgtgaaaaagggcgaacaaacttactgagaaccaaatcatatttttccaaattcattttattgaccgctccgattccatcggtggcgatatcgaaactgcaaccaaacacctccaacagtttactcgacatttttctgtagaccgcgtcgtcttccacaatcaacactctcggtggaacagaccagccagggacataagtggatcgcctcactcgaagcttgccagatctcttggaagatgaatgatgacggtgttggtgatggccatgcgtcgagttggttgatgcggacatttgagcattcactgaggatgaagaagaaacaacactgccgctgttgctgcttgcgttgccgttgggattgacaacagtgacagccccattagaggtaccattcacaggagtagctggattcgacccatcactaccacctgaacttggcggatgattccttccgttcagtccaaatcctccgaacgaactgtttctgcttcctcctgcttgaatatatgcttgctcatgagttccgtccgtcttccctcgtccatcttctatcgctcgaccttcgaccttggtggtcgatccgtgctcgtgggtttgacctgagcgcgaaagatggtcgtcccaatcaaaagattctccatcgactatctttccgttcccacttccaccaattccaccgccgtcatccgactcgatggattctctgaatctgagttgtccgacagttagaactttcaacccattcggcccaacggtctcgctcaagatggctgaacctcttcgacccatcatgtcgggtaacaggcttaggttcaaatctccgttcatctgagggttgtgtttgtagaagggagagaacgggttggccgtctcgaattggacagaagatatgccggcagcggcgacagctgctgtcgtagggtcgtcttgttccgattgttgttgttgttgttgttgttgttgctgttgttgaagagggtctccagatcgagtagccgtcatctgttgagactgactctggccctgggcttgcgcttgatcctgactggacggtctatcccaattctcttcccattctcttccaccgccagcgcttcctgtgtttcctcccgctcccccttctcctcctccaccggcagatcctccaattctaccaggctggtgttctctttcttttccttttctagatgttttcggaagatgataagctggatactgctgtcgggtctgactctgtgagctttgagctgagaacgggcttgactcgttcgaagtcgattgctgctgtgtaggttgtgtaggctcataggccggctggacgttccctctctgaaacacgtaatccccttgtggaccagccagattcgggttcggatttgagttcgtgtttgtattcgcgttcgagtttgtgtttgtgttcgtgttcgttctcgggcttgtgttcgtattcgaggtggtgttttgattcgagttggagttgggattgatgagcgcttggtagctcgagccaagggtgaaatgaggtgtctcttggttggatcgttgatctgatgatgtttgcggcccgtttcttttgggtgagtacagtcttctgtgtgtatatgtgtgcgagagagaatgagagcaggaagagaaagaaggctgaccgtagttttccaacttgaccaggtaaccaaccatatcactgacgagtgcctctgttccacctgttgctctctgtaacctggtcagatcgttcaacacctcctgatatcgttcctgcaacgtttgaacgtgtctgaagatcgtcgtatgactctgttgaagggccgcgacttgagcttggagtgcacagaacgcttgtggatcgatcgggcccagagtttggttcaggccttgattttgaccttgattttgttgttggtattgatggctactagggccaacgactgtggaaggagatgaattcgaggtcgaatggacgttcgaaattgagggaagaggagagatcggtcgacttcccggtacatctgatgatgtggctaggtttggattggaagatacccgtgatagattgacgggcctgcccaaggggtttgttgtggtcgattgagtctgaccggccttgttttttggtgcagggactttgcgctgttgtggtagatgttaattgtcgaacacatatcggtcgtgagcgagaggaaagacaagagaatgtagttggagaagagtcaaaggtaaggggggaaggaggggcaaaccttgatgttctcgagactttctccgctggtagtgttgaactctggatgtttaaactcccaagactggtgggagacgagcgatggatgaaatagtttgataagatcagaagtgtaacctttctgtttggcaaaagacaggaagagaagggatgggaagggaaactcacagtttctgctccttggccatcctcatttttcacctgatcgatggtttcccccccaaagcatacagacgcgacacgcgcatcaatgattcatcctgatcggaagcatctgaaacggcgaggaggcctgatgagaacatatgattgtataatgagaacgaaccttgtggaaatcatatttgttcaactgtctgacgaacgaggcaaagtttgaatgtctgaaagtttgagggctgggaagagggtggaaaagtcaagtggagatgaaggatacggcctggttagaaatcgattttatccgatgggacatgatagaagagcacgaggaaactgctggacaaacaggattcgagtggtgaactcattcatgttctgagcacacattgatatgaaggtaaggtcagggctcgatacactttagcagctctctccacgatagagaagacaaacaaggactgaccttgacgagaaagctgtcgcccttggggctccaagcgacaacatcgtcaaacgcgtcgtcctccagcattctgtaagacatgtaggcccggttgagaggtagaaagcagaaaagaaagaaaaaagagagcaaaatattagacagaacatttgattgatggtctagggcgcgagcgagatgtctccgaaatcaaacgaataggcaatgacgacaagaaggaagaaaagaaagacagggtactgacttgaagagctttttgacaaactcactcgggccttgagcgacctgtttgatgttgttgggagcagttccttgactagaagtcgagcgtgagcccatcgcactggacattgaacggagagcactggcgggtcggttagagtccaagttgagaaagctctctctttcgtgtaatggtgtggaccccatgggacgggacatgtcggccggttggaggataggtggtaacgtcggcttgtggtcaccatcggcgtgatcccatccgaaagaatgaccggagggttcaggatggacattcgatgtttgcggaccgcctgggctggtggagtacacggcgtggtgagggtagccgctggctgggtgattggtgtactggctgattgggtgaccagagaactggctcgaatggatgtgggatggatgttgttggacgtggccgtggccgtgggggtgcgatagatgggttgcttgctgttgttgctgctgttgttgctgctgctgctgttgttgctgatggtgaagcggatgaggaggaggaggagggccgctggcgtaaggaaggccatgtatagtcataggggacggatgggatgtatgatgcccgccggcgtcgttaccaaagagcctatctgatggatgatgcatcccagacgatggattaggcggcggcagagcgtatggatgagaagcgttggacgaagaatgcggcggtggtggtggtggggttgctgtctgccactgatgatgatgctgaacgtgatgaggatgaccggagggatgtatcccggacaaataagagcctgggggagaggaagccgaagacgaagacgaagaatgtgagaggtgcggcctggcttgcctatgagcattttccatgacctggacacctggattggctgctatctgggtgaacgatctggagagagctaatggcgagagaacaatgtccaaggatctatctgacaagcgaagggggaacgaacggagggaatcaaaagagttgatggatggaaaggatgaggggaaaaaaggtgctatatttttgcgaataggatctgtagtgtttggtgtgaattttgtagtgtttggtctgtagtttgtagtgtctctctatgatttgtagtgttttgtatcaatttcgtagtgttttgagtttaatttggcagtgtttcgtattcatttagagtctttccctattcatttatattccttcctatttaatttgtagtctctttcccctcgtttgtcacactagactcttctgatggcgtcttttacctgtgcccgcttagatgcatacatacacacacacatacacacacacacacacacatacacacactcacaaacatgctccctccctctctatccctctctatccctctcttatatgctctctacatcaccattccaccttcagagttcgtccacacctctccgtagatgtgtacgtccgtcaatcagaccaccacggcttcaggtccggtcggcaaacacagtcgatcagcacggtaaccctaaccgagtccgactgttaatccgataaagaccgtcttctttggcattccagtcaagttcttccagtctctttgtcggtatcttctctggcttctcttctgtcgctgtgcagtgattgggtagtggctctcgagcatcgtctgttgttcacagctctatcgaccaacacactctctgttatacaagacgattccttctttcggtccatagcttgtttgctctctgacacatcatcctaccgagctgtcttatgcctgtcatcgtctagggtcgcctgtctgatgaagatagcccagtggacacttgaggttcattcgttcggtcgagttctgccctgaattcgccgtgacggtaaattgtcattgctcgctgtgaaaagctgtgaaccccggttcttgtccggtcctgtcagccccctcgttcctagtccctgattcagctttgcgcccgagaccttccttgcacgaggctgccctggaccggtccttgctctttctctctctccttccttccttccttccctctcttctcatcttgtatcgaattctctttacctttccctgctttagtcgatcgcagtcgttaccgtcagtcctggtcgaacaatcagtcaaaagaggacctaatctcagagaacacatctttgcgcttgagttcaacgtgacatctacgtacaagagagtcaatctgctcaagagtacataagaaaggcaacaaggtatctgtccgtctacgttgagtttgaacatcgtgccgacgcgctttcctatgcgacataacgacccaaactctggttcttgggactcgatccgccgggtttgccataacgtagctctcacaaaggatactctcggatcattctcagtcgagcgatccaagtctgacgattatatctcggatctgaaccaacgctccaaaccccagtcaggaaacaggcataaacgatcaacttctcccagacgacagaaattgtggctgtgctcttccgaccgactcacccgcctgggctgtttcctctgctgcatgcaagttctccatggaaatccagagggaaacctacccttgtgaacggaagctgaatgagtataagtgtcgatatttaggatcgtttcttctttctctttttcttctttcgaacaaatatccaagtggtaagcggcccccataggttgagcatgaactgagcttaattttggatatgtgtactgacaatgtttccttcttgctttgtgttttcctttttttttttctcttcgcatccccttcttccagaacacaaaagttctgtctttgcctcacaattgcatagtcagcgttcccgttcccgagagcaacttttgtctattccttctctttctctgaagcttttgtccgtaaaactgtctgtttgagtatccttccaacccaaacctggctttctctgggcgtgaccgtagggacgtcctcacccttcattgggtttgacgggcaatgaccgggttgtgtttcgggccggtcaggggaagtttatgaggatggctaggccgaaagtaacggaggaggctcgcttttatgggaggtggacggacaactctttcctgtactattcgttgtatttgtgtataccatgtgtgtgcaccatcgtcatgatccggtttaaaacaagacagagaaaagacgattaacaccagagagtcaagaaagcagcacacccacagacgcaaaaaattgtcacagctgttgtgacggatgaaccagctaacagagtatcacatcacttccagatcgatcaacacctcaaccgatcctttttgcttcttcttttcttgtcttttctccccaagggaaacagcaagagactgggtgacaccagtgaatctttcttctccattcagacagcaggctagttgttcaaaagcaaagaaggacaggattacgttgctcttcattcgggcagagaaaaacagggaatccaacttcttgtattcttgcttcgtctccgacttcatccggtcctggatttcttcgttgtagtcttcttttcttcctttttctctcttcctctctcacacacacacacacaaaaacacatctcttcttctcttctcttctcctgcgtgctccccgatctatctcctgtcgtcttgttcttgtatgcctctcggtcggtcgatcgatcgagatagatgcctgtaccttccatcgatttaattcatccagctggaccgagccatctctcaaatctccatcggcaaccgcagttacagcaccagcttttgacctcaaccaccaccccgtcctcctcagataacatcagcccttctccgctgtcctcttctgttgctaagcctatccggccttcgcaaacagacatgtcgaccaccgtccgtccgaattttcgagctcggcaaggggcaggcagtgcgcctccgggagaggtcgacagggcaaacatgcttggttcgttcttggagtcgacgggcaaagctgaagatacatcagaagagttcagccatgtgagtcgtcacccgtttccttcttctttccgtctctctactttcttctattctctatcttttctgccgctctctctctctctctctctctcgctttttcttcctttctttcttgtttctcgctcgctctccttgttcatccatttccttgcaggacgtgctgtactggttctcagtcaagtccaaatgctgactgcctctgcccaatccgaccatcttttcccctcttttcaccagccacggcttcatcatcaaccgcgttcggaacctcacattcaacccaccctatcgtcctcatcatctccgccgtttaaaccgtcgtttctcgatatcgacaagctcattcagatcgcgacatcccagcccccgccttcgcctcttccgttccatctcactcccaacagccacaacaccagccatagttcaccttcaccaggagcaggatcagcgcatggaaatttgtcaaggcccctgtcaagtgtaggacatcccaacggacaacccaggtcgacaactccttcgtacaacagtcacaacctctcagcttcatcttctgccatcggccaaagttcaaccgacacgagagtctgcctgtttgtcgggaacgtaagtcgcatgatccgtcttcctatccatgttccattccttctggttctccatcttttccatcttttctttgtttttgtttttctcgatcttgtcttggtcggcagtcgatcgagggtgtacgtaagccctttgactgacgatgcacttctgctctcttaactatctctctctcgaatctcttctggatcctgcttttgctttcccatttacctagctgccattcagagtccgatggcaagacgttaaagatctgttcaggagagctggaacggtgttgcgcgccgatgtcagcctgggagcggataaccggtccaagggtcatggtctcgtccttctgggcagtcgggaggacgctatccgtgcgattggtttgtccctttatttttcttttatcgtcgtcatcatcatcgtctcctcatctcacttatcgcaaaattcttttcatcagaaatgttcaacggatacaactggcaaacccggatccttgaggtcagaccggaacgactccctccagagtttgaacaacatgctcctcctcttcttcatcagaatccatcattttccagcacaccagcttcgaattctttccccaaccatgccaatcagaatagcaacaatccaaacatgaaccctgtcgttccgtcctcttcgccgatgtacccatcacattcaaacctctatcacccgatccctggtcttggcactccatcggcggcctcgatgcttttcaatcacccctcccaacagcagcaacattctttcgggtcagaaggcctcactcggtcgaacgatagtccgtttggctctcggttgggatcatcgccagccgttccgacgatttcttcagcatcgacaaggacgaccgcctcttcaccagcgatctcgactgcttccagaacatcagcttctctaagttatatgcatactcaatctcctcaaatcggatcaccgtcgctatcatcagcagcagcttcggtcgacggtcggtccttcacaccaaagcctgcgatagaccagtcggttgcattggaagaagccatgctaaaatcccttagactagggggaccaggtgggccgaccgagcaaggaatcaaacaatccaaagtcggaatcagtgggtcgaatgcggcctccaggctagggtttgatccggctttgggtttgtcatcgtctacatctgcggcaggggcgagattcggtaaggacggactgcagggcgtcagtgttgggtctggagacgtcggtgttgggaaagtgttgttcgtcgggaacgttagtgctcctttctcttacttcttctcattttcattcaacttgagcatgagaagctggacaacggctgatctatcaatcgttggaacctgattgcatagctcccgtttcatatccaatggcaagatctcaaggtaagctccccttctgcctatatctcaagtcgacgttagatcaatgagttattcctaactttttctttgttcccgtttgctttcacattcgctcttcaggacctcttccgaacggccggtaatatcaccagggcagacgtggcgcaaggattggatggacggagcaaagggtttggaagcgtcgtgtttgggacggaggctgatgctttgaatgctatcggattgtttgatgggtaaatatttccccttttctcatgtgtctcactttcctcttgtctttctgacctgatgtgcctgtgtttttcttaccgcaccatatcgatcagttacgagataaacggtcggaaacttcaagtcttccccgaacaaacgaactccattcaacattcgacccaacctcagctccaacccaacttgattcccaatctttcccatttctatccccctggcggttcacatcagcatgcacatcaacatcaacaccaacttcagcaccagatccctagccgtctaggcagttctctggcctcgttcgattccttccagaggtatgatctttcggcgtctccactctacggatcatccggtcaagctgttgcgggtaatgctatctctgcatctgctcccagtcttggcggaaatggacatcagctggcttcgtacggtagccatggggtaggtatacctcactcttcacagcatggggcctctgcaaatctttatggcgctcttcaagctcagtctgggggtcagacccagactgtcccacagctcagtcttcagcagcagcagcagcagcagcagcagcagcagcagcagcagcannnnnnnnnnacaacaacaacaacaacagcaacaacagcagatgtcatctcagcaacatagatggtctcagcctcagtcctctcttatttctagaacagatgataaaattcagagcggacaggctcaatcggaattgtcagctggggcgtctgatgtggccgagatgaagaatggcgatagcaagaccactgctctacagaagcagccaacacagcaaccacaacagcagcagaggtcgtaccaccgagcgaacgcacctcatccgggacggatcgacctcccgcaaccttactttgcaggccatccgttctcgaccatgagtcctttacaaaatggaggaaggggaatgcccttgttgacgcctagcatgcctagcttccagttcaacgccttcactgtatgtcatctctgtcctttcttgtccatttttacctttcttcttcccttgcgacatcacctaattgggagaattttatcatttgttatcatttcaagacccctccggtgttcccacagttcttgtcaccgggtctaggtccaatgtctccctcgcttcagtctccgccgatctgtcatccattcttgaaccctgcgccaggcgcacctttgatgttcccctcaaacgtcactccaggacctgggccaggacccccagctcttcattctcatgctcaacaaacgacgtcaacgaatggttatcatcatgccgtagacctcactcagcatcttggacacaacccgatattcccaccgatgacaccttcaggtttcactcctatccactccaggatggaaactccgggaagtatctactttgggggtggcataggtatgggggatgggtcttcgagggccggttttggaggaaatgacgtagggtccgttggtgccattgggttcaaatcaaccatgcaccctatcgaagaacgttcggctgtgggagcaggcgtgagtgcaggacggtcagctgccgggagttcaggagggggggtattgaactctacagagtctcctcagatctcgggtggatatccattccccgtcctttcggatgaagacgtcgatcgtgctcaacgaggggagatgaatagtcaggagaagagcgagctgaagaatgagtctgactctggcttggagatcggctcggcggtttcggagagtggacagcaagggccggaggagtcgaacggctcttcgaatgtgttggagaggcggaacagcgaaggattgccttgaacgatatctctctcatctttttctttcttttctttatcattttttagtctgtgttctttttcttctctttcttctttcggttacttttggggaagacggggaggagggaaagggttttcttggtgtttcgtttacatcttgtggtttatagggggtttctttttctttgtcaatctgggtttctcttcacaagtcttctaatcacagcaaatcacaaactcattcgagctatcataaaccaaactcgtattataatccttttgcttttctttctattgcttctcaacctggttaggtcaataggttctttcttgttcctctctcttggtctacagatctctgtttgtctttgtcttcatctttatcttgttcacccctctttctcttctctctctcgcgctctttctctttctctcgcggtactcatcgcctcgagtctatctggaaagaaagaaagaagatagatgtgtatatgtgtgtgtgtgtaggtcgcgtgcgcaagatccgttgttatcgcctgacgcgttaagatgcaagaaaataatatgaaaagagtttcgttcaacttgtacgttaaatcccat

SEQ ID NO: 1583 - DNA, 2123 bp, Xanthophyllomyces dendrorhous
ggtttctttcagaggatacacaacactgacaagaccatagcaggagagatacagctcatatatatacccagggggtttctcgctcaacgggaaatataagtatacctcagtcgtttcgatcgccggaacacactatacccggatagacttgtttgttcgctgttctccgaggaaagtttataacgcggtatgtgtcctgtcttccactgtttgtgtttgagggacgtttggtagtcgtctgagtgctcgaaagtgtcgtccaaagcaagtctcgaacgatgagaatgaagacttgtcaggctcacgtcttgaagcatcgaccaaacttaccttgatctcaagaaagttgactgatccttgttcttcctggggtttcgattttcggttcgttcagtcagacagagagagagagaaatgtctgccggacgacatgccgcaggtcccttgaacccttcgactcctatacggaaaccaacacgtccttcgtccaacttagatactaccactgcctcatcatcatcgttaacaggctcgagaacaggtcagagttctgacgacactccatcgaaaaaagcaccgagtagagggaccgtcaggctgaaaagacaaccaggcgcaaaaggagtggtacagtatcagtctttggaacagcttctcgctcaagccggtacgtctgcttttgctctccctcttttcttcttctctggaggagaattccagatgttgatcctaacggatgatgatttattgttcttcatatgtgtgtgtatatgtttatgcgttgatgctatcaggctatacagagacaagagtgatcaccccggagagcatacggatcaaagaacgtgctgcttggattcgggcccaagaagaagaggagcaacaagaggcgactcacgcacgtgaaacaaaagaagtttcagagatcgaacgattcttatttgaagatcatttctcgtcgtcgacgaccgactcgacttctcaacttgactcgaactctgatacagatacggacacggtcgagtcaataccaaaatcggagccggggtcggggtcgaccagccttggtcgaaatgtcgatgagcagagtgaacgggagactgggaaggcgaagaaaccctggagcgcttttaggcctgtggtagacaatcgtcagcatagccgtcaacatcgtcatcaacaactgcaccatcgtttgtcaaaagagtgggattcatcgtcgaacgcgattgtatatcattatcctgccgacgccttttctttggtcgatcatccgactacaggtaggatgcctagggctgtaccctccttccaggacatccaaaatggtcataacaacaacataaacaactgtcacagcgaagaagaatgtggctcgctatcttcctcactctcgactttctccgcggcggatacgatcattctgtcccctcctgatctaaacgttcaggcgttcgagaatcaaagcgcgagtgaagatgacgcagatgacgaccaatcttacgcgacgtggtccatcccgtttaacgagtcggttgaagatcttcgaatgtcgcaagcttcttcaagacctatccgaccattcaatcgatctatccatcatggtcaaacaccactgccattaccgaacgctggacctgcacaacaggcgttagagttttcggaatcagatgttagagaagacaagagcttatttgctagttcggaggccgctcggtcgttacgtcggatatcttccctcgctcaactttcttccccaaactcctctgcgtccacatcggtcaaaccgaaattcttcaacgcgtttacgttcttttcatcttcctccttttctcctgcttcggatgaagctatactcaagagaccagctctctctacacagccaaaactaccggaccaagctcacgacacgcttttgaagagaacactccgccacacagcgtcgacacctgttctcgcccgacgtacggggtcttcaaactcttcgtcagaggccgtccctcctcttcctacgggttggttggagacaataaaaaacacactccaatcgaccatctcgtcaacgccatcgtcgataataccgtccacgtccactctgatgcctaaagatgcccctccgatac

SEQ ID NO: 1584 - DNA, 20631 bp, Xanthophyllomyces dendrorhous
taggcaatcttcttctcctgctgttctttctttccctctatcctcctcttctgcttcttgttccgagaacgtggcgaatgaaaagcccgtctcggttcatctcagatcagccccactcattcctaaattaacgccttccaccgtcgtttgcggctcggaagaaggagaggatcttccaccattttcttccctcagttttttcaatcaatcctctggttcaaaatcaggatcaacatcgacatcctctccggtaactccccatggatctgtctcagaaaccatcccatcacctgtgctcacaccaaagatctccttcggcgaaggtgaaggttggtcgcggacgacctgtcccggttgggtatggacggaaggaactgacgacagagaagaagacggttggtatgccacgccgatgtgttcgtttgaagattctcctctggataactcttcccctcctcgatttcgggctgctaccgtctcttcttcgtcttcttcatttactacatctccagcctctactgcatcagccacctcggcggcgactggaggatctcggttcgggatcctacgcgctcagagatctatcaaatctcttcgagagactctagcagctgactctactgctcaagcagtcgcactcgctaaggccaaagctcaagccgaaatcaaagccgctgctgctgctgccgtcgccgctgccaccgcagctaaccacgctttcagattcaagacccccaatcgacgacagaataaagcttcatcccctttgtcgatcaagcatcgaagcggccctgtccctatattctgtatctcgagtccagacacgttagagttaggtctgccgccgcgagaattagatgtagaggaggaagagagaagagcgtccgctttggtagctttggctttatcatcttcaagaaaagaagcagaggacgaaggttggggtggaggaaggaggaaagcggtgagaaaagagagaaaagtaaggagagaggtaggaaggaagaagtgagctgagctcttggaaacctatccctaccctcctcctgcaacccttccgccttgcctctttcctactgtacttgcgtttttttttgtttccttgttcgtgttgtttctttcttcttgcaaattgcgtctatctgtccctcctttttccttcttttcaaagatcttcacactgtcattcaaaccaccggtctacaaaaacattctccaattcattgattatgctatccttgctcaagctcctgtttcatatcctcacgtttctcttctttttctcaagtgtttcttaattgcatttataccctctcttctttgcctcctaatttttcattgaattctcccacattcatccattcttcccgtccttcagcttcttcgttccatgtttctctcgccaaacctgctcttcatactttcatctctttttcacgatccttcagtctgttctctgacagagctgtcgaaatatcacgatgacatgtcctctttgccctctttactcatcttatatctgcagaaaagaaggaaggacgaaagaagaatcgtacactcgtgagtagatgataaatctttaggacaaggataaaggagaacagagacccaaaagaacagagaaaggaaacaaaaagacaacacatagagattgtacggatcaaaatggataagggaattgatagataagtataatgaataaggacagtataagccgaaagttcactaccggaagtcaatagagagaaaagagagggaaactcgatgaacgaaaaggaattagagagtaaatgagtgtgtaatgaaagacaagacggaaaaacatagtacacatatttcaaatcatatcacaaaaaggaccgacagatataccacagacaaacgaacgacagatgtggccagattgatggaaaagagatggacggagacggcagtggctcagagtaagagttagaggagaacgtcgtcctggttcttcttaattttcatcatccaaaccctgtggaatcccagagaggatctagtgagttacaattcttgatgacatcgggctacaaggacagaagacataaagggacatcacaacttactccatacttccgcaggacctgcctgccgattccgccgttccattcctcgactcttcgtcgcgccaaaatactcactgttttgtcaaggtaaaggcaggcgataagaacctcctcaacaaaagaagatacatagtagaaagtagaacatactggtgctaccagaggtaccaacaaagccggtaccgagggagagagcaatcgaatcgatcagagttggatacctatatttaaaaagagaattgtacgcgaaaacaaccttttggttagtatcccagtgcttaaacacaacggaagataaggatggcaacgcaccaaagcccattcttctcaatagtcaattctttatcatggtttagcatgatccatcccagatctctaacctccttcaagaagctctcgtcatgctcatccgtcgtggccaatacatgagcggtcttgatgcccttttcttcgagaagaagtttctgaacctcggccactctatcggcgtatttttggataggagcatagcaattcttgtcggtcgttcctgcgagttcttctgacgacagatccttgcagatatcaccgatgtcacttcttctgatgtgaacagagatgaactgtgaagagttatatgagacttaactagagaaagatcttgaagaactgaagacgatgaggcgtgactcaccggaggtattcgtgcacctttcttatccttgactccaaacgccctcctgaggtatcccttggtcatctcctcgatctctggctcccacctcatgtactttccaacggtctcccaagctccaaccttcccaagcttgcctcggccagtccaatcgtatctggagtcaccttcagcttctccaagattgtacaggaaatcgatgtagagcacgtggtcgtcgggtgcgagttttggctgctctctgtgtcgctcggtaaagtaagacgggacttgagtcaaatagaactgggtgaaggggttgggcagaggtttgaagagggaggcgagggcggcaaagtggacagatgtccagtcaatgaccggtcggaaagtgacgggaacgggtgtgaagtatggctctgaaaagcatgaaggcattgcattggtaagtgtgtgcgttcatcgcctgagcgggacgagacttactgatcttgtaggtatccaactgataacacctccttccgtcctcgatctccttattctgttcttcctcctgatccgaggtctttggcttgtgccactccgggttggtcaccatccagatactccaccctccaatttcttcttctacgggctgaatggtgtcctcctcctgcccgactaaaagcttaccaggaactctagccttaagctcggagattcgaacaagaggaatcccaatagtatgtgacaatcgaggaagatcaaacacggtttcgaaaggaagggaaggcgggatgtgcgctgcatcgtcaatgtatcgaagatgtcgcgcaggagggaaaggaaaaaggataggcgttcggttggtcaagagaccaaggtggatcactgaatttagagtaacgaagaaaaagggtgagtggatagttgctcattgttatcagctagagaaagaagtgtagacgtacaattagctcccatcatcacatcgtttgctaattggaccgacgcatgaaaagcaacgaggttaagcaacatggctaaagacagaagtatgagacactggactcactccatccagaatggaaaccagacatgatgtaattcatatccggacgaaggttttctgttgcacaagatgacaaacaagcgaggcttagtatctgcttgtagagcggaactggtcccggtgcaggaagtcgattatatgcgcgtttcttcaacgaaggctttccgcgcgaagcctgatcgaaagggacaacgtccgggaagcagaaggaagaacgggcagaaacaagaacaggagaaaggtacaacttacctcggaagttgtctttcttgccataactcctgagtgcgccatcacttgcattcttcccagtccagggtgtagcgcttccccattggaccagactagaaactgagctcgctccgtcgatgactgaatcatgggctgtctcattgacgaacggaagaaggacgagaatgaatgtaaaaaggattccacagataatgatctgaggaaaaagagcgatagagaatagcgatgagacgaaagaacgggagaggaaaggtgaattgactattcggagtaacatttgaattcagttgaaacatctccgaacgaaccagcttgtttagaggaacgaaacgtttgggaacccaggaagacactctagatcctaaaggttggtaggcgactgccatggtgctgggatccgaatgggctacgaaaaaacaacgagggacaaaaacgaaaagactgtgtgtcggtggtgtgtggacaagaagatggaggaagtgagaagccaagcagcccggatggtttagactggaaaggacaagattgtacttggtggaggcgcagcagaggtaaagcttatttgaaaagtctgcttacctaagacacgcgtcgcgtcgggtcgtttgtcttggcgtcgcgttcaaattccgttgctcatctaacgatctctgttaacatcttcaagaagcactcggcactcggcggttgatctttggctgttgtaaagacgaagaacaaatcgtcatagatagagctcatggcgtctaatatactccccatagacaagccgtcagtacatagaatcacttcgggacaagtcgtcaccgatcttcaaacggctatcaaggaactcgtcgagaacgcgcttgacgcaggctccacatcggtcgaggtacgcttcaaggattttggcctcgaagtcatcgaagttgtcgacaatggttcaggtatcaataaagtggattatccgtcgataggtctgtttgctgtcttttctttctctgaaagttaagaggctgtatcgactgacgatgcgatctattctcttcgaccatatagctcttaaacatcacacttccaaattgacatcgttcgctgatctgtcttcagtcagctcgtttggctttcgtggagaagctttgtcttcattgtgtgctttgagcgaatcggtcgaggttgtcaccgcaacgcaacaagaggcgcctttgggaacgatcatcacattcaataggttgggtcaagtggtagattcgaccaaaacggttgctagaatggcgagtctacatctcatcgaatcaccttccgcccgttggctcacaaacctccttccagatatactgaaactttttttaaagaaaaaactctctccggcgtaaaactgctacagagaggaactaccgtaacaataaaaaagatctttcaaccggttcctgttcgaagatacgaatttaataagaacgccaaaagggagtttgccaaagcattacatcttctgactgcctacgcgctggtaagctgcttgactggagccgacgttagaatctcagtagtcggaaccggcaaaggcaaagggtcgttagtattcttccctgtttccttggctccttctcatacatcaccatcccgagactaacgatctttccaaattcatccttcaaggaaacgtacagtccaccttcaaacaacctcctcgacttctcttagaactacgatctctgcactgtggggtccgaaagcaccagtcgagatgcaacctatttcccttgaacttgaactgatagacaaagaagactcgtgagggttttctctccactacccaattccatatcgcacaacctttcagttcatctgatgatctatgtttgcatcctccgttggaacaggacaacgcggacttatagacttgaaggcatgatctctctagatggtcacggtcgatcatctcctgaccgtcaattctattccatcaagtatgtaatccccctaagacgttgttgtgatattccgagatctcacgtatttcatctactgttgtttctgtctgggatgaagtggaagaccttgtaattcctcaaaggtaattctaaatacatatgccatctcacaaaaacaagttttgaaactgcataaatcgaaacgtaacagaatcattctctctgagctctaatgcacttcgcgcttatcacagctggccaagatgattaacgaggtctatcggtcgacaaaccccaatcagtcgcctgtagtgattctagatcttcagcttcccaaaagtctgttcttatgtagtttgacacctcctttgattatgtttccggaaacttcttcctgaacttacccgacttctctcgcttctgaaatactcttatatggtatatcttcctcttttgaaacaaaaaagctgcgtgcgatgtaaacgtgacggcagataaaaggacgatcttcttgcatgacgaaacagacatcgtcgatgggttcagagtatgtagatttatccttgttcctttactagtctctgactttctagctgcccactgcaatcatactctttaattttcctcgagaagctgattcggatttaatactcttgattcaattctggaccacttcgtgactttagtcgaagctcttagtcttcttctctcactcgtcctccaactctttccccctccctctttcttcggttcaaacacaatcacagaatgagacccaacaggactctgaccgtgaggagatgtctcctccaagtacccaacagagttcaataagagattcgcgtccgtacgggcgctcggacggaggaagacagacaagtattctgtcggtgtttggtaaacgtctgccagagaagaaggaggaacttggcgatagcgcgaacgagatcgaggatcaccatgctggtcatgacgtaaaagagtcggaagctgagcagatgaatgaagagcaatcggaaggtgaagaacagatatatgctgatgatagttcgaaatcgattgaacccgattcgacagatcaacctcaaattcaaagggagattctcatccatcgccgggcttcactatcttctgagcaagatgaagaagaaggagaatcagagaacggacgtagaaagcggaaaatcatcgattcagaagacggtgaagatgatgatggcgatggagtaggcggctgctcagagtttgatcatgatgatcctcaaccattgtttgttcaacaagaacgggagggagaagacagatgtactacttcccaaccccgcttcccgacccaggttcttccttctccccctcctctcccatcttactcccaaaccgatcctagaaggcctgatcggctgtctcgaacgactctgcgctactctctctcttccattcaatcacactatcgatgtctaccttccttgcaaaccacctccgacgatactggttcgaaaccaagagatcccgagggtcaggaaatgtcagaaggcgatctcgaaatatcggatatcagatcttccgcagcggaagagacattggatcggattgtgctgaaatcggatttcaaacagatgaatgtgttgggccagttcaacttgggtttcattatcactagcaagcgagggaaagaaggcagagaggacttgttcatcgtcgatcagcatgcagcgtatgtttcttttggtcaacactattcgtcattgaatcaggctcgtgcatcttgaactaatttaccttggtcggaacacttgtctcgttcttgggacgcaaactgattcagagatgaaaaagtgaactttgaactcttacaaaaggagaccaagattcaatcccaaaaactcatacggtcagcgatcttgccgctcatcttatatttctctcacgatggtgtgactgattctctttcgaggacctttgtgaatgcgctcaatactctttattcttcttagacctcggccattggaactctcagctgtcgacaccgtcctcgtacaagacaacctttccatcctccgaaagaatgggtttgacgtcgaattctcttctgctgttgatggtaaccatgatgatgaggagaccgagccgaatttggacgacggaatggaaggggagagttggtatcctggtagagtctcactctgtgctcagcctgttagcaaagaaacagtatttgattttcaaggttcgtcgtctttcattctcatggcctcatctcagaaggatgaaagtagaacacccgattgaatttctgttcttctgcttcaaccctagatctcgaagaacttcttcacttgatacgagagtcgccttcgggcgagatggtccgttgttcaaaagcccgacgaatgtttgcttcgagggcttgtagaaagagtatcatggttgggaaaccattgtcgaagcgacagatgcttaaagtaagtctattttgctgctgtctcatttgctatatattgggttctgactaacgtgactcctcgtctcttgtgaattctaggtattggagaacatgggacgtatcgatcagccatgggtaagccttcctttcgttctcagattcacagaatcccatcttctcgatgccaattaatcttttcctctctcgttgtctagaattgtccacacggaagaccgacaatgcgccatcttattcatcttggtccacccaagaagactcctaagcgaaggttagactgggagactttctctcagaccgatgacatctgaaaggtataactatttgtcaagctcttctaacgacggtcattgagagcgcaacttgatttgggcgcgcatggccactgggtttgatgttgtatgtgaattcgcaacaaacgatgaagcatccatgtaatatatatgtatagaacaagaggacgtcagaaaaggaattaacaaatacaaaacagtctcccctgtcatatcgcttctaaacgcaaaaagcatcctttcagactgcgctgtagtccatcttggtttcgtgcttcttggcgtcttggagcttacgaacagctttcataaagtcctcttggacacagtaatctctctctgtttcgcgagttcaagacgaagccgttgagtaaagagaagaaacaaagactggaagtggaaaacattgatacggaccttctcggatggcaaacataccagcctcggtgcaaacatttcggagatcagctccgttaaatccatccgacagctttcgaaagcgataaaagtatagatccggaagttagacgactggagagacactaaattagcaatactgaaccaaagtacgacatagcttaccttgaccatcgcctcgtagtcgatttcaccttgtttgtttactggtcgagcatgaatctgtggaacaatccaggtcaaaataaacgcggagaatgttgaaaagatttcatcagatgaacaatcaagtatttcgatcttccgttgactaggttctaatcacgaaccttgagaacttccatacgaccttgctcgttaggtaacgggatctcaatcttcctatccagtcgaccgggtcgaagaagagccgggtcaagcgtatccggtcggttggttgccataattaactttgttcggccgagtgaatcgaatccgtccatttggttaaggagctgttcgtattgggatcgtcaaccggaaataagccatcagaaggatttaatcgtgagatgatctgatctaaacagattcaaatgtatcaaaatcaaacgaacctccatcaatgtcctttgaatctctcgatccgcgcttgttccttcagagaatcgtctaccaccaattgcatcaatctcatccatgaagatgatgcacggctcatgttccttggcgtatgcgaacatttctctgatcaatcgggccgattctccaatatacttgtcaacgatctgtatttagtggcgcaaaccgaacaacgaaaaactctaaatcagaccgtctaggttgaagatgatcgatgatcaatgatcaataccaaaagacgaaccgctgaagaaacaactttcaaaaagttggtgttcatcgttgctgccactgctctggctaacaaggtctttcccgttcctggaggtccgtaaagtagtacacctttgggagctttgatgccaactcgctatgttatggaatgaaatcaatgacagtcaagtcgcgtcagaacagatgagtctcatattccctatccgtgcacatatacgtacagtaaacagttctgggttcatcagtggcagctcgatcacctctcttaattctctgacttgatcacccaaccctccgattcctgcgaaagacactcctccagggtcctcaagggacatagagtacacaagtgggtcgacctctcgaggaagaattcgcattatcgttaacgtcgtcatgtctagcgagactcggacacctgcaatcagctgataaaaataacccgatacagacgaattggcgaacagtaagatcagccatgtgcacaagagcggattgaaagatgaaagagatgaatcttatcgacaggaagctgaggtcgatatgacacaacataacgcgggccagaggaggccttcacgatgactgcataattcatttgaggttaggcagagagaagagcgaagtcaggaaccagctactttgagtatacgcgtctatataccagtggtggaatgtctctcaaacagcattttgcttcctttcaggcggaacattcatgataacttcgatggaaaagtggaagcccacagagacatcgaacaagggaaccgagcacaaactactcacatcgttcgtcatctaactttttcagtacctctccgatgatttgtcccacactctggagagccttgatgtcgtcttcgctcttgaggaacgcagcgtccaaatctttgattgagaatcggactatacagacagaaacccgagcgaatgaagtttgtgagctctagctctcaagggaagacaaaatataggatgagatatagaaacatgatggactgaaaagcacgaacgattcttgacattttctgaagtagcgttatgatctttaagtttctactcgtgccgatcaacccagaacgccagaaggtaacaagatacgattttgtccagatcagaaaaccagtcaaacaggagacaaagtcaaaggtcagttattgatgcccactcatatgctattcttgcattcaccgtccgatcaacaaggaaggtcagtaatttcaaaggcttacctgtctgtagagtctcaaggcgacagccttctcgtccgaaacggttcttgcaggtgcagaaggagccaaagaagaggtatcggtcggggcggaatccacttgcataatgtgctcaagctgattctataagttctattgattaagggtaagtgcaagagcgtgctaatgaagagggaaagagtggaaggtataggagatgggatgatctcaaggccacagttcatctggacaggtggagattctttccttctgctggttacgcgtagcccgatcggttacggttactaaccactgtatatttgttgcctatactttctattcagaacaaaaacgtccagagaacttaagagtcaattttgacaaatgcaacgtagtttgacccgaacctgttcatcgagttgaacaaaagcaagtctacaagatcttgaatctgatcttgatcgtttctatccaaggaaaaaagaaagtcgaccgattggatcaggtccttgctggctctaagtttgcaatattcatagatctaggcttcaaccaaaccagaccaacctcctaactcaatattggtaaaatgaacaccctcgctctgactactgctaagaagatggtctttggacctcgaaactacatacatcaatctatcttcacccaattgatccactcatctcttcctgtgaccgccaggagcttcgcccgaggggcgagagacttaagagcttcttcactcagaactaatgcgagtctacaacatgcattggcagacgaaccgatactcgaagatagcgtaaccatcccatcaatatcagcatcagcattctcatcaagcacatcaactcctctgaagagcacggctctcttggatactgatactaatggctctagccgtgtggatcaaacccttttcgtatgttccacactctcgctcatatctctcttttactcactgctcgaactgatggcatcgaatattctgttctgatgtgcttgaacaatgaaaccaaaggtggcaggcatcccgaatgttgcccgcgaacaacacttgactgagtactttgaggacttgggaataattgtgcgagatgtattcgtaccttcggctttcaatcagaatgggcagaagagaaagcacaatcgagggttcggatttgtcgaagtcggtaccgtgaaggaacaccaacagcttataagaatggtaggtcatcatgaactgttcatacaatccattcgtcatggatgggacctgtggtttcagatctaaaatgcctatgtatatcttgaaagtccaaaaacaagaaaatcgaatttgatctgaaggtttgttcttcaattccatggaatcctacctgcgcaccgctcatctgactattgtgttctttcttctcgctctctatggataactacttctttcgaaagcctgctaagtgggatatcgaacgagcccggtcctacggcacaccgtcaccctccatcgcgcccaaaattgaaagcaaaccgaaggattcgaaggcaaggcctgatgataaagcgcgctcaagatcagcaattgagccgcaaggaacggaaaagaaaaaggcgagaagaaggataccatccttctctcgacgttagagtttgtgtcgtaaagatataatgtatgcatgttcttcgtcatataaaacataggacgtgttggaattgaattaaggagaacgcaaggctcgtgtttcgattgaacggaaatatcggctacaaataattgatacaatggctatgaccactcctttcatacaaatcagtgatctcccacctctttaccgaccatcccgtgatcaacgatcccatcaacgcttccaaccttttgatctggcttctgttcctttccaaagtttcctttggcataatcgtctgcgatattgtgatcggtgggctacgttcgataacggtggagccaagatcaggatcataatggatttctagaggttgggggtgaatgctcaagggactgacttgtttattggcagaggggacaactttcttcgtctctgctggctgcctgaagggtgttgtagcggatgatacagacaagaacaacatatgacctgatggtcagtctgtttgttctctctactcaagttagtggcacaaagttacgcactcgactgaagaattggtgaccggcttggtagcaggcgcatcagcggtaaggttggacatggtttctcgatggacagtgtatgagaagagtcagatgttcttaagggagcctaatgacagagatgggaaacgaaagatgagatgatcacagagaatagtcatgttttatatgtagcgcgagtcctggctttcatgcctcgatgatggaatgatgaatatgtgatgatcatgatcattctcatgatgatgatgatgatgatgcgagccaaagtagtccgatcgagaggagccacagtaagtgtagccaaagttgacgggaagagagtacacgtgaccagcggttaaacccaaaatcagtcgggattatgtgccgttcagtcagtctgaaagagaaacatcgtatgcctcccacaatgggatcgtagtccgaagcacgcctctcggttaaggtgataggaaagggaaggcatgaagagaaaaaagcaaagagttcacaaagtccggaactatctgcgtggcttgcttctacagaaccttttcaaactgctcatccgatcaacctatcggccgtataacgagttgaatgtgcaaagcttcgtgccgggagctctcatagactgagaatcttccggtatgtttacccaacgtctcaacttgtagtcaagatttagctgggctcggatattttgatgatggcatggtgtgagtcaggagttgactgtgaaactgcgggtatgatcctgaaacgttcgagccaaacgaggagaagataaatgtaaacagaaaaaggccagtgaaagccaaaacgaaagcaaggatgggaacgaaagcgccatgacatccgaaaaactcaatctgaggcaaaggaattggacagtagaagaagaaggaatcgaagtgttcactagattgtccaggccttgagcgctcaagccactcggtcaacgatacattagactgggtgtttttccgtagaaccccaaaaaacattgccaaataaaaaaagttccacaggcaggtgaatcacatcttacctgcctctttctctcattctctatccatccgttttggttcacttcgttctctcgcactcacatcctgtccattgctctctttgttcttgcttgttcctctgttgactttcaccgtcctttcctaccagtctctctttttctcttttcactttgacttttagcttctgaaaggccttaaaagtaggagttatgtcaacccatcggacgaacaattcgattgataccactgccccctacggctccagtaataacaatctacacgtgagtcctcattaacttgatgtccatggttgttgtcttcctaaaagattgagtgctcaagaatgcctgccctgttcggtgacttgacctctcacacaggaagaggcctacggcggttacgatatgcaacagatggctgagaagaacgctagccgaactagattgactacggccgaaggtgtgtcttagcttctcttctttgctatctttgatcagatgagtaggcccgctcagcggagcgaacgctatcggaaaagacttcgtagactgaaggacagacgatttcagccttggaggagaacaactaatgaccgtgaagacatcggtgactaacgcatatcttcgtgttctcacacgaccgctatcagagactggcgcccctgtcgccaggcatttccagccctcctcgattgacgattcccgatctagtacgcccataggagccgatagtactggtaaatcttctggccgggccaagtttggatcgattccaaactgggatgtctttatgaacaatcccgagttcaacgagtttgacgtccggaacggcggggtcaagaacttggagttcgcagagggcgacgtgggctctaacaagtttacaaagttttactactatgttataaccaagagtatcttctttagatgggcgacgtacatcattccagttctgattgtaagcgcatacttcattctttccttgagtggtcggtatgcgaagtatcctgaagctaaacgagttcactttctgtaccgctctcatccggtggtcagctcctttggatccctggaatcatttggctcaccgctcctaccggctcatccttagaaaatagcgcctacggtttgtattgatcttcattcctgagaagtctgcttatacatacttaatttttaccgaacgtattattgactactatttctttccattttgtgcagtgtggggtgtcaatttgctgtggtggtcaatttggctaactgtggtctgggtaagtccattatatatacacgcggactaccgcatgtctcgtgcgtttccattctcctagtatacttcgtattaattggctttactttctaattgtcgctgcgtcgcatgaccatgctcgggattgcctataggttggatggtgggctgttagcgcgtgtttcatgatccttcctcggatcctgcgagtgactgtcgctgccatcgtggtcagtcttgatcgcctctcaaatggcttacttctcagaagtcgtttcgctcatgtctttctcggttactttgtcttttgcctccacacagggaggtgataagtcctgggtggagatggttcgtgctgtgagacggcctttatccacagtcttttggacgctccttctgtggatcacgttccagcctttgatctcgactcgtcagaaagacggaacctcatcttctagcgcttccgcgttgactttggtgagcataaggtctactctcgtctctatcacactgacgagctattcggtctcatcgcactctttccttcttcttcgaatgttgattgaatcgctcgtaaaaagatctccaaaatcctattcgggatgttcctatgtacttgtgttttggcgggtgaaaaagtcatcgttcagttcattgcttgtatgtgacttcaggtcgaatgcttgtttgcctcgatcctgtgtgaaaacatcctaataaccgtattaactcttccttcagataccttccaccagcaaacctacaaagatcgaacagagtaagctcaggcaacctttcttggtgtctacataaaaacgttattaatcataacacttgtcgaacatttctagccaccaagatttccagatcaaagctttgactatcctctacaagaactcttcggatgtgagtttgggttcggtttttctcttttcgccttgttggtaaactaatcattccaaacatgttggatgttgaacgcgcgtgttaaatagatgggccgatctgatacactcaagaactacgccccgtccaccaagagcaacccagtgttggctcctcagatcgccgttcgaaaggccctcaaaggactccgaaatgccgctgccactacgaccaacgccttgggaaatgtggcgacagagatggttggttcttcggtcttgcaaccaaactctcctcaggctatggtcaccgcctctttgggctccgccaacaagacccgagctgtgagtccagaagaaaccattatttcttccttttctttcaatcgcttcaacagatctggtagctcatgtccttctttgtggttgtcatactacaaaaaagctcgctcgaaggatctattactcgttccgaatgggcaagaccgaggtcactctggctgacatcgctcgacattttccggatcttgacactgccactcgagctttcgagatccttgatgctgacttgaacgggtaagtccgttgtccgcatcaatccgatgggaaatcttcgatcgaagttgccgccgctaacacttatttgaacgttcattttatatagtggagcctctcgggacgagattgagatgagtctcggagagattcacagagagcgactttctttggcatctagcatgcgagatgtcgatggtgctgttcgacgactcgatacgatccttgtctcaatcgtcttcttgatctgtgtgcttatcctcaccgctacaatcgtacgttgatcactttactgccaatcttcttcccatcgaggtgtgcacgccggatgctgagtttatttgtttttctcaatcgcgcaacaaagacgactgcactcacctcgctcgttacctcggctggaactttccttttgggtctttcttggcttattggagctactgcccaagaagtgcttagttcttgcatcttcctcttcatcaagcaccctttcgagtaagtgacatttttgattgctttagtaatttttaaattcagactcctcaatgttgacttattgtcgtgtatctattctcaagtgtgggagacagagtcgatatcgattccatctcttatgttgtttcggagatgaaccttctctcgaccacgttccagcgagtcgatggaaaatgcgtctttttgcccaacaatgtattgaaccaaaaattgatcggtaggtcttttgattcatccctttgtttcataaaatgctgaagatctatcagagagactgatcggatgatatgtttttatagagaacgttcgacgatccggccctacttctgaaacttttgcgtacgtatggatctcctatggccattcaacctcacgttggcgctaactcgtatgactatgacctcggtgatattgtatctctatacagatttgacgtcgctttcaatacgtcgttcgagcatatccaggccctccgagagaaaatgctcaagtttttgaagggagagaaggtaggcacttcagtccactacctgacaggtctgaagcgtattctcatttgtctgatcatctatgacacttgaatttggggttttacgaagagagactttatcccgagcttcgacgtaacaatcgtcgatttccctgatcaggcaaagctccagctcaaggttagtttgtttccgttctgtctcgtcaataaatttaatcatcctgatctatttcgtcgggtttcttgattttgcttcccaggcaaacatctgctacaagtcgaactggcaggtaggttctctttctatatcaaacaaatgtacggagggggatttgatctgatatcggatctctatactttcttattcgatctttatagcaagggcttctcaaagtacaacgacacaataaatgggtatgcgctttgaaagaagcgctcaaggaattgaagatttacggatccgccggagatcccactccggatccagtggtgcctatcgagtagtaagtctcctcgacttcattcagaattcttccacgatgaaaccgcaactcacatattctcccatctgtggtgacaacgcgaatagcactcttgttccttatgaaccaaagcccaccacatctgcctctacctcggataccgcttcaactgtgcctcacagtgcccagtccgaccgaacagccgtcagcccatcgtccaacttacctcatggacagctttacgacccaggatacacgatcgaaccgatcagccaaagatctggcagttctgctcctacgtattcttttgttgaccaaagaaacgtgatcgctgatccggagtcggacgtgtttggagaggtttgtgtcatcctttctttttgactgattatctgatttcgcgcttggaaacgttcggaatcggactgactcctgattctctctattttcgtccttgaaacgtgaacaaacctgtaggagacggcaaatggcgcgggacctgagaccgaaccccccactcgagtcaacacccctgctggtatccgacctgttcggagacgaacaggtgacgtcgaaggacaaatccaagacgaagtcatcgagatgaatcagaatcctaacaaagctcctcggctttgagtaagatctttgtctgcgtttttgtcgttccatctttgctcgactcttgtcattgcatcattagatcttcttcgtcctggactctttttcagtttctttctatctttttcacgtcccgtttgtctactaaagctgttatatcccgtcattcactcttacgaacctctctttactcaactgtcacgccttctttgattcgcttagacgtcccttacgcctttgcgcctctgccattcatctgttgtcatttttggagctttccgccctacctatcattttctctgccttcatctgatgtcccacgagaaaagtcatgccgtctctcgtacctcggctcttcgtcttcttcccccctttatttcttctatataaagatctctttacaaaatgcctctccttttgctctctattttctgcttgtttatcgtcttcaattgcttgctaatcaatgctatccatttcccgatgattgagatctgtcaatgaggagatgggatcgttgttgagaaggctgacaaagttggctggacgcaggatatacattcaaacaatggatgaacaagtctgtctcgaaggagcctctcagtatgcctcatgatatagcgtagaagatcaagtctttatctcaagcccatagaccctacgagcggtctcgcccatgatctctcctgcgctgactggatccaacttcaacttggcaaatacttttagcacaatttcatgccaattcttttcagactcagggacgagcactttcgatctcaacgtcgaggtcggagtcgtctggtcgagtgatgtagtttgaggtgtcagagcgggaaatggatcagagctggcaagaggggaaggagaggaaccaaagatgatgcggtgagagccgaaggagtcgagtgcagggacgaggtatgcagacagaacgcttttaaaccgagccaaatttcgggtcagtatcgttcctcgcaacgaggacaagtggacgatgaggttcagagttgagattcaaacatctcgaaattattgaatacgtccacacgaggacaagaacgtaccttgctacactatcttcatcctcccaccaaggtctcttgccactcgaagattgatattcttccagaatgatggaaggaggcaagaatttaagcaccaagcctgggatcaaagcgagcgcagtgatttgccgggtgtactcttgatagaacggttgatgaacaagcatcgagggtgagatcttggctggtagaggtggggggagtagatttgctgtatgtatccatgtagagaatcatttgaatcagttgagacggttgatcagatacagaattgtaaaggcaagtcattgagccgggatacatacaaagtacgaccgtcgtgcttcctgacgaagacttgacaccgtcgacatcctttgcttcctcctgaccagacgactcgcttttgaaggagagttctctagaaacaaggacgacattgtc

SEQ ID NO: 1585 - DNA, 13254 bp, Xanthophyllomyces dendrorhous
gagtggatggggactgttcggagctgaggagatgaagagactattgttgtaggctgttctcgagattcatttctgttgaactcaagagtaagtaagttcatgatcagtacatttctttgttctttctcatacataacatggtcactaaaaccgaaggatcaaaaacaaacatgctcgacatgtattctcaagatcagaccaagctcctgataactaacctagtgattccaatgaaacctccaaactttcgtcctccaaatgaactgggagcctgacgttgagactgtctatcgagatcaacatgtccatcaatagtgagtttgcttcccttcggctgttgctcttgagcagaagccgatgtagaggtcgaagaggatgagaacatcgacaaggaaagtttgggaggtcttgatcggggtggcatttgtatactttgggctatagagatggagtaatgagatgggggtgttatgagatggttcagcggaacaaccaaatgtcatcattgatgcaacgggtttagatatcgttctcagcctctgaagggttgaatcatcatgctgcttgtgtatataaatatcttgcacgtatgggatctctaggctctggatacccattggaagtctctttctctttcaccgttgtaaaaataggcaagttctgaagacaagtcatcatcatctcattaggtctttctcaaactttatacgagacagccgtgaaccgggggaaagtaacgacaatgaagatgtttgcgatggtggtgttggctgagttggagatgagcgtatcgaatgagacctgggcttatatataatcacgatctgtatcatcaagcgagcatgagagtttcgagatgtcgttagagaccataaccactcggcggtacgacaacagtagagaaggagaataacttacaacgacggcaaagatcatgagtagcagaaacaggatacatttccgcctacccgtttgggactggtatcgtgtagcaatcttcaattcttcgacggcaccctcagtctctctagctacgacttcgatgttgtactcgatactgtccatcatagtaccctgctcgagcaccatatcgcccaaatctcggaacaaatttgcaagctcagtgattgactgggcgattttgcttatttcagcctcccgtcgacgaatcgtcttgtccaatggaggtccggccgtttgagccagaagttgagattgagactaatcacgatcagaaagccggacaaaggaagattctagtggtcagcagagggtgcttaactgtattcaagcaaatggaaacgagtcgtttactgacagcttgtaggtcgtcttctaactcctctattcctcctgctcctgctttactatccccatccaacatgacccctgatgctctcatcagacttgcgttcttcgcggcatgcccttgaagtctctccatgtatgctctctgctttcttctaaatttggcgcttagatcctgcaccttggcagccaaacctctctggacattggatgcagatactagatcagcttttgatgcttcacccgagggctggatttgctttatctgagcttgagcttgtcggaagtcctaagcgagccaaacaaacccagttgagaaacgatgccctgtttgatgaacgctcgggcaaacaagaaatagaaaagagaataatccgacgcactctagtgatggattgagtgaggttctcgatgtcgcgctcctccgaagacctatctgtgaatccaggcaagcagtgcttcgcgtgcatcttgtccagcgttgaagctgtagatcatgtgcaagaatacgtgacagagacgagcagcatatcaacgggatgctacatagaagcatccataaacagaaactaactcttctgtgtgatccgatctaatatggcattgactgaatccgaagtatcaaccctggtcaaacggacacacgacagtcagccttaacgtctgcctgttgatctcagcacatcacagtgatcgatgtctgaacggcctgcaattgagtgtaccggggaaggacgaaccacaccggtgggagccccttttctctttgttttcctttgtagttcgagttcttgttcgtaagaagcccggtctcttcgtccgatccctggtcatcttggtcgtcttgttctatcgggcgaattgatcgctggggcccgtcttgatgatatccgaaagaagaacgtatagagagaaagaagagagttcttgaccgagatatcggtcttcaacagacagacaagcaggcaggctggttagtctctgaccaatttcattacaacacacgcgtacataggagaaacgaacactgaggacgggagtgcggatgatgatgatgatgaagctcctatcacacctccggcgaaggttgcaacggaaggtgcagtgggagatccgaaccgatccatccgagagttccagctgagacgatgcttgtttctctctctgttctgagagcagcggacagaacagatccaaagaacgatgagcgatggtatgtgtatgtgatcgtcactgaacacttactcactcactcacttacttgcttgcttgctgatgatgctgatgtctcatccaaccgccagcttacttaagcacgatgccgagagataacatacacgatcttttctttctctttacccacgaaccatcatgactcctcttgggggactgacgatgacaaggatagattctgttaggaagttctgatccaagaggagccaacttgttggaagcataggcagccgttgggccgaatgtttcaagtctcatgaagttcacccctttcttcttattctatcaattctatccctttgatcaccttgaggattcttttgtctgcctctgtctctttgttccctcgtttctcatcctgatcctttgcagttgggtctgttgaactgaagactgatcaatgagtcctcatcatgtatcttgctgaccatttcttctcccaaaccaccattactgatcactttgctcacacagccatctctcgtccggacgactatgtggactccaaactacacacgtccaactatcagtcctcgtttctcagcgcatagaacgaatacagaggacataccgttcgatcgctcttatgagtataaccacctagatatgcagcccgtggatccgaatgaaaatcccttgaacactcatcttgaaaaatcgcccgcgcatgggacacacgcttcagtcggagaccatcttccaccttacctgaatcctcctgcgctgttggcgctcaatatgctctcgcctcccgtactggggataatcattgctcttgtcacgctcctagttttcaagactcagaaccacagcatggtcacgaacgccaagaaggagatcatggcaggctgtcttgcagcagagaaagcgctgggcacactcgaggccatacccagcttgctcgaggaaaagagtctgaaagcgacagcgaaagcggttcaagccagcgtcagaggggttggcaaagggctcgtcatgatgtgagccagtctttttctgtactgtttcgtatgatcatcagtctctgttctcgatctgatagattggtcgtcacttttgatttagtataacagtattggaagctgtgatcactttcctgatagacacgttcaggtctacctatctgtgctgtttagagctcgtcgtgttcggaggtctagccttgatcatgtttgccgtctcggaggtcagtagactttgcatatcagatcctcagcagctcgagcagatacttaatacctataccctacaaccaatagatatccgacgctgtgaaatctgccttgaatactattcggctcttgatacaatcccaagtaaccgcgttcaacactgtgactcaagcagctgtaaaaagcatcaattttgtcaccaaacttgttgtacgtggtcatttgttaacttttttttttcaagcatttaaatgactaacgttgagttctactcatgttgttttatatctggcaggatgtgaccctaaacgtaaccgaaatttctataccggcgctatcccagttggagaatgtcacaattggaaccactctagaggccgaactctataaactcaatagctctttgccaactttggacgacataagaactaaattggatgcgttgttagtttcctttgttctttgacctgagcgaaattcttctccgactcgtgagcacttagatttctcgagtcttctctgatactctagtatcgaccagccgtttgacacaatgatcctcaagatcaatacgaccacgtctaattatacgtttattccgtcttcccggacggctaacgtgacgtctcttgctgtctcgtccgcgaattcttctgccgatctctgtaccggattggatctgacattcatcgacgatctcggacaggacctggataaaattactcaatggggtgtgggtattttggctgctcttgggtaacaaacgctttgtcattttctcgatctttgcgtgtcaagagatgctcatgttcccttctctcgtacaccccagcgtgatcttgatagctgtcctcctgtatcttgaacgtcttcggtacaagtctatgtcagaacgaattgatctcttcaaccaatctagaagtacccttgagaaagggaaactatacaccgacgaagacttgatggaactcatacaccttagtcaaaacggaatcgttactgtgtggacttacaaaggattggagaagctgagaaagctgggagagcgcaaccaaagaacaagcaagtggtttggtaagttgatcgatttgctttgtacatatagatatgtttatttcatatctcgttctataaacttactgtatcgttctgtatatctcggaaaaaaaagtggcgctcatcacccatccacttgcgttgatgccactcgcaatggggatcatcagtctcctctccattcaagctcaaatcgcagccatcgatgccattagcaggtcagccgaagagaccgcgaatgactctatagattctatggcaaattcgatgacctcaaaactgaacgctagactggcggagagaggcttaatattcgcgaatgatatcaatgaggatattgcgcaggttcagacgttcatggatgacgagctttttggaacttgggttaacaccacaacggttgtcctcaagtgagtaaattttccttgatcatcaagtagacccatatacgctaaaatcatgctgatgttgttttctctctcttgggcgtctcccatcatagcgagacacttgtagagttctatgctctcgttggcgaggctgtcaatgtcacctttggttccactatcctctccggaccgataaataattttctatattgcatcgtaggatccaaagtcgaaagtctcgagaaagcgctaacatggatcaacgagaacgcacatttctccatatccacgatagaccctgatctgtttgctatatcgaacgcgtaaaattaaacttcactccctaccttatcgtcagtcgctgtttctaatatggtgtgatcctttactttccatgacatagatcttcagatgctctagttcgtcctatcgctactgcagcgctagggtcttccgatgatccttctgatcctggagttgtccaacgcatgatttcgtcgtataaaaagtctcttgagacatctcggattcttcctttcgttttcattggcctttgggtgatcgtcttccttggtggtctgttgactatctggtggacagcacagctggaacttcgagaacaagaacgaacatatcggaccgaaaaacttccttcaactcgacatttttatagtgccaagagagcggtgaacgaatggctcggccggcgccacgacggtagagatgaggaaagagagagtttcgtattgtctgcctcacctgtacggaaaatcaaaattttacgggaagcgttccagtcttcccctgtcaaaatgagtttcacccggcgcaactcaatcaatatcgaagaagaagatggtctcaaagatggatctcttcctcgacctcttcctcaaattcctacatcccaatcgcgacagaactcgcacttcgacctagaaggaggtcagccacgagattcggcctatgcttgggtttccaggtccacagggaacgcaatcgtagatggaagagccagtgctggtccgtccaagagaaggtttcaggaaaacactaggagtcttcaaacgatagaagaatcaaaggatcctgttgaggagaatgattctcttcgcctgacgttgcatccggatcattctctgctctctcctcccgcatcttcactaccaaatgctcgcctgatggccaatgtcgtggtttctcctggagagatctacccatttcagtactcaggtttcctttcagctcctcatgctcgatatggtacggccatgacaccaacttgtgcaccagccaccaaaccgagcgcactggaatcgcggacgaacagactatcgagattgacttcgttcgtgccagttggttcgagagcaggggcgcattcgaactcgagtcgttccaataacatagaggacccattccggacacctttcgatgatctggatgagcaatcaacaccttcccgcacatttcattaccacccttaatttcctgtcttcggagtctatcaagtgattgttatagcattcgtaacctcttatatgtgattaaagatacgttcatctcgctgtgaatagtacttcttgtatcttgtatcttgtattctgtatggttaatatgaaggaaccgttctcaacatgcctccggttgcattagcactgtccaatgaacataagtctagaggaagctcaccgacgagttcgctatatatcttcgctgaggtcggcgatgagcgcgtctaagtagttgtcaggcttatgtcattgggattttgaatatttggccacataattttctttacccgactgaagacaaccaacagaccatcacacgccaaatcattctcattctcttctcttcttccagcatcgttcggtggttctttcgtgccagtcatgggtgtctttagctggttccagaaagtaggttttcgtctatgtgttgaccagatggctttcgattatatttaaagacgatttctcttctcgtttcccgttcaacgcgtgctcttttgccgctttttttttagaagccggagctcgactacgagaccttgctccagactctgtcccaatccatccaggacaaacagcagcatctgtccgagatcaagctcagagagcgtcgttcgacccttctggttaccttgtacctcattggcttctggattctctacgcgttgctctggtggatcgactatctccctcttgggttgatgggcttcaacagtcaaccggatgagtgggagtcggatgacgaacgaggtttggttgagtcgtatggcgggatcatcatccttgctcttcccgcattcatagggcctatcgtgtatgtttctttctaggtttcctcgtactgtgtgatgtattagctgaggaaagttgacaatcaaacactttgttgcaaacgctcacctgtgtcgaatatgatagtatcatattcataagacgaactgtgaaagcctggtacacccggcaggagctatctgaaggtaagggaaaccaaatacgatccatcagtctcatcagcgtgttgattgactaatcgaatgtcttcttttttttttggtacttctccgaaattcttgtagaaaagcaacttcgtgatctacgagcaagacaaagaacgacaattgaagagatcaagaagaaaacaaactattactccactcgaaaccttctcgaaagatacgacgaagctccttcgcctactgccgccaagctacaacaacaacaacagcaggccaaccttcgcaaacgaggcgcgtttcaacctcctgttgatcctcgattacaaccttcgacgcctggatctccttcacctaattctataaaacccaacacaccctcggccgatctcatcggtacacccatcaacagaatgaaccctcagacacctctttccgccattggcggacctcatatgtcgtctgctctgtttgcgtctggaggaatgcaaccagtcacccctccgacaccgcctcgaaagacattgttcgatagagcggcggattatatattgggggacgaagctggtggatcgaagggtgatatgggtaagtttgcgctagtctgcggcaagtgcttcacgtggaacggcctagttgaggaagctcggtggggtgatatgcgtacgttaggtctctttcctatcccaagtactaatgataagcgataatacatccgcataccgttttagcctgaatttataattgcttttcatcattcgtttgaacttgctttatctatattcagaatacgtctgcccgaagtgtggcttcttcaatccctctcctaattcactttctaaaaaggatagcaaccccttgaatgcttctttacccgtaccgcccatgactcgaacgaggtctacgtcacctctggccgaggagcttaaatcgggaccgacgacaccacctgggaagacgaatgcgggaaagacaagaaagggaaaaggaaagaacgagaagttggagactacgaaggatctgtagccgggcataggggtttcgttctcaccaggcagctcattctcaattcttttgaacgacaaaaacgatacaatgaaccttgactgatttatgttacggttaagggctctcgctatcccaccagagtcgaaagttgatttcaaaaagtatgagaaatttggaaataaaaagattgagatcattccatatctacatctccgttcgacacctttgccgagcgcaactcattcacctctacttcttcctctcctacgccctccaacagtctagcgagttcatcatctgccccgcctccgaagaaaagtccaccatccatctcactcaaagcaaaatccaagacaaagctctcctgcaccattcgctcggctctgtcgaaatacctctcggtatagggtaccaaacccgcaatcatctctcccagatcaagcgtgactttcggtccgaccgtcggtttcttagtcttggcaggcttcttatcatcttcatcctcgtcctcgtcattaggttggttagcagtagcagctgctagagcagtagcagtttgtgcggaagccttggagaacgattggacgatgtcgtccataggtcgaagtctaaagatcgcatgaagaaccgtttgtgcgacaggtgatgtctttgctctagcgttccaatccctaatgtgtcctaaaagcttgacgagttcgagaggagggagagttttgaggacttgatcgacagcggctgaaccagtgatactgagtgcatctgaactctgcatcgatgtgaaggaggacgaggaagaagtaagaagggaagcagtaggaggcgctgggggtcgggaggatcggacggtagagaagagcttgaagagtctaccgggttgagacatcgacaaagcgaggaggattgcattcttgtagtctttcaaagcgacataattgtggaagttctgctcgctatttgcgataattcaaaaagaaacagagcaattgattgagtgactgtctcatcgacagatccgcttcgagagcttgagtttttgctacttacttgacgatttccttctccttggcctgaatcttctcttcctcatcggcctttgtgcagtccgtccagaacgttacgaccgaatcggccgctccagaaacaattgtgctttcgtcctcactcacagcgagcgcccagaccttatcctcatggttgtcgaacgagctgacgcattcttcgtctttcacgttccacagcttgacaagaccgtctgaggaggaagaaacgagctgttgaccttgagacaagaagtcaactcggagcacagagtttgagtggccctcaaatgtctgtcggaacaatcaagaacaaataatgatagattcaacagaacgcactttagatctggaaaggaaaaggagagaaccaaagacagaccttcaaacacgtataatcgtccagactccaaattctgaccgtcttgtctccacttccagtagccagaaccctgtccgttctgctaaacctcacactccagactcctcttttgtgtcccttacatgttccgacctgatgaactccacctgtggctttagcgtctgttcccttcttgggcgcagcatattccacctggaagatcttgacagtcttgtcctgcgaaccagaagcaagcaatcgatcgttaggcgcgagatcaagtgagttgatatccttgtcgtgaatcttttgagtcaggatcgatcgaggtttgtagacctcgcccgatgattcaggtgtcgaagaggaggaaccatgaatggatgtgtcgagagcagagagatcccacatcttgatcgttcgatcttgcgaagcggtgaagaggaactttgcttttcctgacgagtcagtcgcttgatctgaaggctttcgagagaacgcgactgctccaatactttctgcatgtccttcacatacggctacgcatctccattcaccttcgtcattacctccagtggcagacgacggggaagggacccatgcccagattcgagcagttcgatctttgcttccactgaccaaccactgaccatccttggacttgtctaggcaaaggaccatgtccgagtgaccggcgagaagtcgagcgtcgaacgtcttggtggaataaactcggatgagagaagagttggtggccaacgcaaggtgggtatcccgttcagcaggattaggggaaaggaagagggaatcaatgatctcgtcattgaagccgatgagctgacgagtgattcgagaggtggagagagagtggaagagaatattttggtctgagtgaacagagatgagagcagatagagtggagttaaatctgatggccatacagaataaggcaggagaagttagattatcgtatgaagctcccgcgtaaggctcaattcgtaggagagaaataaccccaaatgtcaacttacagcacgtcaacaatgcctcgctgttctccctcttcagcctcgattgacccgtccaccaaatctactccctccgcacccttcaagactccaacttccgttcccatctgtgcatcccagagtttgacgacgcccttttcacctgcggtccagcaaatcaacttgtcgccgactggtccgttcaatcctttgacgattgtgtcctccgagatgactccgacagactctatggattccaatacggtgatagttctgaccaactgaacgtcaagtgcctttccttttcccttcttcgcagcggatcctttcataaagagacgttcccaaccgtcgtctgcgcctccccatagatcccaaacgaggacaaccttgtctcgtccaccgctaaccaaccatcgtccgtctggactaacgcccagtccacgaacaacgcttacgtggccgtctagcacggctctcggtctgcctccgttggaagaagactcactcaagtcaaacactctgacttttgtgtctccacaacctgtgataagctccattcgtctgccctttgccggcccggatcggggaatattgaaggcgagcgcagagaccggtccaccgtgggaacggaagagatgagtgacgtatcctccagtgaggtcccagaccttgacaattccgtcagcagaaccggaagcgagaagtgtcgacgttgggtccatggcggatacaagaataggagaagggtgggatcgagcggtttgtcgaagaaggggaagggagggaggaagatgaggaaggtgagcaggcggtggagtgaacggttgattcagatcgtacagccgtaaggtaagtgaacgagtaaagacggcaagtataccagttcgggagatagacattgaagtgatgtccgtggtgtcctaaggatgcaaggcaagaatcaagcaggtcagcttcctaaatatcaggaagggatcaaacagaaatacgaaaagaggcagagacgaacaccttgaactcgagcaagtttctgtccagactcgacctcggtgagaagaatgtcctctccggtcgtactgatcatccgaagtccatcggcggtgagaaggacaggaccttgagtatgcaatggggatatgagccgacttgatcgatagctagagaaggccgtggattgacgaagaccaccatggttgtttagcgtctaacattagcgctcgggcccagaaaactagagtgaatccaacaagtcatgacctcacctcgtcttgaaccctggcttggacagtggtctggtgtccatgatgctgagtgatatctagacgtgcaagtgtagctgtatcgtgtcttgttcaaaggtcaattggtatgagaggagatttttttggtaagttgcattcgaaaaacgtaagagtttatggtttagctaaggttttcgaatattataaattaagcttgcacgtgacttgaagcttacccacatatatcgcactaccggcccgatctaccgatctatctatcctgaacgggaggacgtcgaggatgccaaaagagaaagcttcctcaactaacacccagaaggttgagaagacattgcaagaacacgaacccactcatcctaaatcttacaagctaacttaaccactttgaagaggggcagaagaaagacaggagcgaactagggaaaggagcgaaagaaacgtaatcgttcgtacaatgatattctcatcttactttctcttgtcggaccggactcggaagactcctcatatattctaatgtgttgaattttgcatacccttctattttctgatgaaggtgtctatcaagccttcctaaacctaggtatctctcgtttcgtgatcacctccagttagaatcctcccaagaggttcatctacaaagacctctgatggatcatcctcccacccaagaaagtagctttcacatagctgccggccacttggacttcaacaggccgacagaccccgaaacacaggtgaactatgttcttcttgtggtcttgcttctagtcgatcgcgcttcttaagcttcttacgtgcactgactataatatacctgcttgatcaggccgagagagacaaagctaaaagagcttaccgtgcatgcacaaattgcagggtctgtcgtcatcttctctgttcaatatctcaatcgatcgccagacaagctgagtcataagtctgggt

SEQ ID NO: 1586 - DNA, 17598 bp, Xanthophyllomyces dendrorhous
tcataagtctgggtttattttcgtagactcgaaaggcgagatgtgacctgggagatgtcaactatccaaaggacccgccttgtgccagatgcaaacgtgaatctgtatgttcatcttgcttcgattattcagtgcacatgacgtttcgtacactcgttgcattcggatcgtgtcgtgcgctgaaatttgatccatcctttggttgcgattgtgctgctctaatctctcatagaaagaatgcacatttcttccatctcggcgaggcgggaatctgacaaccaaagctagggcgaagtccttcggctcacatcgaccatcacctcccatgaaccctgttgaaccatcaggattggcttcgacatctcatcttccacagatgagtctctcatccacaaccgaatccccttcagcgaaaagacagagacgtatatcgttctcctcatccgactcgatcaaccggccagaagagtccaggtctcccaccatcaaccctatacatccatccacttctatttttccagcgtactcgaaatctacatcaatctctgttcatccctccctcaatgagtacgcatatccacaactcagatctcctgcgtcatcgacaaacttcccactaggtttcgaatctcagtattctatgatgagttcacatgaatctcctaggaatcaacaccagggacgagcccacccagccatccggtcttcctcgactgagacactcaatacagttagctcaaactcgggaatgggctcagtttacggacccaacgctccaccacgtcagccttcgtatactcgggtccccaacacaggtacttcccaaacatctccttcatcatctggttactccagacctccgtcagatcggccagatatgtcgagcataccatcacctcagcctcgatatctacaatcctcacgctcgatctatgcacccgtactttccccctcgcaatcaaccttacagccacatggcggtcatgatcgaacacactcaatatcctcttcttcggccgacatgcaacccagtgctagtgttatgggtgaagctcgaacggatcaagagaatttcattaccggaggaatggccaacgaggttgatgccttgagtctgctcgctagaacagcgactggaaagcctacttcttccaaatctgaacctggaaccgcttcagaaggcaaggacagagaaggcttattgaacactaccggttcagaatccggaagaggaattgaacaagatagatcagcaaaaagggaacgagatgatcacctgggaggtcagagaggtgaggaaaacctggccgacgatgaatttgtctgtgatttagtcaagagaggatgcctcgactgggagtcgatcaaagtatacgtagatcaattcttcagcagacatcatcagatatttgtaagtcactttccaatgtgcgacgtctctcaatcgtatggtgccgatgctcagttcgaaggaaatttaacgatgctttccaatcaaaagccaatggtaccttcctcgaggattccgaaaacgagctcccaacttcgagtttttgcaaaagaagagaagcaactacttgcgaccgtggtttgtatagcgtctagatacgatacgtcacgtccagaaatccacagactcgtatgggaggttatatctgtgagtgattctcccatgtgaatgactgtttatctacgtgaacaccttgaggtagtaattgatgccttggaaaccaccataggaatacattgtcgacaccgtcatctacggccgggacgcttgtgttggattcgtcgaaagttggtctttctttccagagttttgatctgagtgtatcgcgcgccgacgttttgcgtacagaagagttcagtgttgacggatttacttcttttgaatgcgcgcttatcttaaggtatgctcctcctctcggagaatgtaccaaggccaagcatagggaaagatgaccaaggctcaaaacagtgggatgaatctagttcgtctgatgctatctctcttctttctacacgtcttttattcttttgggtttgacttgaaacatcaatatctggaaagacgtaaactgatttctttgtgatgaacaatcatcagctcaaagttggtatctagtcggacatgccgtcaggtcagcacctctcaacaagccccttccaaatcccgccacttgccctgaagtctatctaatcttgaacttccaacaatccctgcacaatagaactggatatctgttaggtttggatcaagtaagtctcatgttctcgatcatctgaagccgaggctggtagctatcttatctctaactttcatatatgtctacggttctatctaacgctagaaaacaatgaacatctcaacaaccgaggattcgactcctagcatagagagagacagactagcatggacatgtgcgtttccattttcctgttcgcgatctgtgtttataccaaacgccttttcgtcgtcttgttgacttctgatattcttcaatgtgcatgactcgatatcagattgttacattttcgataggcatatttctcttcgtataggaaaggcgttttggtctcgtgggcctggtctttgcgtatggtcctgattgttgtttcactctaagttggctctttgttccatcgaaagatgcgctgatgcgtgctattctataattttctgcagttcaccgaaaatatcgcttcgatcaactttccgtctcttcgaccaatacctagtgaacaggatgattttgcgagtgtcgttcaggccttagtggagctgacgcagacgatgacggcagcacacgacgtcctgtagtgcgtttgtcatcttgtttacagtcctttctagtgcgttcagatatactcagtgtctgatatgtttctgactggcatttatagtccgtcgcacgaccgaacgatgtcgttagtcagagctggagaatagtaagtcggtcacagtttcttttgcaggagccaagaataagtttgcctgatgatcttttttccatcctttagttacaagtacctagacgaggtgagttgagagtctcactggctctcgaatctgaagctataccttgaactaatctcgttcgaaatacagttctctcgatctataaatgcctttcatagcgtctggttgcatgttaagttcagcacttttcgtgagtctttattcctgatcagaagctttggcagcaacgctgatcttctcagtttgttttccttgctcatccgctgtacttcggaagcatgcgacgagattgtgtggtgcacgtttcattacattcggctatacatatacgtatttgcctttcaaggtgcctatttattctctgttaataagctatcggccctaagttaaccacaaaacgtctactcagcgcacgttcagagagccgtttccaagggaggagcagttcatttcggaccagacggtaacattttcccccgaggaccattggcaagccctgattcaaaattcatcatggagtctatcgatgctgctagacaactcttgatgttatgtaccgagcgcgtaagtcgtccatctgcgtatcgatgtcctgtaccgtaactttcagaggcaatcaattgatgttgagacaacgggattgcttcagcttcatccgggaggggctcttccattcttgcctgctaggttctttctgtggttcacatatgcaagcgtgttcttgctgaaggcgatatactcgaatgctgtaagtagccactgatcatcccaacatgggatacgaactttcgcgcatatcagagatacagatggtgcgtcgactgaccgctttcttaccttgacttctaacagatccttcggtcggatacgagaaacatcctcgagctcattcaaaaagttatattttgtctagcaaactcaagtcctgacaaatcacacttgggcattaggtgggtttcaatcttttcctccgaccctcgattttttgcatgactgatttgagctttcggtttatgtgttttctcaactcaggcacgctcttctactccgaacagtagcaaagaaacttcgacagtctttctctgatgaatcttgggtagctcatgtgaatttcattttctcttttgtttttctttctttctacgagtgtggggcgctggttctgacgtattcatctcctctgagccatcgcttgtatgtttgttcgcggtttagacgggcacggctacccctctcttcgccgagctacccgatcgattccgttctgctggaaggagcaaccgatctccgcccatctctacttccggggcagatggaccttcctcttttgttttcaactcatcgaatacaccatcaacttatttagctgacccttcaatgtcgaccactcaatacgctgaattctcatctgcgactcctggaatgtctgcttcaggaatggcctttgaatcgaaagcgagaggaacggcatgggatttcacgcatatgagtgaagagggaaatggaagtatatatgggtctgaagtcaactttggaatggaagagctggcatatctctcacagttgtcggatcttgagtaagcgtttgccctttcatttctcttgtgtcgtaaaaaaatctgactacaagatcttggattgttcatagtttgtcgtccgaaatgttttggacccagttggttcctatgcagcagcctgaaggaagtggaataccatttcgttgatcgtatgaccttgtccaagaacagacctttgtgggccttagatgtatgccatcgtgtaaagcagagataaccagtggtataatataatttaaaggtctgaaatacaattgacgtttgactcaaaatgggccaagcgagagaagacctattatcgcctctggtaacgaccatccgccctcctgcagacatgcccaaacagacagtcagctctcttgtcgttgacaaatcagcacaaagtcactcacgaggcttctgcttcaatccgcgcacgttttgcctgagctaaccgttcggcctcttggttttgagcggcgatctctggggagcttggaaatccgatgttcctacgaaggggtagttttgatcaaaaagaaatcagcagatgtatttacagaattagatgttgatgatcagaatcggagtcggaatgtaccaataacccggtggggtaggcggttcttcccaatcagctcgatgtctcgaattttgttgctttctcatctgtacagattcccgctttagcctctcagttctctcttctaaggattctcctctctggccaaatttgtatgtatctgaagattcccttgtctctttagagctggatgtcggagccggacttttccatcgagggccttgaggaccaggtggtagcgcgcctaccgcttcatagtactaaatcatatagtagagatcagataaagcatgaggtcttagcttagtttccatggataggaacagatacaattaaatgggaataacatacgccggaacaacattcgcaatccgtcgcatgaagttgtttacgttcgtccttcttacgaacaaccctgttgaaagctatatgcatatggatgtcatgagcaagcgtgcaggtttattgttatcgtaataatcttgaagaaaacttaagaaagagacaaaccataattgacgccttgattgttatctttgtttatctcaaactcctcattgatagttttcgatggcgtactggatgtcgagtcagaatggtaaaggtcagtcatttcttgtggctcgagggaagagaaggcagaagattagaagtgcgacttacgtagaggaatcggccaaggcatacctcccgttacctttgaagccggcgaagagagcagtcacttccttcgggttcttgtttctcaatgatttcaagaatatcctcttttcgtcgggtgtcattccagccgtaggatctaccggacgactcttatatgtcgtatcgatccagtcgctacccgaatcatcagattgtcgaaagacggaacccgagcgggagactgcttcagtaatttcaggtcccgccttcgtagaagctttgccctctgagtctgatgaatagtccactgttcgagatatatcaggattgggtacatcggcctctaatggctgataacagatctcgggcaactcatctacatctagttcatttttgaccgtgactctgtgttgttcatgctctagttgattcggtgatttccttttccggctctgatggtcccaattatcagcccggtttgaaggagtagaggtcacgatcatctgatcagttgatgataatgatctcttgacctggttggcacctctgtctagaccagtcagatgtacgggctgaacattctggtcatgaagaacaggctgaagtgtaggcttccccagccattttgtagtgcatgctgaagaaggaacacctgtatcttttgacgtgtcaacgagtggcattgatgtgcgtttggattctttcgttccgatcgaagtgatattaggcctcgagtgaatacctttctccggatgcacatcagacatatgatctccagcgctctgcctcactttgtgacgaacggtgtcaggggtgagatacggagtaatccttttccgatcatgaatggctgccgacacaaatgtcccaggatggatttgtttcgagtgaaatacatgaatttctgaaagacctgagtgctgggccgatgattctgaaggtttgttctgctgtggtgatttcctgaacgtgagtgaaggagtatctaggagctcctttttcactgctgatgttggtaaaagatttggtgtgacggttgccgatgatattaaagatgggggagagtggttgtgtgtgaaggacattggtgtattgaccttaggagcgctcgacgtctttgttgcaacgccaaatttgcttgaaaaggaatcttgactcgtgcccttggccttccttaaaaaacccgccgatgcgccgttgtctgcttgcaccttcactacttctcttcttttacctttcacgtcagcgccctctttcattgccaaacggttccttcctctagatttctccgcagcccgaaattttgtgagatcttgaatgtacctcgtcgcaaaactcgtccattcttgctttcttgatctatacttttcctgaagttgttcatgttgtgcctgaagagagcgataagaagcttgaagcgagatatactctgaagagagagtaacaggtgatgtattgtttgatgaagaggacaatagaggaacctcggcagtggagacaggtttcggaagatcagaccggccagggctggttcttttttttgggggggggatccgaaaaagaaccgagagaaaggtatgagcatgcatgcacgcaagctaatcatctggtatgaagtataaattttccgacacacatcaacaaaaaggagcggagagactcacgcctgatattctagcccacctgactgttgatctgatttactcctctctgcttcaaaggttctgccgtggtcttctatagttctaatctcactctccaaggtatcaaccctcttgaccatcgatgcttccctctctcgccattgatctttttcactgatcaattccaataaggcgtctacatgacgggtggagtccatcaacctcttctggtattttctccgaagtgcgatttcggtttcaagttgagtctgaagctgattcaacatatcgatactaggggacgatgaagtggaggtaaaagctgtagagtcgactggacggtttacactattctcgagggacaatacatgattctgcacagtctctagttgattttgaagattgtccttctgagcaatgcatctctgaagcttgtcttctttcagttttagctgtgtatgaccgaccgagacgtcaaaagggacatatgtgcattaattgacggaaaggactatatgcgcttgacaggactcgaacttacctcttgctttatgactatcacaagacgccacatcaagccagtcaccatcatttttcgaatgaaatcagaattggatcacggaacaacaagtgaacctatttgattcttcgtgatcaggttgtaaggaagttgagacataccggcatactccgattcccacgtctctatcaccccttccaatacaccgacatgatcggcagcagcttgttgtctagcctttaatagattttctatcagagacccttccatagttcatgagagatctgacaaacaagccagtagttcttttagtagttggttactagaaccatttagtgagagagataaagaaggtgggggtcgattgattgacatgtcaggaaaggacaagacagaaatcggagaggaatgcggtaaatggacggaacgcgtctttgcctgatttcttgacgcgttcaaactcgctagcccatacacccactaaccgccatcgactcgcgttgactagcttacatggcagactttacagatacacatcctcggatccctcttgactccgaacaaaactggcagaaaatacaagacacaatcacacagagtctgttacagacaatcgagtccaaattcgcctcgggcgagctcgatccaggattgaaggcatatgtaaccgagaggacgatgcaggtttgtctgttccgatcgtactacaatgacatgacaaaaagacttccagagagtctatcactgattggactgctatataacacatgcttattgaatcgatgatcgtttcttccagtggaaagaccagctggtacataatgcaattcctaacctgcgtttgaatggtatgccttatgaagagtatttggagagtccagagagtatgtcctgctttccatttgtacagctatacatccatccatccgcaatccgcctcgaatatcaaccgttgacgcagagttaattatagatacggagccctttgatgagtcgctcgacaggaagatccgatcccttgcagccgagaaggagcttatacaggttcaagtcgccgaacgacgggcaaaaacaccaaaagctattcgagcattaatggaagatttagtcagacggcagattgcaggagagtgggtccctctggaagaagaccaggcgatggatggagttgaggaaaataaaggtcagtcgtcatctactgagtcttgagtcttattttttttcttcttgaatctagtggtgaaggcgagaggctatattgactgggacatctgtttcggctccttctagatctgatcctcaacaaggaagaaatcgttcgaacatttgattctgcattacacaccctctcgtcaatcaataaggtcggtttttctagttcaatctagctgagtgtttgattgtgtttgtcagagactaatttcggttcgacatgcttactgttctgtgattccgaaactcgtagaacttacctgtatgtcccttgtataactccatactccctagcaaactcgtcatttgccaaacattgacttatttatcgtggttgtttttatccaactttagaatcaactttctcgtacagcgcaagcccaacaagtagcggaagacatggccctcctcggtccatgatcatatcatgtttctcaacagaattctttatttgtgtaatacatataccccatatatataccccgtttattttcctaagctctatgttgcatcgtgttttagtgatactcgttgttgcgctacgtcatgttgaaagactgatcgaagccccctgctaatttgtttttatgtggagtcgcctcaacatattcttcttattcgacaaacaaacagaccactcaaccagtccttctcctttccttcaaccaactttcccgagaaccgaagggctttgccttccaaccagttgacatctggctcctcacaaggcatctcctctcttcccggtacatcctctaactgtgccttcacgcgctctccttccttattaagttcatccaggaatcgctggactatgacctcgccctggttgactgaaagagagcacgttgaatatacgagcacgccatttggtttgagtagtcgaaatccgtttcgaagaaggtttaactgaaggtcgggaagggttgacgaaggagacgcggtggacagagaggctagaagagcagaggggaaggcaaacgtcggctggccattaggagaagacggagacgggggttcgattgtgatgtacttcaggatatgcgctatcgacccatcgtgtgtgcctggagaatgacgatgatatgagaagactcaaagtgaggaaactttggccgcgatctaacaagaagaaggagagacgtacattccgcgtcgaccagcaccttgtcatagggaacaaacaccgacgtgtcgatctgaccaacttcgatgcgccctcttttgaaagtttgaggaatcagatatcccttcgtcctgacttctaccttatcctcatcccaaaccggtcctctttcccatccggcccacgtctcatcctccttttcatctctgaccctctcagcatctactcctagtccaaactccttgcctctccagtaaacatttcctcgtgcgactcctatatcgaaagctctcccatccgcaaggaacaacctcgtttttgatccgtttcctagttttccaagtacgcttttggtgatccccaaacgagacgccgacacgtccacgcctgtaactgttcctcgacctagtctgactatctccgcacacaacgaaagtttcccgccaggcgcgcaacataggtctagcacgtggtcgtccggatcaagagagagcgcatggaccgcgacggccgaaccggcatcgagcgcttggacccgaccttgtttatataactcacaaggggccattctgaccgatccaggcagcctatagaactcaagctggggactgggtagccagctgataggtgtcaagtcttctggtgggatattaagcgcggttgatatttggagaggtgaaggacgggaatgggtagggtggaaagtcggatggatgaaccgtgatgggagggaaggctttgagctaggcgtcggacgattggcgagggcatatgtgaggagcgatgtataagtcgaagtgggaagtccatttgatcgtagaaaggagataaattcggctggaagtgttggaagcgacctattttgaatttggcaatgttctgagtctctcgacggtcgttgcgagaagtttaagagaacagattgagaagcacagggaagacgtacgggagagatgactttggactggctgcccgagcgctagagatcgccgatgtcatcctggtaagagttctattgagaatcaaaatggttcttgtattgcaagaaagcaaccagaacctcctactagttgattgtatgccgaggtcaactcaaaagaatataccaaattgatgtatagcgcttaatggagcggttagggttatgttgaacttgagataacatacataacatacatgatgtagataaatcatatatgtaaatattaattaaggcctgtgacgtatactcccgattatttctacaagctgaaacattatggcatgtgtgttaataaggagacaaccctgaaaacttcatagacgatcgttcacgaatctgcaaaagcgttggtcatcatggctacccgtgctctcaatacagcccagaaagttcggtcgaccataccgccacatgcttcaaccccgcctcctgttcgaccaacaacgcatatcaaccatatcgtttgctttggcctgggaaacttgacgcatccgagaacccggcattcgtctgtataatgtctatatcgtatacttgtattgaggtcgtacaactgatctgagcttcagtttttgtgctaatccttagcttaggacatgtgattgtcgactcattccttgatcgtctagggctcggaatatggaagaaatcggccaatctgaaaagtatgatagcagaaggaagtctccctttaccagatcatgtcgatgccgcttctgggcactttgactcggtcaaattgacgttggtaaaaaacagtgcgtgaatatgatcacctatctctcatcctgaccgcctgtctcctcttcgttgtgttcatccgttctgaaggaatgttgtttatcggcgccctctttctagtcccaccgatgaaccttgcaggtcaatctcttcagccgtttctcaggcaaaatcctatcaatcggtccacactctatttcttcttatatgaccatcttgatgcagaagaagggaagattcaaattagaagaggaggttcgtgtggcggacaaaaaggaatgaagagctgtttaggtgtgttgggcaagcacgataaagaaacatatcagatacgggttgggatcgggaagccctcttcagtgcgtatgaatcatgatcgttgcttgatgttttgaccgacagagacaagaggtgagctaacacgtttgattgttgattaactcagaccgacttcacagccagctacgttctctcgcgctgcactgccccccaactgtcatattttcgaccggatggtgaaggaacgatatccatctggaactccattctcgaagcggcctatccatctccaggttccgacaagatagtttctgtaggaaagaagaaagaagatatgttacaggcctcggcggccaaaaagctcaggaaggaagccaaggcgcaaaaggatgcagagagaagaaaggctagggaagccgaagccacgggcgagagttatagcggtagtgagggagagcagcttatggatcgatcgaaaagctagcgaatatagttcttttcaaaatagatgaacacacaccgagtgtctgttcgtgacagagcggagaaccaacgaaggaacttcagaggagtgatcgagcatcttgtgtgcttcaaggctcaatttggtcttatcaaattcttcatattttcaagcgcaacattccctataggatcttgagtagctcatagaaggacacatgatggaacaccagatttcatacacgacgtcagaacacaacgtccagcatcagcagagcggatacaatctacagtgaacgttcattaaatgaatacttgaattgtttcttgaccgcagcaaaagaaagttgttctgtggtccaggtgacctcacctgctctaggagttttctcacgtggagcgagtgaacaagatcattacacggcccatcaatctgcgtcgactctgctcttgataagagatatcgggaaacagcttctgatggatcactcacaggctgaccagatgaccagtgccaagactagaacacacaatcgtggatgatgtgtagatacattcactcggaatgtacattcggacggcggaatacttagggattagatggatttgtctagaccatggttctctagatgttcttcccaacatcgttgactcgggtttatcgcttccgaaatcgtccaaggtgcctgttcttgactcaatgctttgaatcacagaactataagagcacatcaattcatctgtctacagtcgtcttccatttctcgtcgtttctgtcttttttcaagtctgacaatcaggaagaagaaacacataacttgttctttaaaaacactctaatatagaatctccacacccgaaatcgaagtactcaaagacatgaacgagaagcacgacgatccgaaggcggagattaattacatcgagaatgcttctccaggtacatctccactcgatgatttcccaggaatcaatgatatcgatgagaagaaggtgtgtgctccgcgcgtcttaggctaatctatcgacctaggcagaagagactgatgtttgccatcgaatgttgttgtgaaatcatcagctcatgcgaaagatcgactgggtattgctgccctggctcagtgttctttatctggcaagtcctcggacaagtgcgacatactgcaaaaaccgtgtactgaactttcctgtactcttagctttctttccttgatcgaacagctatcgggaatgccaagacatttcatatggccacagacctcaagttgacagatcagcaatatttactttgcttgaccatctttttcagtcagttgacttatttgttattgttggcgctgactggtagcaaatgcatgaagttctcagttgatcgtcagactgagatacatttattgcggttcacgcctcacctcccgcagttccctatgctctgtttgagcctccatcaaacgtcttgttgaagaagctcagtccgagggtctggctgacaagcatcatggtcctatggtcagtgcccgcgctcagatgttgtgtcctctaattacgtgtgatctccttgtcctgacggttctgctcgaccttatctataggggaatcgccatgatcgctcaaggactggtgaagaactttcaacagttgatggttgttcgaacattgctcggaatattcgaagccggttcgtcatcttgttttccatatatttttgagaaattgggaaactgaagctatgagaactgtcgtcgtgctgcgaaaataggtctttttcctggtgttaattattacctgtcgtgctggtgagcatcatgtcagtttgaaccgccgtctgttactgaacatacgttcatcacatatccgtcttctgcaaaccaccctaggtacaagcgaaacgagtttggtcttcgagcttcgatctttttctccgctgccactgtcagtggagcgatgggaggtcagttgacttgttgagagcaatatcctcaatcggaaaagacatccaactgacatgctgcgattttctcgaccctcatcaaacaggtcttctggcggctgctatttcaaacatgaatggagttggcggaaagccagcttgggcatggagtcagtcggtcttccatatcgccaaactccacgtccgttgctgactctgggtcgacttttgattgcgcgaacttacacagtcttcattctggagggaatcctcaccgtggtagccgctctgatcagtccgtttctgattcaaaatttccctgtgagtattgaatggagaatttctactgcattcagattgaatggaaatgctcatatctgagagtattaatgccggatgaccataggataccgctacatttttgaatcctgcagaacgtgagtcgctgacaagaatcatcaagtcgtcttcatctggttgctaattccttgtctggtctcgcaattcaggcgcttttgtgatccgacgacttcaaaccggagatattgtatctgccggaggcgaaaagttccactggagttctatcatcgcttccttaaaggactggaagacatacgttggaatgatcatatatgccggagtggatggcccactttatgcgttctctctattcaccccaagtatcatcaaggagcttggctacacagccgtgaaggccaacctgatttcgtgcgtgtttatatagttctgaactcatgagaacgacaaaaccgtctcaacaaagcatgatccgacatttctgacactggaacaccttcaatgtttacaattaacagtgttccggtttacgtgtttgcttgtatactgacggttgctgtcggatttgtaagtcatcatccgcgtttcagttgcttcaaagttaatatactgaaggacccttcgtggtttcagtcggcggatcgaactaaaaagagaggagtctacaacctgatatgcttaagtgcaggcatggctggatatagtacgtagtgatccagttcttataatgaggtttatcaaagttgacacgtgtatgttctttcaaagttatcctgattgtcagcagaaagccggcgttgagctatttcgcaatctacctggtgtgtactttttgaatcttttcgatcagttttatgattttaactctttgaagaactcaatctaacgtgttggcctgttgccatgccattgacctacaggctgccgctggaatctatcccttgattcgtatgccgtcttttgttttcgttctgttatctcaacatatcgttcagctcatgtttgattcgacagaatcctaatatttggctcccttttctatttaaaccagccaataccatcgcatgggtcagtaacaacaccgagggtagttacaagcgttctttgaccatgggcttggtcattggatttggtaatctcaatgtacgctcagctcttcctttatccgagaagcgcaatcaaatagatctagcgtgattgattcgcttcacatctggtatacgtagggagccgtaacatccaatatttaccgcgccaaagatctgccatggtataagatgggacacggcatcgtgctgtgctacatcggtctcggcttcacatgtaagaccttgtatatctgatgttagccgcgttgtcaagagggtttcttagcctgagctcatatggctgccacttattactttatcttctaacagtctcagcactttacatgttcctcctttcgagggaaaacaagaaacgagatcgaggagaggttcgtttcggcttctcatctctatttccgtacatactctcgtgctgatcttctctataccgggtctatatatagcgagacgaacacattcaaggccaaactgttcctacggactcgattggatcatcctcagctgttaaaggaaaaggcaagatctatgaatcagaagaccaagctcgggcggagctgggagatgcttattctggatatcggtacatcatttgattctcttctttcctttgggccggtgcaattctcgcacatgtattctgttctctttttgtaaagatattatccttttcatatcctgtaaatttcgttatatatgcttctcttccaagggtttcttccgaactcatcgcaaacgttggttgttgtggtgtttgttcaacactcagttcgctatgcttgtcgacctgaaacatgagccgtgtgattggccttcggagaaagccgggacaatgatgagccgattatgccgctcgagaagctaaacataactgatacatctccagaggttgacgaagcccctctctactcttttacctgttcaccacctcaacgtcaacacaaccatcgccgtagaattgtgctctcgatatgattgcttcgaagtttgtcaaaaccagcttcaccaggcttgcagcttcaacccgccagtctttttctaaaccgacgagtcggcgaggacttgttgctctaactactttaacggctgtagccattccatctgtaaatatatccacttccttccttgatagtcaatgcttttactcttggagaaaagcatctgagttaatggttctcttcttttaaaagggctttgtgtactttcgtccatcgatttcgcttgactctcaagcccatcctgtgaaaatgactccagaaacgacacaccccgagacccgggtgctctctcgatccgaagtctctgatcataaatccccttctgatggtggtctctgggtgatcatcgataatgcagtatacgacgtatccaacttcctggatcaacatcctggtggatcgggaatcatcgaaagcaatgcgggtaaggatgtgacaaaattgttcaagccgattcacccgcccaacacgatcgggactcacctgggacaaggagtagaaaaagtaggggattgcgagc

SEQ ID NO: 1587 - DNA, 8212 bp, Xanthophyllomyces dendrorhous
cgatgggggaggaggaggcgaaaagtttgatgactgatgaagaaaaaagaatcagtgaggctagaagcaagctgggtcacgtcgatacagtcgtcaatctggatgacttcgaggtgcgttcttctattatgtttgaggtgataatcagtttcccacgctaacgaattcagtttgaaacgaatggggtttttttagagagtgtgtaaagacattctatcgaagaaagcgcttgcttgcaagtctcttacattatttgtgatagtcatcttccttgttcaatttttgcacaatctgatcagaatattttcatgcgctcaaatcacaacagactactcttcgggttccgacgacgaagggactattcgctcgaacgtttcgtccttctcacgaatcctcttcaagcccagagtccttcgtaaagtaaaagacgtatcgatagagactacgattttaggccatccgtcgagctccccaatctacatctcgcccgccgcgcttgctaggctgggaaatgaggatggagagatgaaccttaccaaaggagcgtgagttaagctcgattcttcgtcacatactgataggccttccaagatagatatatcgggctcggaatctttgtttacctaaaaataggttagatgctgattattctcttatcatgacttcacgggtaaatctacagtgctcaaacaggaatcattcaggtcatctcttccaatgcatcttgctctttggatgagatgtgtgatgttcgaaaggagaatcaacccttgttctggtatgtgaagaattcgatatagaactatcttctcgtttttctaattcgtgcccacgactttctgactccaaattctatctgctccaaccgtcgttactgatccatcactaacgaacccgctacaggcagtactatgtgaacgccaatcgagatcttgcctacaaggctcttcaaaacgcactggaccacaaaatgaattcgatctgggtgacggttgatgcgcctgtagggggtaaacgagaagctgatcttcgggttcaattagaggagaatccggtgagtgtgcttttctattctatacatttcaagctttgagtataattcacgagatcttgctcaacgtttaaatgtgttgccgtgtatcgatctccaatttgggtatgaattctcaacagccaacgaatgagtcttctggcaaaggtggctccacatccgagcagatgttcagctttgtagatccaaatttgtcctgggaagatctaaagtggatgaaagaacgggcgcccgatgtgagcttcgtgattaagggcatcggttcggtcgaggttcgttttgtgctatcagttttcttctacatcacaactcgacaactgatctcgagtgagcccataggacgcagttatggctattgaagctgggatgaacgggatcgtgataagcaaccacggaggtcgacaactcaacgggtaaagcaccttttttcgatccaatgttcctttgcagtctccttctgacatatctatcgaacggttctctactaaaacagtgggattcctccgatccgaattcttgagcgattgactactcaacacgccgacttacttgccaaacacaagaccgagatcttcctagacggtgggatccgacgaggtacagacgtccttaaagcactgtgtctaggggcgacagcggttggtctgggtagaactttcctatatgcgcagagcgcgtggggtacagaaggtgtcgttaaagcggttgaggtgatgaatgatgagatcaagttaggaatgaggcttttaggaggtgagtttctgttggatcaatcaagttctttccttcattccaaaggcagaggccacaagatgttgaatctagattgtgttgtttctaatatcttcttagtcacctccttgaccgaacttggaccagaatatatcgaagttctccctatgtaaagagttgttgaagggtagaggataagtcactatttatatgtatatgtatgtgtatatatattatgtgcattccgttgaagctctataatgcgtcatatcgagaggctacacattaaaacaaactcggtgtagatgtaaggagagatgccgcaaagaaactccgaaccaacttgtattctgatactatgccacatcgaaggagaaggtgaacaagacatcccggccagccttatttatcttaggctcggacacccctcttgatctgctcaaccaaccctttagcctcatcctcatttatgacaacatcatgcaccttcttcaaatgtcgtcttaggtcatatgcccttgaaaatctgaactcgcacccttcttggttcgatgttccatcctctcttggaggtggggcgtaccaacaagcaatctttcgttcgacatatgccttcccggtcaatagatctctaactgagcctgccccttgcggcgttacttcgttggtagcgttatcggaaccgacaggggcaggattggcaggattgggtatagacaaggctgtgacaagatgagaaggtagaggaaagacgccagagtcgaaagcggcttgtaatctgatgtcggcagaggcaagagcggattcatcgagtttcgtgtcaggatgtttcttggccaggtgtcttttgagtagatgtttatgaccgtaagatgcatcgcatgtgccttcggatacatgaggacagataaatggacggcgtccgagatgagcagtttggtggtgcgtcctgagagccttgggctgaattgacgtgtgatgtatgaaaacaaaggtttgttgagatcaagaggaaccaatacatgaaaggaacaataaaagggcgggagaacatacagttttaaaagatttaccacagtctggttctaagcaatgatcattctttcctacaatactaaccgtccttctcctctttctttttgtctgttcagcacctgctttccaagccagccattggtcctccataacctgggtttccctctcctgcgcttcccccagcacctctcgctgcacttcttcttcctcccgctccaaaccatcttctgattcttcttcatcctgagactcttcctcttcttgcacgctatcaataaagagagaaaccttctctgtatcaccctgcccattctctctctttctcttcaagtctcgcttcttgtactccactcctgtttctatacgtggaggttcgaccatctcatcgccgctttcgggcccaaggagccgctcatcttcctctcgctcatgatgcactttcaagtgagctttcagattcctccgggaattgaatggttttcgattcacacaagtcggataaggacatgttggagggtggaactctgcgatatgagtccgaagaagggtccatgtcgcaaaggttggtggaggagatatatgggatgcgtggcagcaggtataccgagtgtctttcaagcggatgaaagtggtcagaaagaatggtcaacgtccatgagcaatggtccgtcaagatacgagaaggttacgtgaactgaactgaagtcagcacgaagagtggactcactatcatggactttcgaatgaatcttcaatttctgcctcgttgggaaaatctttccgcaccccttctcctcgcactgaatgatccttgcagccgcctttgcctctttaatccctatactttcacagctttcttggtgtcttttcaagtgctggcccgtccaaaaccttttgtcacacccttcattggagcaggcgaatggcttggctgattccggaaggtgcatgcggatatgagcttgaagatttgtagaccgtgtgaacgagaggttgcacgggggatagtctgtgcatttgaaagggcgctgttcaatgtcggagacgaaagacagacacaatggtcaaaacacaatgtcaattatgcccagaagacgcaatgccgaagtgatccaaatgagtacaaacctcgccggtgtgcgtgcgaacatgctcttctaacctaacaggtctggtaaacgcttgattgcatcccttgacagtgcatgtgaactttttgagccgtgtaggtttcttctttggcgaatctgaagaattggcagttgagtctgtaggcagccgcgctgctcttggtgatgctgtggatgatgatgttgttgtcggtgaagatgggtttgcggattggtcggaagcaatgggacaaaccaaagaacccgacacctcgaagacttgcccgataataggttcaactctctgctttcctttttcgtaataagtgaatctaggtacgtcctcttcatcctcgtcatcctcgtcatcctcgtcatcctcgtcatcctcgtcatcctcactgtcctcataaccatcagtgctgacctcttcgttgtcaagttggtcgtgctcctccttgattacaagctcttcgtccccctctgtttcgcccaagctcatatcctcggtactgaactccggaatggatgatttccttgctgcaagcggtgtggatgacgcgtcctgatcgagagttgcacccagatttgatgctgacttcctcgacggtcgaaacaccttggctggcttttgaaaaacggacatgaaagtcctatcgtctatgtttatctatttagtcgtcagtgtatggtgagagaacagagtgtccgaagagatgttcaaaaacaattatataaggaaacattacgcacagcttttcgccacactgctttcgaagcctgacctgttacttttttggatatctccctttggccgacatcggtcagaccatacatgcctatccgtcgtcttcttacactcagtcgttgccatattttcaatagatacagcttgttattccactctacgcatcgctacctgcacatgtcgaaccctactactgccgagtccaaggcagaatttaccaaatcgcctgaggagctcaagttgaagagcacgtcttccgttcagaaccagcttttatcctcggcggttgcttctacgtccacgactaccaagaatggactcagcaaagacgaagagacatcaggagacccagataagagaccggaaggatggggaacgagagtgctgcaagacgaagaccaggtcttcaccatgaacgcttggtttgtccattggttttcgtccatcaacttatgatagcaaccggatcgttatacggctggcttgcaacagtctatcggtaacttatgcgcaatctgatttggttgtttcttgggatacggtgattggaacgaattgtatgattcggaaccgggtcttgaagggatcatgctcccccacctgaagatctggacgagcgcgccgaggccgtcaagcaagttcaaagagaacaccaggtctctgacctaatgaaaggttcgttgatcacattttgaagtaaagtcgctgaaccattcatgagactaattctcgattgagagaaatcggacctgcgcttgcttaagatgtatacaacaagaaccctgctagtttctgggacagattttacaatacccataatgagaagttagtcgtatatattgctaattttttttgtttgggcatgatgttaatctctttgcatacatgtcgaaatttctagcttcttcaaagatcgaaaatggcttcgactagaatttccggagctgctccagatgactgctgccgatgtgagtttcatcctgctcaatattgacgtgaaggatttttttgtattgcggctagctaatcgactgacaatatgtattggaacaggctggacctcgaacaatcgtcgagattggttgtgtaaatatcttttttttaattgagacctcctctattgcccttgagacttatagatacgtcaatgttcttctagggagccggcaatgcattgtttcccatcctcgagaataacaagaatcctctattgaacctgcatggattcgactactcccgttcggctgttgaggtcgtccggtctaacccgtcttacgctaagcccccaatgggaaaaatcaacgctgccgtgtgggatctttcgtctgaaagtattccggaggatgtcccggagggaacagttgatgtggcagtgatggtgtttgtgttgagtgctttgaagcctggtgacgagtgggaacgggccatgggaaacgtttggaagatgttgaagcctgggggattgattcttttcagagattacggaaggcacggtcagtgtttgcatgcttcttcctctcacggcattgtatcctcactgagatgcaaccagctgacttgcttctcatgcaaatatggattaattacttaagatctcgcacagatgaggataaagaagaaccggatgttggatgaggatttctacattcgaggtgacggaacccgggtgtttttcttctcagcaggttcgttcatcatctcctttcgttgtcataactcgcacacacttacacatggtgaatcaatccttgatctggtgtggccctggtgtatagacgacctttccaaaatcttcacgggacgttccataacatcgcctgttgatgtaaccaccaccaccaccactgctcccaacggaatagatgacggaccttctctctctccgtcacaagtaaacacacctcaaccgccatcgccaagcccaattctacctgacatgaatgcgctctcagcagcagtcgataagctagctatgtctggtgaagagtcgatcgtcgagaagactacagaaagccagcaagatcagcagcagttgacggcccaagagggaacgaacagcgtgtatttcccggaagatggaaaaagcaagtggcatggagagcatccattgttcgagtttgagcagctaggtgttgataggcgactggtatgtcatgtctcgttctgttcaaaattttttttctaggatttcatttactcaatgaaacgacaatgaccctttgtggtacagcttgtgaaccgaaagaagcagctcaagatgtaccggtaagtttcttacaatgtttcatactagtcgggtgtctacgattcagacgctaactgtcctcgattgatgatcgtctgtgaactgcgcacagcgtttggatgcaggtcaaggctaggaagcttctcaaaggtgctgagggagggaccgttcaaagtgatatcctgacggtgcaagaggagccttaccggtttcatgaatgagcttgtacaagatatgagattctgatgatgtcgaaggttctatctaaggtacttaaacgatagacgaatagtcataaattacgtaagacataatatacctggtcattcaaaaataatttggttttcgtttttgtaagtggaagtgagagagttaattcacaaacatccacaaccactcgctcgacattgccaagatgagctcgccagctccagatcaagcatcttcatcgtcaaagccgctatcaaaaaagaagtcttccaagggagacaagtcaaagagctccaagagctcgggctccaaagctatcaagaaatcgagagaggcggatgagttggtggaattggaccggttggtggaggagtatgtaagtttgcgtttcagatcattgcagatcattccagaaacattcacaaacattcacagtgtcgtgtagacacatgaaagctcggtctggttgttatattggctgtttcgagactgaatggttgcttggttctgatattggcaggatcctacgagtccagtctccgactttcaagattttcctatttctgagaagaccaagaaaggtaagacaccgaatccataattaaactcctcatgaatcatggcctgatgatagtttccaactcatattatttgacacaggtctcaagaaagcgttcttcaccgctcctacaggtattcagtctcttgccgtcccgctcgctttgaaaggacaagacatcctcggggctgcccgaacaggatctggtaagacgctagcatttctcgttccgctactcgagtcactgtaccgaaagaagtggggaccacaggatggattaggcgctttggtgatttcgcccactcgagagttggttagtacagttgcttcaagtacatttttagttaattcatgtacacattccgagtctgcgctggatgtttattgtttgcgtctcatacctttttcgataggccatccaaattttcgaagttcttcggaagattgggccgtatcattccttctcagctggacttgttattggtggaaagaatttaaaggacgaaatggacaggttgacgag

SEQ ID NO: 1588 - DNA, 25065 bp, Xanthophyllomyces dendrorhous
ttgacgagaatgaacatcctaatcgccactcccggaagactgttgcagcacatggaccagaccgttggatttgagtgcgataatttgcagatgctcggtgcgtgattcaccctctcgatatctcaagattctcattcatgtgtagtaagtaatatgctcatgatcggttttttcgtcacgtgtagttttggatgaagccgatcgaattcttgacatggggttctcccggtccctcaatgccattctcgaacacctccccaaaacccgtcaaacactactcttttctgccactcagaccaagtccgtgaaagatctcgcccggctctcccttaaatcgcctgtgcccgtcagcgccgaagaaaaaaagtcgacggaggatggagaggagtcagaggagggcaaatgggttacaccaaagaatttggagcagcactttgcggttgttgatttggacaagaaactcgacgtattgtttagcttcatcaagactcatttaaagagcaaggtgattgtgttcatgtccagttgtaagcaggtacgtgattggtgttttatcattatttagttcaattttcaattttttttaacaaagttcagctcggctctactctcataaacatcacgatgatgttatagaattctccgctgattctttgctctctctgtctcccattcaggttcggttcgtatacgaaactttctgcaagcttcatcccggagtcccgttgcttgagcttcacggcaaacagaaacagaccaagcgactcgacattttccaccgattcaccaccacctcgacttgttgtctctttgcgactgatgtcgccgctcgaggtcttgatttcccctctgtagattgggtcattcagcttgactgcccggaagacgtcgatacgtacattcatcgagttggtcgaacggccagatacgagagcaaaggccaggctttgttgcttctttgccctagcgaagaggaagcaatgagcgcggcattggaggctaagggaatcgaggcaaagaagattaagatcagagagagtaaaacaatgagcatcaaaagccaaatgcagagttttgctttccaggatccagaactcaagtaccttgggcaaagggtaagcgttatcttttctttctttctgtcaccactacctttgagttcatttgttgatttttgtatgttttttctatatcgcctcaggccttcatctcttacttgaagtcgatctacatccagaaaaacaaagagatcttccaagtcggcgctttacctgttgaggcttttgcagaatcccttggtttgccaggagctcctcaaatcaagtttatctctcaggagcaggctaaaaagaagaagaacagaatcaaggtgatcgaagtgaacgagggtgaagtccaaagcgcggatgagaaggagacgatacttgtatgtcataacgtttcgctcaatttgttctttttgtcattcttgctgtgaaagttgtgattttatctaatcaagagatctcacattactcttcaattctcaatagtcggttgacaaagcaacggcaactgccactcccgccgctccagccgtccgaacgaagtacgacaagatgtttgaaaagaagaatcagaacatcctctccgagcactactcttcccttatcgatcactctgccgacgttccaacagacgatggtgatgatttccttacactcaagcgaactgatcatggattagatgagatcgaggatttggacgccgatgctgcaaaccgagagctttccaagcgaaaattgaaaatgggagcttccaagaaagcttcgttgaaggcaaagggggcgccttcgaagctgattttcgacgaagaaggtggtgctcatgagatctatgagtttgtcgatgaagaagaagagagggccaagaagaagggtgatgagaaggagaagtttgtttccgcccagagaggtgagatggagattgtcgacgttgaagacagggaggtcgcaaaggacaagaagagggagaagaagagaaagcgaaaggagagagaaagagaggttcgtgttgttctcttttccttctggtttaatgatgtcaaccaactttgttcatcccactaaaatacatcaacccttcgttccaaaaaccttgtttgtttgtttcaataggctgaaggtctcgagcgagttgattatgacgatctatccgattctgattctgatgcagaaggtggccttccagatatcgatatcaccggtctactctctgacaacgacgacgacatggatagtgcaagcgaagacgaaagacctgtcggccctccggcgaagcgacagaaagctgctgatgctgtcgcgccggcaaagacagtgatggaggacgaggaagagcttgcacttcgactactgggagcatgagttgtgtttagaatttgatgattatgttgtcattgtcatttaaaagcctatctgatggggtctttctatatgtgcacttcatatgcgcttgaggagaaaggaaaaaaaaaaggtgatggaaggataaattataatatctcgattttacaaacatagcagcaaggtccaccttagacaaacaaagcttggaaatttgcttaccggcgacgatgaaactcaacgaacggccggtaagataagaacagaacgaaagcagacaactacgtattgatacaaacaagcacaaaaaccactttcgcgcaaacatactcagaggtttcaagcgaatgaaacgttccaaccacactccctagataacttcggccaatccacccatttctcacctccttcatttctgtcccagatctcttccagtagagagaatgcagtttgaatattcccgattcgacagcttgattattacgtttcaaaagcatgagagggtcaatctcctatgatactagtatataaggaaggataaaaatacaagaatagtaagcaaaatcgaagactaacttggtgtctatcatatcgaagcgggctttgatttctcttcgatcggcatcggtcgtagcgtcgaccccggtcacaaacaaggggaacaataagctgctctccgccggagtgccgaccaattgagcaatggtcgccaaaagctggtttacgagcagttgagttaccaaactgaaagcattacaatgactgacaacctgacggaggtaaagcctcgcggtaagcacatgtgctcggaaagcgatgagatgatatgatatggcaggtgatgacggatccgccgttgatgggaattcaggatagaccgcatcgagccgggtctttagtcgagcttctcgggcagctagaacgcgtagagactcaatccgagccgctcggtcctcaaaatgtatgcattgagccgcttggacggatagtctagaaatctcagcaatgagctaagtcggatacatatatcagcttgagtccctctgtggataatgggcgactatgaggaagagacaaacttggaagaccatcatgcttggacccatgaaagtattcatccctccactcaagataactccatactcttctggctccaacgatggtccatccaatgatgttgtactcgactgtgataatccgacattgaaatcccggttttaaagcaccgtcaacgtccatatcgataaatgttcatactcctgatgatagacaggaggaaaacaagattagaagaaggaagtgagagaacgcaccagaagctcatgataggcccagttctgcatcaaccatttggccacccagctcttctgtctcttttcggccgtcatccgttggacgacttttcgagcctgtagaagaggatgaaaccatttctctgttgatcctcgacatatctatagaacccagtcatgtaagcagagatcgcgtataggtaggagagaaagggcagcgtgagagctaaaggagagtaggaatggttagacgcttacctcaatttcactgaagaccactagaccagccaagatctcttctggggtaatgaccggcgaagattgttttcctgtctcgttttctctctctatttcgctttcaccagtcacatcttcctttgtgttgttgctcccgaccttcgaccctttagccggatcaacactcagaccctgactcgatcccggatctgcgcccacgccagaaggcgggacagagatggattcttcccaagctttgaatgaaccttgaacacgaccgaaaagttcagctctcataacctctgcaatctccctccatggttcgccaagatcagaaagatgcatagcggaccagcaaagcacgctcagaagctagttgccatcagaataaagatgtaaagtcaatcattttacaaaagcaaaaaggaacagaacaaaactgatgaatggatagaggggagaaggtacatacgagcaattctgagctgaaagccatcggtaaaaacacagtacagacatcgatacccccaggtgggtccgggacgtcccatggatttgatccagacccggtcatcaattgttctccagagatgttcagattaagggtcgcagagttcggggcaaggacagagacaagaggcgcgagttttcggatgaaatagtctatcaggagtggggcttgttgtaccacaagctaccgatcaaattctcaatcagctgacgtctcgaaatacagaggacagggaacatgcaaacgacagataagaaaggagaacgcacaggaggtagatcaggtaatcggaaggccaacgaactaccgacactcaagattgtgctccctgttgagtctctcctgagagatattgattgattcctacccctccctccggcaccgcctccgcctgacgcgctcccacgtctactatcgggcaaagcattaaatctccttttttttcgcggtctcgctccacccgaccgctcctgttcctcttccctatggttgtccccttcggttcgatcgtcttcttcaatttcatcatcactggcgctttgatcatcaagctcagatcttctatccttctcgtttctcaagccgtcattgttcatgttaacaaaaccgccaattgctctatcatcgtcatctaccacatcttctaatccgacctcgaggaagccaccttctgatgggatgtagaagaagtcttcagggtcagatgtactggtttcccaacttggtggaaggacggctggttgatggtttgcgtgtttgccctgatgcccgatcgtcgaagaaggatcgtgtagacgagcaaaagacctgacaggggatgagccatgaaccagactactttcccttcggagggaaagttgaccattcggtttttggccggctatcggtcgggagaatgactgttgacgggcgttggaggtctggggttgtggattatatggttgatgaagagaaagtggaggcgcaagaataggggacaggttagggaaaaggagtgttggagtgaggtgattgttgtgcggatggtgaagaggattagtatatgaagaagtcgaagaaggcggaacgattggagggataggtacagatgaatggttaactactgatgacatgaaatcaaagtttccattaccgttaccgctactgttactgctgccattggtatggccgtggccgttcgaaagtgactctcttcgtgcaggcaggatccaactcaaagaagggctgggcgcaacctcccctcccgcgatcccttctcctggactgatgccaaaacctctcagaatatcagacaactcgccgttcgagtttggaccggtaaatccgctcatccactcgacaaacccgggtgatgcagcagcgataatggggtttgaagggtaggctgaagaaggattattatgttggctggccgtatgcagagaaaactgtttttgaaagtgagatagcatctggttctgaagatccgagctgttggcatcaggtggaaggagcgcttgaagatgtgggagaggttgatgcgggttaggacgagtttgggagttgggaaagttgaggtgatcagatgatccatgagtgttaggtgatagattggagagcatgttcggaagatttgtatgttgttggtgatctttccctgcagatacgccattccgtctggcgatcgcttttgcctcatcgtctggtccagtgatggctcgttcggcgagaagaagttccatcaggtccttgtactgatttgaaggcgctggtgtggattgaatggctgacgggtcgggtggaccggcattgagatggtgatgtcgagtctctactgtggatggtggtggttgatgatcttgatggacgggaacatacaattcctcggtcgagctcgagcttgaactcctcaaggacgaaggccgtccagtttgtggatcagtccacgaagacgggtctgaacttgcttgtggatggggatggggttgagcgggtgaataagaatgaggtaggttgattccgtttgggcggtcttttcctgaagcagatccttgggctttctttgccttcttcagtttgccaccaatttcagttgtggctgaagacgtatatggggtcttgtcggttccatgtgtagcttcaacgctggttgagtctggctcaattggattgtcttccgagacacctttcttgcgcttgttgggttgtttgacggtgatgagtctgccttgagcgtcttgaatttgttgaggaaattgacatttgaagtccaagcgagcgctttgataaggaagtgtacaaaggccatggaatcagcatggtagataagttgtataaggagttctcaagacaagcaagccgaggctacagataggaagattgactgatctcttagcgaagtcaggcaacaagtagatgttacttaccatgaaccacatatcggtctgatcaagtcacacttcttcctgtaaagacgagcaaaacagacgagcaagacaaacaagatagaggagacagaccgaacatatgaagaagatgaacaaaatgaggcatggacgggatcagtaacggcttacacggaccggctcggtacggccgacgacaaaaacgatcaagagagatgaatcaaaaaagacatgaagcagacgatcacagaagcagtcagggaaaggcagaaagaggaggttctgaaggcacgaactttctggttcgacaggtaaagcagccgtctctagttcgtttgagttttgactgggcttcccttctctcttctaaatcctctggagagagttgatgagaaccgtaatcggtcaagccaaacaaagccggaggaggaggtaatgggacggctggtcggaggttatcgatatccgttccagacaccaaccgaggtggaggttgaggtgaccgggaggacatgatctatgtacagtctcctgtgagaaaacaacctgggacgtacaagcgtgctgggtatggatgtatgcgtcctgtttgaggacgtgagcgtgggtatgagtatcgatatgagtcttcttgggtggctgtctggatgtgatcgacaagggaaggtgaaaaacgtcagtctttgaaggtcacacgcctaaggtgaattgattaggctaattcctaatagatatcattacggtcactatgactattttgtagtcttttgcgatgccaatctatcaataaggattcgggtgatattgactacaaatgttgtagtcctggttcgtagtcaactcgcgataatcaatcattagaaattttgtcctatcatctgcaatgttgactacactattttgtaatacagctaaatcgtcttcaacaaggctttctctttccctcttcctcccaccagagcagtcttgagtctttccttctgatcggtcggtgttgcctcagtcacatcgtcacttcaaggtcaccgtccgatagaaagtcttcattagcttaaatcaatcccagaccggtttgcctgtgaaaccctttcgagggcagaacagatggtgaactcggtgtctactctataagggctttgcctcgagagttttggtggagtgcaccagagcagtatatgtagacaacatcacattttatcccttcttcaactctcttttgtgtcatctccttctgtcttcctttttgtgcatttgttttattcaatgctgcctttgcactgtatagatgttgttggtatgctgtgataaagttgtctctggaatacaaaaggtggctctcacgatgaccaagaagttttcttcctagcaaattcgatctacatttcaatctattctactctttgatggtttcctgccaggcccaactctgctcgacaaactgctaaccagagctttcgtgctcgaaaccatactcaccacactggcacctagtcttcccactaggctcgtcctaagccattccgatacgccacacttcacactatccaaccggttcctaaccccagtggtgaacttctctcttgatctgtcgatcatgcccatcaacgaactttgagcacgggtagccaaaccggccaatccttcttgtcgaatgatcatccagcccgagacacctcctcgccatatctgtctcgtcactgacccaatcgatccagcaatcttcccaatcatctgtatctttgacttcttcatcatttgctgtctggtactgaagacctgaggagcgagagagccctttccgtccgtcagcacaccggccagacgccattgctcgtccgtcacatccacagcaggaacagaacggatgtagattcttcggatgattcgctcaatcaacctttccaaaactcgcaacaaacggacgtcctttggagtgtgaagctgagtggtcaaaatcgacaaatttactggtaggctggcgcgagtatttgggacggcggtcgtataggcactcgcagttataggaggaggtcgaattaatgaagtaagaagtgtatcggtcaatagtctatctccgatgacgactaaacccagccctggcgatcctggcgtttctgacgatggtggtatcaccaaggtcgtcggcgccgtgaccgctgttgaagacacgtctggttcgggaaacacgttctgcgataagagctcctgccgtctgtagaagtatgtccagacttcattataacaccctggttttttccagccgtgcaacaagactggcgcttgagtcgctcggtagagtgcctccgcctttctcgtcccgtcccaatcagaattgttcaagacccaaattcagcccttcttcttcttctcgatccgaaaactttatccagactaaacactgaacgcgagaaactcacaccgagatgaccaggatcgtttcttgttccagacgaattgctgaccataagaacgttcccaagaccgaacgctcgaatcgaactcgctagcgaatctttcagatgaggctcgaccgtatccacataaggttttgtctgaagagcagttgagatgtcagattaaacagttttcttcccggagacaggattcgttttgtgcagaaaggttttataagaagtgaaacaaaaaagataggtcaaacgcacaagacaattgtctttgtcaaacaccacgcctttataacccagatcacgtaaggactgaaagttgatttgtctgatgtctgtttggccgttccattacaacccagaagaagagaaaaagatgttggcttagttcatccgagagagagacggtagagttgaaggcttcgacgaaccctctactttgagatgactataaaaaacgatggccagaaccaaaaatcagtaacgtctcattcttttcgacatcactgtcttattgatagtctcctctttcatctctctttctcaagagatgaaggagaagcaaagaagagcaaaactcaaaagacaggtaagacgaacgggaggaatgattttggccgaccgagcaaaccaaagagccgggctatcactggtacttggaccattagttcaatgcacttttgagagcaaaacccggttcgatagcttgaaatttagagcaacaaggtcaggagaacagaacaagagattttgtaggttcccgcttgttgttcttttgagagatgttggctgctcgcttgcctaccggagagaaaaggaactgagaacaagatggttgaagtcgcacaggtcgtatttcgcttaacaccgtaatcggatttgaaagtaagccgccaaaacaccaacttcattctcaccagcttcatcatcatcatcatcatcatctgacgactcgtacatcgctagttcaatggaatctgaaatcaacaaagaatcctgctttctcggcacgttcatccacactccaactctcggctcgctcgagatactagaagatcatcttctcctggccgactctcaaggctatatttccttcttcggtcctcagtcgtccaaagccgctatcgacattctcaaccgtcattttccagccggaaacaaacatgtgcttcctccgagttctttcttccttccttcattctctgatctgcatatacatgcccctcagtacctctacgcgggcacagggcttgatcttcctctcatggaatggctcgaacggtatgcgttcagagccgaacagcgcattgatggagacaaggaattggccgagagagtgtacgaacgattaggaaggcggatgattgaggtcggaacaggagcagcgctggtatttggaacaatcaacaccgaatccaagtatgaaaccccaaccaattcttttgttctttcttagtagaaagtcttgaatactcaaactccttggcctttttctcttactctgattatgtctagcttaattttggcaaggacgttcctcaagcttgggataagaggctatattggaaagcttagcatggatcaaaatagtccagcaacgtacacagagaccacagcatccaacgccctctctgctgcgtctaccttcattgattctatccgatcactaaatgagcccaacaatgccttatcagttcatccagtgatcacacctcgatttgtcccaacttgctcggatgaattactacaagggcttggtaagcttagagaggaaaaaggtgtgagggtcatgagtcatatgtgtgaggccagagatcaagtcgattgggtcaaagcaactcgggacgatgtagaagacgttgagattttcaagcacgtacgttcttcgtcattcatccggttcttcataaaatacataaaaagtcttccattatcccatttttttcttcttgcacttctgtagcagaatactgatttttaagctttgctttttgcttctaaatagactgggttgttggaatcatccgtacaagcgcactgcacctttctgacaccagagaacatcgagcttatttcccacacaaacacagcggtcgctcactgcccgctatcgaacgcgtacttctcttccaaaacatttcctctccgagagttggttcttgtgtttttttgtctctctatccgcgattcttctgagctaacaaacgttctcattctcgttgataacagatgcctcgataaaaatatccatgttggtctgggttcggacatcgccggtggttatcagcttgatctacaaacccagatgcgtcaagccgttgtcgcttcccgtcttcgagactctcaactcaaagagaatgcacttggtcatccccgtggacaagaaaatgaaccgaaattaaaggatctgagatcaagctggaaggaaagtctctatatggccactaggggtggagcgttggcgctcgcggacccaaacgtcggaggcaggttcaaggtcggagaggcttttgacgctcagtcaagtacgacccatccaaatatctatctcacacccatggtgtcaacatactgatccgcgtgtgacgtccatcagttgagcttctggatccacagacaaacgaagggacaggcgccctagacttcttcgatgtggacgctgtcaagggcagcgtcagcctaggttgggaggagatgatcgagagatggtggtgtgtaggagatggtgcgctccctttctcttgtctcatcctgtacttttctctgaatttgaccacaaacgcaagctgatatccgttgttataaactatgtcaacatcaccagtcaggaacagaaaaggactttgggtacaaggtagacagcttttgtagatattcaatcgttcgatttgtttcatgtagtcacagttagacatcgtctttcgttgtataggaaaatatttttcaaagaaaggcatctaattaaacaacagacccgacaaggatatatctaatttcgatgattcacaattgggcagatcgagatttcatctactgctctcttgatcaactctaatcaaagcgagacatgtttcctcctccccctccttctctatttcctcctccccggccacctccaggaccgcctcgacttccacctcgaccgcctcgctgtcctcccctgttggaccctcctccacctctgttgtggctaggtgctccgccgttgtacttgcttgaaccagaatttgagtctccatggggcttagagtcctgtctgtttctttgtccctctatataattgtgaaagcaattttaacgttcgcacattgtgaaagaagataggaacagtcaataaatgtgttcgaaatatacgatctcggacgacgtgagatttctcttactagggggttctttgaacaggttgagtctctccatacccttcaaacccatctgaaaaaggaaagggttgaacgagacgtcaggcaaatatgctttcaaatgtcgtgcgtgaacaaaagtgatttgatacggactttgctggccatcatggtcgagattggtggggaagtgaaaggaccgggaggtccaatgtacctctaacaaatagacaagcaggaaaacaggagagatattagctaacaagctatataaatctgagaaatgcaaaacaaaaaaaaggtacgtaccaaggtattggcagcgtagttgttggcctgatcaattaaatcctgtttcgaccatttgaagttcttcaaagacgagtttctgtaacccatccaagcttttacgcggaagcaatatggatcagcgaaatacttcatgacaagtgctatatcaaatagagcgagaactgatgatagtaccttgatacgtcttggccttgatttcgctagaaatctcgttatcgagcacatggtcaactttcgtcttgaagcttcccagagtcttggcaaacgagttgttagcctggccttccatgggttgaattccgagctgaacaacgtcgcctttcctcaagaaaaacgcttcctcctcggccaacaagagcgttccacgaccctccgcacctgtagaaaagaacaagaccgtagaaagcttaacctctagatacaaggacaaacgattgacaagaccggaatcgtaccagctcgagcggttcgacctaatcgatggacgtattgttcagtagacataggcagtccagcttggatgacatgggtgacctgtatgtgatatttgtgataatcagtatcgaatgcacgtgtgagagaaagcatcaaccgaaactgactccagtgaaatcgattcctcgagccgttacatccgatgtgaacaagacaccgcaagcagcgttcctaaactcctcggtgactttagttcggtgaccctgactctttcgactgtgttaaagcacaagatgattatactctttagcgattggtagtacaaatcatgagcaagacggggacgaacgagtgaatctcaaaagtggatccgatatcaagtttgctgaaaacttcgaaagccatggcggtctcgttcgcagtgggaaggaaaaccatgatcttgtaagaccctcggttaccagagatctcgttggtgattatcttgagcgtggccgcatacaaattgtccctatgaacgatcgcgaaccgttgatcgacgtgagcatgcgtatcctctgcgcaaaggatgaaaacaatagaaatataaccagtgttagcaaagaaaattacagacttgtgaacgaaacagagtgtgattgagatgtatagcaagagtaagatatagacatacgatcttcttctttgagggtagagatgaattgatgattgggcaacaaagcgatcttgacgacctgttatgtttcataagcaaggatgggtagaaacagaattgagaacacaaagatatgagagcgcaacgcagaaagtttgaaacgacgaacgtcatgaacttctttgggaatagtggcactgaacaaaagagtctgtctaggatgactcgatcggttaggcaaggctgtatattacaataagaagcaaaaagatcatcaatttatcagtgtatagttgttagttcatgcacaagaacaaacgtacctgcaaggatttccaagatgcttgacctgaaaccctgagaattttcaacacgatcaacagggagagagacgagtttagccctgaagtcgacaaattgatggaaaccattgcaagcgcacctgttccagtagctgatcagcttcatcgaagacaagccatcgaacaccttcaagcgttgacttgataccgtaatttgaaatcaagtcacagagtcgaccaggggtggcgatcacgatatcgtttggctccttcctcttaaagcaagtgttcacttttgttccgccaatatgtgtttggacgccgagctttccaggcaagtggctaacgatagcgcgcgcagcagtagcgatttgttgtgctatgagagaagcgagatacaacatgagaaagggtcgatcagcgacatcaagctgatctcaagttgaagagagagaacgcgtaccgagctctcgggtaggtgaaatgaccaagatggaagtctgacttccaacaggcggcaccggaagcgaaagaagtgactgtatggaaggcacaaggaatgcgagagtctttccggtaccggtctttgcctgagcgagtctgaagaaagaggaggcacgatagggcattgacataagtctaacgaaagtgacaataacaacaaaatgcaagtaagaggtacgaacacatcacggccttccaagatagagggcattgtctatcgaatttattgttcggcataagaaaggagagtcatcaagacatgagtgttttctccactttgggacatgcttcaaaggatgttgaagataaatcatgatgtgaggaacgcacgacagcctgaacttcagtacaacgttcgaatgagattccggccaacaagtcagacctgattttaaaatcggaaaatctcttgtcggaaagatgcttcgttgcagtagaaggtctgacgggctcctcgtcgacgtccatagcggtttcaacaacctttgtcggttgggaggcggagggctgttgtttttgcctgggcgcgaaggacgatcctcctcttcctctgccaccaccaccgccaccaccacggcctcgtctaggagtagaagactgatcttgaggcatattgtcaaagctagggagagttagaaaaagaggaatggaaagtgatgtgtgggagtctggattggatttcttttgatcagctttggtcaacaaaacaaatctcaaaagtttcagattcttatcaaggcggtgatttatctaagtcacgtgatagatatcgctcatatcagggattttgcgaggcagattaactcatgtcaatttcaagcctatcgcacttggagccgtcatatttgttcttgaatttagctggtttcatcttttcaatcccttattgatacgaaagcataagctgaactgttttctagtcgtgccaatcaaagagaagtattatcattcatttcttctcaaatactgtccagagccaataaatgacgatcagtagagttgtcagggaaaggatggcccggaaactgtcaagaaaaaagaacgacgtattgagcaagataaatgaaaactgaatgtgagcaagtgcatatgcctgaaaaattcggactgaatggtatgaaaaataactaacatgatggcacagataagtgctttccgaacagatgagtagaacgctgataaagccgctcctgaccagtttgttctagataaaatcgagacattggacagatatcaggtgagccatttgcaccgatcgtagagaatctaagcgtatatggacgaaacaacaaacctcttattggtttgtccggctggtcgatctaagctatcctcccatgctcggacaatcgttctgtacctcctaccgaacacccagacaaagaaaccaacgtctaagaaagaaaatcggggtaggaccgcgctgttcacacccagaataaatttcaaatctttaagtactacaaatcctgagcattctgaaatggtgagtatacctacctcaatccaggattgagtcctctgactctgctattcagctgcttctcatttctcttattcacaggatagctttctggccggatatcttggcgttcgattccgctctttggatcttcgaacgaggaaatgacagtaaacggtaatggtaaagttttgagagtgggtgaaaatgctggcgaatcgggcggggtaagagaacttgacggaattaagaatgataagaattctctatttcattcattcattcgacatttacgtattttagcagatgtatggtcgcaagaaatgtcaaaaaccgaaatgtacgaacagcgtcattcctagggttaatccccaaagcctaagcccggtttctctttcacccctagctttcttcttcccgactccgaaccagtgctcgaacgttccgacagtctgagtccagtcttctccacccgcctccacttcgggagaaacatcatcgcgaacccaaccttctgctgtagccgaaggtttgtcgggaagcgcgatagcaccgtatctggtaagtgggtaaagaagacgctatgtcagacatcataccaaaataactttatgtaaaaaggttgagagaaaacgtactgcatggacccaacaaagagatggatgaatcttctgacgagcatatttcgaggtgacaatctaggtgagagggagatgctgatgacggcccattgtgaagggggtagtactgcacaaatatgattataaagaaatgcagacattagtctttagccaacgcacggctggatatcaaaggaacaaacatgtttcaagtggaatccagtgcagggtagaaacttcagacggatctaattctgggataggagacattttggttgtctgaagaaagactgcatcggaccatacatcgagaaagcattcagcttgatacacgaatatgtatcgttttgaaagcacatgactcaccgaacggggacaggatcatcaatagtcttttcccgagagaagttgtgatctccctgtcatctgaggtaaagcagaaaggtctcaatcaaattttgcccacaaatgacattcttgctgtggcacggaacgagccataaactcaccaagttgcccaacatgtagccagtccggcgtggctgctagatcaattccgacttcttcccaggtctctcgaagagctgtatactttgcgctttcgtcttcgggattctataaaacagaaaacgttgaatcaaaacgcgatcgaccgatcagccaaaatcggtgaacatacttttctgcctcctgggaacgccagttgagaagaccatctttgattgaaacagagaggctcgcattaatatttcttgaccatttgtcaacccaagtctcgacctaggatattgcatacctatctcctttgctttttgctcggcgaataaagagtagctcagccttgactcccttctcgttcacccaaggtctcttgaagaagtcatccagagaggtagctggagcatcatcatcatcatcgccctgaccattatagattgatgttgggggaggcactagtctgatacaaattgccacggatgcccttccttgttgcgatggaggtgaagagatttgtctaggagctagtcacatcaattccattccggttcggcccgacccggttgaaagagtgtgaggttaaaacttcgatgaggacagaaagagaacactgagaagggacacacgagttgattgaagagacaataaaccacgtcgaagatttgagatgacctcgccgtcttcgaaatcaatgccgcttgatgagagttgctttccaagtttgacggatgttggtagggttgtagcagctttgtcaatcagaaacgatcgaattttgacattgaaagcgaaaacgtgaaaaagaatgagtttgcgattcgagatattcgtgtagacgataatccatttcttaaaatttcatactaaccagagttcttcttccggagagtgtcttgagaggaatccatgttgtcgagtgtgctgaagcttgagcaggacaaaggtgaagttgaaaaagaacgagatgaactcttcgccaggaacgcaactgaccgaccaaccagggaacccgccgttgggggcccccaacagatttcccgtccacgcgtctggaaagttgtgcctgacacgcgtcgacgcgtcggtttttcattttaatacactctacgctttctctcacttacacacaaacaactgtttgctccaagatgaactcttcgtccaatccttacctcgagaaacaaaccattctgttgtccagattggtaaagacattggacagatgcaacgaagctgttgttgatctcaacggccatatccaagtatgatgttttccaactttgcctactgaacgtagtctggtcgtatctcatacgttatttttaacatacaggatgttgtgtcaaatcccgattccgaaacggtcattatcaccgcgaagctgttcgaaaagtatgagcggaacgtcgcctacaatcttcctcatttaatatctgacgaaagtcgagcaggatccggagaaggcactggatcaagactggcaggggagccgtaaatagagtgatttgagcatatattgagcatgggaatggggagagagcttcagctaagtcatgggattgtcattcgaggatcctatgacacggccatctttcaactctcgtcatcatacttcacttgtgcaggcgtaagtgttatcttctgatgtcatctaccttcacatcgatcatccgtttttttctttctttcgataattcatctaattctcatggttgaaattgagaaaagtgcagatgacttgttatctgccctggctaggcttctggccatctccatgtgaggagattggtgatacagttatagatacaatttcgaacgtaggtcctgaaaccatcctctatatgtatctgtcaaatgctcatactctatgcatttgtgtgtgaacttccagtcgctctcaaattactgcggtggccaaccacgctgccgaattgatagttgacgtcgtatatcatttgtttcaagatacccgttgcgactgctggaacgtcctctttaccatgccagatagcagctcgaagcttcttttgagattacaactcattgtgacgttcataagattagtatggtgaataacgaaagatagttataccagtaggaggctctcagaggaaagacaaatgagattgacatggttaaaacctatatgttgtcgcacttttcgtccggtctgttgtgcttgacttcgtgaaatcgcatgtgtcgcaacaatagttccttgatgaaccaatgaagctagaatcttggtattcattgtacttcatcttactcgaatgcattcgggtaacaaacatggtcggtcttgtgagtcgataagccatatactattataacctttcgactttatgttcttatagctgttcatacgaaggctctcatggaagtcaaacttatgcagaaatgtatcctgaagaatctgagcatcaatcctaatcgcggtcgattttaagcatattatatcgaaactccgagtcaggctggacggaaaaaggttttctatgcgaaagaaaggaacaatttcttgtacaacatacagcgtcaatcaccaaacaattttgatctgtgcatgagcgaagtttctcgcataaaaataaatcaaactcgaagagagcagacgaacatccattgtcgaacggaaatgaaataaaagaggaagaagataccgagataaggcgagagtctgggattacccggatgttcggaccgatcaccgaccgcatgttttttctgccgttcatgtcgtcagtatataagcgacttttcttcatatcctccctttattcatcttcctcttctcttcatattcacaaatcctttcctgagcttttatatctactttacaaacaaaattaaaccttaaagcatgactactttcactgctactgtccttgtgagcttcaatatcgatctgcttatcaagagaagaatggaagtgatgggttcttctgcgttcaaaagcttatccggttctttcctttgtactatagcacggcgctcgagaccttaaactggtttgtcctatttagaagctcatatttagttgtatattctaaatgccgatcgacattggtgcactttaataccacaggaaaccagaactctcgaagcaccgacagatggcaaggcgttcgtactagattctgcgatatctatcccttccgtatgatctcaacgctaacttagttcacttggacatgttctagtcaaatccgaatcatcgcgactggtttgtgcggatctgatggtgagctttgttgaaattagtttgtctgaatggtgttctactaaagcgcagactactaacctatgattcccctcttacagttcactactacacacataacgccaacggagccttcaaagtacaaaagccacttgtattgggtcacgaagccggaggagtgatcacttccttaccagaatcatacaagggtgacttgaaggttggcgataaggtggccatcgaggccggagtctcctgctcccgatgtggagattgcaagggcggaagatacaacctctgtaacgtaaggacattctctttcattcaaaataccgacgttcatcagataattccaatcaaaaccgcgtttggttgtatgcggtatgtgtctgagcaggaaatgtccttctgttcgtcggcaaaaaccttccctcaccgagacggaaccctccaggagtacatgatccacgatatcgattacttatacaagtcagttctcttatcttatctaccctcattggtttgaacataccactgacaaattcattaatcctacaggatgcccgctgatctttccttcgagcttgcctcgatagctgagcctttgagcgtgatcctccaggcgactcgccgatcagcatcccctcagcctggttcttccattctcatcttgggttgcggagctgtcggtcttttggcagccgccgttgcgcgatcaatgggagccacaagaatagcggcagtcgacatcgacgagaaaaagctggaattcgccaaagagcaagggtgggtggacgaaattcttgttttgcccagggggccgagattgagcggaaaggagagtttggaggctgcaaagacattggcgggcaccatgcaagagacttttggaagcgctgggttcgatgccgtgtttgaatgctctggggttgaggtttgtcttgttcaaatttcatgccttgcgtagtgttgctcatgagaagactaaaatcgcgtttgtattgtatctcacgaaaacagtcgtgtatgcaggtggctatctttgtgagtatatcttatctccaaaaaaagattcgtttcagtactccagcgagaaagacgctcagacttgttcgtctgtttctgtgtatcagttggcccgaactggtggcaaagtagtcttcattggaatgggaaccccggaagccaccctgcccactagcaatgccttcactcgagaggtcgaccttatcggtttgtccatcatccgtttcttgattttcactgaaccctatatcctcgatatgtgggatgaacaacctgttgagattttaaccctctttcatacatcttattcatacaggtgtattccgatactcgaacacttatccgactgcgctctctctccttgcttccggtcgacttggaccaggaatcgagaagatggtcacccagcgatacccgctcgaaaaggcagcgcttgctttcgaggcggttgcaaagggacgagatgagaacggaaacggagtgatcaaaacgatggttcgtccccttctatcgtatctcggttctttgtaaaagacaactcaactaacttgacctgttcgtttctctttgatttcccatattggcaggttgggcctgactactagttttctcacagttttttgttctttccattcctatcttcattctggttatattctctggtttatctttacttgtatgtttgacacatgtaaaaaattaccctgattcttgatgcaatatttgggaaaatacatattggaaacatgagatcacgacagaaacagtcaaatatctcctcaacttcttctgttttattttgggcccagacattttggttggatttcgtgttatccctatcgtcgtgttataacaaaacaaaacaaaacaaaaaagccataaaagcgagcgaatcttgactcgaaggacctcttgttgagagctatccccgacctttgtctatttgcagggtcaactacttctaccagccaggggcagatccccaagggttgttatctgctcctccgtaagcgccttgtgtcggtccagtttgcgcactggtgtcccagttaggttcagctaactctgttgggggcacagaagaaaggagagggtttggaccggcggatgatgaggtggtagggaacatttcttcaaggttgatcacgatggatgctaatttgatgttaagcgcgtccaatccctgttcgaggttgcgtcaggtaatgtccatccgagatacacgtgtctgacaaatgatacgtggcttagatcgttttgaaataacgtaaaaagtacctactcgatcaaccacctcggccacgtccacactacctgaaccttctgcctcaaagtagaatcgttccggctccttcaagaaatcaaacggttcatcctccaacggagggttctcaaaaggtgcatttgccgttggcggccattcagacttggctgctcgtgtgaaacgttttgatttacagcatgaattttctgatcgggatgacgaacttgcatagagaaagatgaaaatacgaaccatcactctcgtaccaataggatgtgtgtctcagcgcgttatgaggatcgtattcaaacgaaacagcggatagaggggaccattttgagtgagtttttgcgataccctattgtcaatagccaattggaaccattaccaaagagttgttagcaattatttgatcaggaaacatacagattgcatgacagtgtaaactcgccttgaaagctttgcagaccaaatccaactcctgtcctttagccaatttgacaagatagataggtttgctatccgggacacctggttgtgacatgtaaattcagagaatgagatggttgatgaattcgacagtagtgctccgatcaaacatagaacctcatgtcaaagagatagcaacacgtacccttcccaactggttctccaaatccctcacctcgggcggccctttcttgttcactaagcggtgcttcactcgagtttgtgttgtccatataaggatttgcactcacacctatcgacgagagaagagggaaacaagttacttgtcaaaagttcagctgtcatattcacattcgtagtcaaaaaacccaatcgtgcatcacacaatcgtataataaggcggcacacagaaacgaagaacaagcactgaccggtctcgacaatttctaatgcttcagaagttacagtgacctctcggtcggtagccttggctcttaaacgtaaggtgatacaacaatgggagcatccttcgatacagtcacaatcctgaggaaatttaaagagatacataatccatcagaatatgcatccacacttgtcaatccgtgcagagcaaaggcatcatgcgaagcaaataaacgacatccgttctgtaacaaatacaagggtcgagaagagaagacacgaaccatgtgccacttcaagccttcttcacatccaccgcttctcaacgggattaaaccaagccgatgagccaggaattcatcagccaagacagacgtgttggccgagatagaaacttggtcgatcgctgttggagaccaattatgatacacgtcgataatcaaggcaatgagacgctcttaagttgttgttgatctcgtctaaaggaaaaggaatggacggatgaactgaccaactgtcggcacgtcggccatcatcactcgtctcagtgagttggcgaacctgagagaagtgacatttgcattcacaaaacaccacggaatatatcgaccgaaatcagcaagatacccttgcaccaaataccgagtggatggagatacgaaagacaggaactcttcacgacatggaccatccatgatcgctaggaattccgagtcgcttctctccgacaccagtcaaaaggacgttaaagaggaggacgaacgacatatcgacaccttccaaagtaaaggacacgcgatccttttgaagatctcttaggacaaatagaggatttgagttgtcgactggcatcttgagaaagaaaaggatgtcaagccagaaagtaataagagaagagagtcggaggatgatggagaagaaacagcaaccaaagaaacgaatcggaaattcattcagttttcgttgaatttgcgaaattcaatacaaatacttaaatcaagctaggctgatattctcatgttctacgatgagagcacacatgcacatactaagacagtagcgaagccggatccgaactgatgaaaacctcaggcaacctgataggtgctgtttccttgaaggcagataccgaaagcactcttgatgcgggcctcaagacccacacagcatccggcttatacctacaataggtaatcattataggcattaagcgaaaagaggcaaaagtgaaccccaaaaacaatgatgaaggcaatcaaggtataaaacacacaaaagatttcaagaaataagctcgtgaatattgaaattataagaaaaatgaaaaaatggagata

SEQ ID NO: 1589 - DNA, 12001 bp, Xanthophyllomyces dendrorhous
tgtatatatagagctatagagaacaccgaggggtatgagttgagagcaaaaagacgacaatcttttatagaagaaccgatgggagtcagcagtagaagaaaagaagaagaagccttgcttgaatcgaagttgagggtttcaagcagtcagaaatcaatatcctttggaatcaacgaggataagcccgaccagaaaagatgtcagcctacttgggtttctccgtagcaagagaggttcgaaattaaatcttgaagtatcatctctactcctatatatattcgatcaatcacgtaaatcacgtataccgtttcgttggccgtgccagtagagtgaacgaacaaagccaaaacaccacattgatcagagcgagtcgagagcgaaattatgaaagatatacaggggactgactcagcaaagtagcactctcttggagagattctatgcgttctgtttatgtatgttttgacacgtttcttgattcggaggtggagcggactaaaaggttacaaacgaacccagaccaaaagaatacaattcgagtgtaagtcaagtatgcatgtcagttgattggctcacttcaattcctttggggttgtttcctccaaagccgatccagtaggtacaaggatcaaagcagaagggtaaaaaaatgagtagaaaacttgaacaattgaacatactggcgatcctctgttctgtatctctacctgagcattcctcatagcgaccacagcagcctcgaaggggtccatcatcgatggacgtagctggcctggattcgtcgcttccctcacggtgtcattttgtctctccggctgagaaggatcaggacaaaatcggacgaaacgaaagaaaagatgcaagaggatgtaagatataagaacgtagctcatgaattgatctggaggatgtattcaacctatttaaacaaagaccatgtgaacaaaatggttgatctcaagacgtacagacaaagcaagctcatgggtttcttgaggacatggcttataatccttgtcgttcccggaccataatgttccatcgactctcctcccttcacagggtattccaagtgttttcgatgctcgcaattcttcttttttctgtagttccgaagagtcgacagtgaccatggctgagaatggttgtctgttagatcggaagcaaaacggagattacacgttgaaagatgagataagaggtcggtgatatagggttcgacgagcgaccgcaaaggattagaagaagaacgatatggatgagagcgacagtgcgatttcgccttggataccagggaaggctgattcacaagagttcacaccctagagggcgaccaacaagttcaagcgttggacggttacagccggagtctttgcttatgatcctctcagccccgatcttgcttcccaaaagtcgattgaaccatcgtgccagacctaaacgagcaaccgaagtacccacctctgatgacaagaacacgttgacctttgtaatgtgtggagacgaccttccatagaagccaacgaaacgaaagaagaactgaagtacggataaaaggagcgccggatggaaggcgcaaatatggcccgatagatatatcaaaccatacttgcggaggatcgccagcacacgctgcgcagccgatctaccaaggcacaagttatcgagcccagatgtgtcgatcaccgtcaccctggcccctggttcctcgcctctcgtccctcgccccttcgccacctcgtttaatcctatagatcgcagaggaatgaatcttttcatgttcggggaaactgactatcaggacaaagatcatcgctctgtatgtgtgttctgatattacggataccgtttccgtctgatttaagaacagttagtccattcggctggacgccacatacaccggcgactgatcggacagatgagacaaacgccacccacacgacacaagcgatacagacacgtattggccatggtcacaatcctacgaattaggtcatcatcaaatcagccctgactcgttcgtttcttttgcctaacccaacctcttcggaatacaggcttctacgaacgaggaggaggataccgcacgatcaagagaggaagagagacagataaatgaaaataagaataaatgccacgtggaactctgaaaaaggcctcgcactgttcatcactcgtagatgccctcaggccgcatgtcacggcgtatgacagacaggatgagagggaaaaacagtgagagtggcgagagagtttgttcatgtggaaaaaaatagaaagggaaaaatagggctacagacgagatgcaggtcatatgcatggccgaatgtagcacacaatctccaaatccttatccgctgacgaacttcagtcgaatccctctacgagcggcagcagcgacctcagctgagcgaattcaagagagattaggttaatgtgcttgtacatttcggacgagatatacttcgacgatctacgttcagaaagaaaacatgcaacacgaacctctcttttcagagtcttcctgacgcttgtcatggttcagaacgagagccttcatctgttgctgctcgagcttgtcaagcatctgattggatctagtattgatggctaaagcagaatcggctggtatgtccatcaatcgcgtctagtaggagatcgtttttatcaaaggttgaatacgtcgttcttcagtatgggtcgaaagattgaaaaagttgaaaggcgataactcacctgaggcttatttcctttcttcgttagaagcatgaacttcatgtttccccctgaatcctctgatgcgggccggatcaagtcatcctctcccgccttggttcccttgtgagctcgcctcatcagtgggaccgcactatcgaatacagggattgtagcttttctgtcaccctttttatcggcctgctcgatgagcaatcgtgagaattccttggtgaattcatcctcttcctctcgagtcattccgtctgcttttgtgagcccacggactaccaggtcgtcctctatgtcttcctctgtagcacttccctcatcagacagatggggctacatcgaacaaactcgcacagggttacttcgactgcaaccgccgttcgtgagagcaacggaatccagaaactcacctcctcgagatcctccttctcttcggtttcttctctcaaatcaatgacttcctctcgatcttcatctccactttcgcttccggaatcaacccgttcctcttcatcatcggcgactgatcatgaccatatcaagcaagcggtgagtcaacatgccgggaatcaataagtggtcgcagaagagaaagacgcaccggttgactgaagagcttgagaagccaacaactcgtcaatagcaagtccgacctcctccatatttttgaatgggacaagatccggccggatcaactgtcataatccaagacgcgaactaatcagctcaatgttcatcaatagtcgacacaaaaggtagccgaatggctcacatcgaatgtatctgagaccatgaaatcaacgtccatcggcggatctcgtttacacatcacatatgcctgtatcgccaaaacagtgatcatcctgatgagtacagaaattcgcacatgagaactataagtgatcatctggtaaaatgacactcacctggaagacaatcagaaactgatcgagtcttttctgttggacccctttatcaaaacacatcccgcatgtttccaataatgtgcagattaatcggactcgaaagtaatcatcggcagcgtcgacaagggacgaccttccagggacaggtagtggctcagctgttcaaaacaagagaaagacgaagaaaggacccaaaaaaaaagggtttatatgagacgtctgttaaataattcaacagtctagtaagagaggacgacattggtagaaaagctcacaatgtccaaaagtgatcaaagaccaaagcgtatcgaagatgattgtggaattgacttggcggtagaaactgatatcgagacaaaggtgtacttagtgcagtcattaacgttgaacatatataaacaaaaagacagcagaagtacgcactgtagttctccgagatactttattgttgcaatcctacgttggttgtgcttgaagatattggtctccaagccagcccggatgttctccaaaacttgatctaccactccagttgtgaaatctgaatgaaatttcgccaaatcataaaccacgattgctaacgctccaatatttgagaacttgagtttccaaactttcgtgaacgctttatgtaaaatatgtacgatcttgtcgcgcagtagtggagtttgtgtgactgtgtcagttatatagaagcatctatcaagatcacggcaacataaaacgatgaagaaccaacctggggatcttcccaatgaagctttctaatgagcttcaaaactttttcaacggtcttcttcataagcacgtcatgaaccagatgccgaataaagaggtccataggagttcgctctttctgctggacggctggtcggtcaggtgggttgcactgatacatagaagagagatcatcaacgatgagttgatgagtaacaggaaggactgttggcgtatagaaaatacttggaaagaaagacaaacctggtaatacgcattctcgagtaaaagtgcgagtctcggatccatgtgttgagcactttgcttccttctcagaagctccaactgaacaaccaattcgccagcaataagaaatcaaatgtcaacttccatagaagatagggttcatgaagaggcttctacagaccatgatcttcatcctctctcctgtctcttcactcctcaacaagaaccttccacaattttctaacaacaaagcggcgcattcgatgttggctcctgccaggtcgtctactagcaccttgaagacatgaaggattgtgtgtggtcgagcgactttaaacttggccaactctgaataataacggatgttctgttggccgttaccatcaatggtcagccaatgaaagtaacccccgatacatcagtatgaagctcgtatgtgatatggttgatttaaaatatcactgtacctttgatcggacctcagccagctccttgacaagtctttttcgttggagataccgaaactcttcgtccaactgttagtttcgccagagccaggggcgaaaagaccacatcagaagggaagcttgaaaccaggaaaaagcaagtttaacgaagcatcttccaaggactaacaatggcaattaaatctttcccgacgtccggcatatagggatccaaagcagcaacgaaccgggcgtagagaggtaagaggtcggatcgatttttaggaaccgagctcaggaactgagacacagcggaaatttataccagttagaggggaaagaatcagagaggttttctgtctgtgtcaaacgtgaagaacaaaagaactcagcacaaaccttgacgactttctttctgcttggtttcgagttcatgattgcaaaatccactgccaactgatcgaccactgatttcgaaactgcttccggcaaggccgtaaagatggcgttcaatctggcaagtggacctgcggggagggcaggatcatctgctgaaggagtgaggattgcggtggaggggtcaagatttgagagtgacctgtatatatcagttgaggtgagcgcagacacgcccagaaaatacgcatttagcgaaagttgatcaatatgaagggaaaactgataggaactcacgaaacgaccgactctggaatctcccccgtcgctgttgtctcttctccatcctcttcaggtctaatagcttcaacttcctcgatccccgctttttcgtcccctagctctctgtccagtattactatctgatcttggatctcttccgcttcttttccgtctttttctttttccttctctctctccttatctttcttcaacttgacacccaagaaacctcccggaacaaaatcagcaaggtcgataatgtcttcgtaaaatttacgctgctcctcgtcttcccacatcccaccaacaggaatgtcatccagtgaacgagcataagggttagccgaggtcgaactatcaaggacaaggacggatcctgagcctttcggaggaggtagcgcaggaaaggatggggctggcagatgtaatagatcggctaggctgttacggttagagagttgaaagacaaagaatgagtttttattgtaagacatgtgaagtataaaaggttgacaatctagacgtacgaggttaatccagccattaatctctctacctctttcgtcatcttctcgtacgcctgttgtctatcttcaaagatttctcccgacttgatatacgcctcgtgattcttcagatcctgttcttgcaatctctgtaaaagccaaatagcgcccgatcccatgaaacacgcaaagcctgctggtcagagaatgaaatggaagcatgataacgggaatcaaagaacgtactactcttcccttctgaacgtttttagctaacgattcatagtaggagttgaatgcagttctcagccgactttgaacggcgcttggaaccagctcatcgtcctcgcctgttccgacctcattagtattcttaacttcttcagttagcgattgagttcttgtttccgagccaagatagagtcttccgaaagttttcaggaaggacgcaaagagcggaagagaggtgaatattggatcggatgtcaactacaattggacatgaagcattcatgttcgtggtacaagaaaaggtcaaaggctgtttctttctccagtaccacacaatgaaggcaagtcttatgagtgaacaagacaaagagagggacgtacaagcgctttgagcgcctcttcaaccaaccctccgtcctttttctcctccgagcttcccgtcccagttccagctgtctttgacctttttcctgccgcaacgttcaacgctgcgacccctccttgtatcttcagaccgcatacctctgcctcggatagaactctcaacacgcctcgctgtctagacacccgttctttttcttctcgatccctttgctcggcaggaagagctttaagagctgagggagtcggtggggcgaggagagcgtacaattgagtgaggagaggaagaagaaagacggagtggtccaaccgaatcgacaggcgggtgaggatctgtcaagatgaccaagtaggagagaggcaatgattaattcaaccgatcaagagagtatgtttgttgcgattaacgaggatcaatacagtgctgaaggtcgaagtttgaaagctaaacctcctccacactgtacgagcaactcttcgaaccgaaagagacatcgtctccctcgagataaaagaaagagagcaagtagtttgcgttcaagagaaagaagaaccttacctccacgacacttaacacgtctccttttcctcccagccctgtgattccttcaacgcaagcatccacgatctcttccgcgtactttcccagactcagactatcgatctcctttagcacactctcctttgattctaaggaaaactgtttgcgaagcttgttgaggagagaggtgtgtcgttttagagaagagtcataagtcttcttggaagcgacagacgggttggtgtttagttgaagaagaggtagtcgtttggatcgtttgagaggatctggatgaagaggtagttcggttgacatccttgttgttcctctgtaaatcggggccaggtaagaggtaagagcgttcagatgaggttttcacagacaaatgttgttcacagctcaacaaaagagagactgaagaggtgaaagtgggtatctccttctgatcgagtcggaagtagaagatgggagttgttgaaagcagggtcgttctaattatcacaaacgaaggaccacctccgccgaccgacatacttttctctgctttcaactctatccaactacttcccttctccgtctctcttgatcttcgcgttgccagtacgttgtctgcattcttaacatcttccttgttctaaagaacatcgagaagatcgaaacataccaaaggtagactaaggattctactgctgtaccgagtagacgcgtatcctgtgttcagatctacccactgatgtgaacctgaattgtcgaaggcacttcctggtctttgaacttgataggcgatatgcaagagcataacagaacattacatagatctacaactgtattcagacaactttgactaccctcgtacacctgatccttctctgatctgtcctatccagattctgagctaccctctttctcgtatccgtgtccctcgatcagcccaacactgacggctaagcctaatttgagggcctgagcgatttctttttgactcttgccttctttctccaagttcttcgcgtattgagcgtggatcgcttctgatctggcatgctgtgggtccatgacaaagggaagtcagctaacaggttcaagggaaaacaggagaggaaaaggaagtatgatgtccgcggatgttttagtgaagggattcgtgggcagaattttggtagtgtctgacgatcaatgccatggacgtttgtaatcctcaaagcttcagaggtgggatctagctgatctcgatgtccttgatctactagttacgactgggcataaggatagcaattcacatggatgacttttctcccactctgattacgctccatatgcacagaacccatcgaaactggcagatgttgtctggagatatcaagagacacgtacctccttcttgttgtgcaagcactcttgataatcctctctgaagagagtacaatccttggggttgtcggttccagcgtagcactgttgagaatcaaacgagaggtaggcgatcaacacggtgaatccgagtggaataaaccgatgggacagacccttgtaaagtcttgccagaatacgaagcaaggtgtcaaacctagaaggcaaaaagaagagaagaaaagaacgagtagaacagtgataaattggtccgatctcaaaacagaagacaaagtacaaagaacgcaagggtagactaacctcctttcaagctttgtccggactataagaaaaagttcaacatgatcctaagccacaaggaccaaaacaacaacggatgaacacgttgatggacataccgccattgtatttgtcaaagttgaagttgaagctgagttgttgagatggtctatggatgagatcggatgaaccaggaaggcggggaagattgactacgagatggagaaccccttaggtaacttagataacaagccatgatctgcgcacgcctcgagatacactcggccgagagatggtgaaagatggaacgtcgtcttcttctaaccttatacatcatcaacgaccttcttcgtatcttacaacatgtctctttggtcgaaagtacaaactggtcagtgtggtattttgtttctgaagaaaccatctctggttgccttggaagcatcgtttcagtattgctcattggatcacgatccggcttgttccttgaattcgctctacatctcggccactgtcctcaggagccaaaaaggcagctggacaaacaaccaatttcttgcaggtatctgctgtgttcacataatctaatatcggatcaacccaaatcacgcctttggaccgttatagacctgatctcacgatttctttcgctgctctaatctgccatcttgtctgaatcaataggaaagctccactcttgctgtatcgcaagcgagcggggttaagcaaaacttcagcttggccgctgaaactcagaaagcggctgaaatcctaactgtgtttcttggtcagtaaatctgttgcaaagacctctttgtcctattctgcgcctcgacttactcgatgtacttcctctgtcacagccgacccgaaccaacctcgatctgctctgaatgctatccccaaggcagtgctccttaatgccaaaggtcttgccatttttaccgttgtcaaagccgggttcatcttctctggccgaggaggaactggactggtcatctctaggctaccgtatgttctactgtctcagtcgtcttcatcggcttcaacttgacttgtctaatcaatgtgcgtcttcacttgtgtcataagagacggatcttggtcagctccttcgttgattggcacaggagggttaggttggggcctggtcagttcattgttttgtttaaacactgttgcataaagagcaacaagctcaacagcatatcacttcattctatcggactctatagcaagccggagcgtaagttgtcatatcttgtagatttaggtgtcatcagctagtatgtttctaacccgctgctccgtataccactgctggacgacccttttgtatagtgatatcaccggttcgtttgctgttctttaaagaactcaatgatcgtaaagagcttattcctgttgagattttcagatttcgtggtagttctcaactccgacgaggccgtgcgatctttctcgatgggaggaaacgtcacgattggaggtgagtactttctaactcgcgcgtcatccgtgctcttattgattgatcttccaattgttctcgtggtcatataggcaatatctcggctgccgctggcccaattggaacgggcggatccgttcagacggctttggcgagtccagcagccatgttcagctatagcaaatccaaaggattgttcgctggactctccttagaagtacgttcatacctgaaaaataactagcaagagccccttcgccgatgaacttttcgggcatttcaagcttacgcaaacaataaattaatggacagggcactgtgttgattgagcgaaaagaagcaaacaaacgtgagttttagtcttggtctccttgcttttatcgagataggtcatccctgagtgtcggctttctttttttgcctctggttagaattctacggttcggctgttccctccagggacattctttctggcaaagtgccagctccagagattgcctctcgtaagggtatcagtttcagaagatgaccgttgcctatgtgctaaaatggctgtttctctcaatcatacaggaatgtacgaggtcatcgaagctgctgaaggaatcgatgaatcgtctattcctcaggaggcgtatgttcctacggccatgggagagcacgtacctgtgaatgagtcttcgctcagggcgggcgcgcccggagctggttcaggaccaacgtctacaggattgggaaatgaaaaggggagcaagtcgaacgtggtgtttgactctggggagaccgggaagtaggccttgatgtttttgtgttttctttcgtactcttatttcttctcttttttattgttattcttgatcaccttgtttatgttttcccatcattggacttttctatcatcacatgatatctctcgtgcttctatctctttcgtaactttgtgctctcgatagttctgtcgacaatggtcagaagtgaatttttagtgggcgagtggaacctcttctgctctaattcaataaatctcatgtattactggccctatcccatctcgattcggattgattcctgatgtattacaaaaactggtagtttcaaagaagtcggatagtgtttttctttgtcaacgatcctaagtcttgctctattccccacagatgtgtcttagcgctgtatgcacaacagatgagcatcagtaatggtcgtgattgaataaggtgagaggaagaagagaaggaagaacccatttgaactcactcgaggaattctaagcgaagaccgtcctaaaatagaagggcagatggggaagaaagagcccttaagtcagtacatgtctcacggatatcaacaatggttatcttcccagaatctattagtatagtttggatccaacacacgcgaaagccccactatcccttcataagacggagaaaagaccaacaacagagaatgtgaaggtaaggaaagagaaagacctacaa

SEQ ID NO: 1590 - DNA, 3950 bp, Xanthophyllomyces dendrorhous
gacctacaaagacttttttaaattctgctcggagttttgacaagtcagctttactcgaactgtcttgcttgacactttctatactccgctcgacatcttgtatcctttttacatgatctgccatctgagtgggttgaacagttggtcgagcgtaaagttttgaggagcgtcgagatggcagattaagggaaaggattgtcgacaccagcccaaccccatagataacaaagagaagacacaaaaacaaaactcagatgtcagcacctcgctcaaagggcaacaaagaaagaaaagcatgcagaaccaaaagacgaaccaaagcaaccgacacgttcaactctctaactgattcctgcaacaagctggtgacttgcttgtattcttcaaaaatcttccaagacgcgaagccggatgcaatagaggtggcaagtagaaatccaaatgcagctcctctgaaagcgcctatcggttttttaagctgtaggtttgaaatgcacgatgttcaatcataattgcttctgatatttaagaggagagggacatgacaaacttggatagatccgacggtcggaggtgacgggaccggggtagccaaaggaaccgaaggttgggaccgagcagcagctgaggtactgaatgctcggccagattgagcagacgaacgaaggagcgagtatactggacgcgatgagagattcatgatagcagatggtttttaccggtaagaaagaggagagaacatcagagggaggtccggggacgtagaggagctggccgaaggtaaatgatttacgggaaaatcagatattacctatctcgagcacagcaacctcttatccacgtgacccaacttagccgattcgaatttagccgatgacatcgtcgaaacctatccgcctgatccgccggtccctctgccttcttgggtgttgagcgctatttgatcgcactcgaaattctgattaagcgatacgttcgacgctcaaaagcggaacctcatcgcacatcccttcatcttttctctctactttcctactcttcttccgtgtacctcaaacaggcatgctcctttctagatcatcaatcaagacttcatcttcctttgttcgagccatgacttcctctgctccccgatatctctccctgctcaagccatctacctctctatctagcttgcctgggtcgttttctcaggatactcttgcctccaagctcaagctcgcccaaccggatttactccgatacaccaactttgttgatggaagctgggtcactccatccagagaagatgaaggtgtcaacttcgaaattcgagatccagctagcaatgatgttgttcgttcagtttccttcgcgtgagatctcagagcagatactgataaagatttctttggattaatccggtatgtctagattgcctatgccccggatctgaatgccgaggaagtcaacgaagtcatcaaagtggcagacagcgtgcgcaaagagtgggcccagaccactgctaaggtgtgtagtacaatcagttccaaactcaagtttgcatataaatatcgaacgtcgattgactcctcgtggtgtacatgggtctctctagcatcgctccgacttgctgaggaaactaaatgatctgatgatcttgcatcaggaggatttggcaaagatcatcactatcgttcgttcgaatgtatttcatccggtagttcagcgagatggtccgataaacttatgacccaatatatgcctctttcaatcccttatcaacctatctctacaggaaaacggaaagcctctcgccgatgctagaggagaaattgcctacggagcctcctttgtggactggttggtttcttttccagcttatgtttgacccttgaacttggaatgaatcctataggcttatgtatcaaatatctccatgaaaacaggttttctgccgaagccgtccgaagctacggagataccatcccttccgccactcctggacttcgaaacattgtcattaaacagccggtcggagtgtgctcgatccttgcttgctggaactttgtaaggtcttgttatcttcgcctgcgggatatctacacagaaatgcttgtgatcttatcgctgattctgcctctcttttattctcgtgtgttcgtctgtatttttctttaacgatagcccaatgccatgattgtgagcttcatgtctgtttacattatattgtgtgtcaagtacatggccggaactgaactttattctcgatgaattaacagaccaggaagattgctcctgcgttagcagccggatgccctgtggttgtgaaagctcctcctgagacccctctctctgctctggctatggctcgattggtcgagctggccggattccccaagggtgttgttaacgtttgttcctgtttttcttgttgtgctttcacaccgcgtatatgctcgagtgttgctaaattagcctacactccatcgctacttcacgaacttagatcatcacgacagacaagaacaccaaggatgttggaaaggcaatgaccgagaaccctttggtcaggaaagtctcgttcaccggctctgtaagtctgattgtcaatttagtgtaaggacgagctcggacccataagaaaaggctgactgagattggtatattcgtcaatcgttctagagtccggttggaaagatcttaatgagccaggcttcgtctactcttaagaagtgagtactccgtcttactttatctctcgattgtcagaatatttacctcgatcattttgcttgttaccaaaaggtgctcctttgagctcggaggaaacgctgtgttcgcaggtgtgttggctgttggctctttcttgcgtaataccaaaatttgtgtaaataatcgctaataacctttcatgacggcgcaacacttagttttcgaggatgcagatcttcaaaaggctgtggaaggcttgatccagtgcaaattccgattgtctggtcagacctgtgtgtgctgcaaccgaatctacatccatgagagcgtgtatgacgagttctccaaattgttcatcgaggccggttcgtttctagttttccgtgctcgtcctctgtttttgcctcgcttatcaagccctgctcctacggatttccatatagtctccaagttcaagatcggatctggtcttgattcctcagtcacccatggtcctgtcattcactctcgcgcactcgccaaggttcagtcccatattgacgatgctgtgtccaagggcgctcgaatcgctctaggtggacatccccttaaagagctcgggcctcacttctatgccccgacagtgctgcttgacgtaccgcttgatggaacattgatgtccaaggaagagacttttgggcctgtggctggcctgatgaaattcagtagcgaggagcaattgattgagaaggccaatgataccgagtttggcttggctggatgtgagtatctgtacttttttctgattaatcggataaggactctgacagcactcgactcccttcgaatatagacttctacaccaaagatatcagtagagctttcagagtttctgaagcgattgagtgcggaatgctcggtgtatgtctcaattctctcaaacttgttacaaaccgctgagcacttgctaattgtggattacatgcttctctaaatctcacccttgaagatcaacactggtttgatttctcaggctgctattcccttcggtggtgtacgtcaaagcattcccacttcgtttgagatgggtaccatcagattctgactcgttcgtgtgtgtgttctaccaaacagatcaaagaatcgggcttcggacgagagggaagcaaatatggaatggcggagtacgagtaagtctcgacctttctcttgtactcctttagttgtgtaagatcgtcaactgattgctcgatggttttcatcattctgtcttgata

SEQ ID NO: 1591 - DNA, 7480 bp, Xanthophyllomyces dendrorhous
attgtaacagcagtggcccatacgctgcatttgaaacttcttcctctctctctttctctctctttgtcgtcatcaaatctatgagttaatatcaaacatggtggaaatcaatagaatttttgagaattgagccatacggctgacgggatcgaagaatttgagccaaccatttttgactacgtacagcaacattttccatcgcgtggcattttgaacgtccctcaaatacggcaggcaatggatacatccggcgatcaagtcgtttcctttttggggattccctcatcacatctcgccccagtagcagttttcgtgtcatactttgttctgatcgcttgcttgttcagtctggtcattcctcggactctcggcgcatcttatgcctctattaaatctcaatctcaagataggaggtgtaggaggtatgcagccatctttgggttgctgacattgggcagccagctccatacttggtatcgtgaggtttttttttcttgcttctttgcctcgatcgtctgatagtctgacctgttctgaacgaatctgtattacttcgtgttctcataagatatgatcggatacatgcgatggtcgtacaccaatttctatcagactttgccagcctctccttcgccatcccttcgagcgatctcattctggctactcaatacatctctgttcactgaggcatggtccatcgttcttcaacctgggacgccattctggatatcggatcacatcactagatttacgtgttgctggtggacgttcttcgtttatctgtcgatccaacgcccagctcccctttcgagcaaatcaagtggcagttcatctcacctgtatggatcaaaagtgggaaaggataaggctggccagcccgaaagttcatcattaacatctttgaaagatgaaaaatggggaaatgcctcggcagccgccgttctactactcggtcaggttgtggcgatcagcgtagcaagcaacatctggttcgtaggttgtgttaaacgaggtttccctattgtgggggacggcagggtccgggatgtgccagtcaaggtatggggagcgttgttaggaagttcaatctgtgtgggagtgatgcctttgacggtgaatcgtgagttgaagccttcttccaaataatttcttttgcttgaaggtatgtgtgaactccgtactgacttgactttgacaatatgcgctggatggattatttcagaaccttcattcctaacagttgtgagtttttgaacatcattacgctcccgaacgtagccttaactattgaattgactactgagatacctcatcacgccttttatctttatcttgggtatgtttcttttgaacagctcttgattatgcacgcactactcttcgttcctttccttcctacccgtctagccgacggcccctcgtccttcaccctcactccgacccaagtatccctcctcctgctcgttcctcctgtcgtttcctccatgcttttcaacctccctatcctgacttccccatccgtggcgcttaggacgttcctagcaggaaatcatgcccttcgatcgatcggctcggatgctgcttggtgtgcatttggtctggtcgcttgggccagttggaaggttaaaggaccaggaaagatcagtagaatagtttgctcattaggagccttctgggtgggtggagtcggattaccgttaggtctggattgaagctatgtatcgaacagaattcttagtgaacatgctttgtatctcccatgaggactaccatgaaaactgatacgagaaatgttcggctctaagaacgtaccgtcgggttgattacacgctggcatgaccgaataaacatgttagggttatgtgaacgtcattgacctccactttctagttgtttgttgaaacccatcgaaaaccatcttccttcctcaacgttcacttcttcaaagatgtccctggcttccgtatctgatacgatcaactcagctgtaggcgtgatccctacgacaccgttcaaacctctccagtgtaagcttgtgaaattcgtatattttctccctgaatgtgattggcatgcaggctgatgaccgctcactgtatcccgatttgctcttttcctcgccagctatctgccagcatttctgcgcgtaagtcatcttctcaactatccaagtccaatggatgagagagatatactctttgcagatctgatagaatctgtgactgatcacgatttgattaggttccacgcatatgccaacgatctctcgcgccatgttgagagtcagtctatacattctgcatcgtcatttgaatagctcatacctatctgacctattctgtccattggtgccaaggtcaccacttttgtacccacctaagcccggattttcatcagtgtttgatctatgatggaccaggcgatggggagggaaagtttgacgggagaagattgatcgggattgaatatatcgtcactgagaaggtttgttcacaaatactggcccgacgatccaccagtaagactttgcatggaaagaagaccaacacacactgacattcctgggtataggttttcaacacgttacccgaatcagagactcaatgtgggtgcaattcttatctaatatctcgcgcagtcgtttcagctactgcctctatgtaaacggatccgatgatcgatatggctgatcgattctgtgagaacgacatgtacagactggcactcgcacaattatgaggtgtctagtggaatgctcacccttctcggtatgaagggcgtacctggcttggctacttcctccgctgaacaaccagcgatgatagagttgcaaaagacgtatggaaagacgtacgtaaatcgctttaatatcaacatgtactggcgccgttagaatttatcgtttcatcccggttcaaaattcaagcatccatacatggcagtcggatatctatcctgatcttcctctaggacctcctcaattgatggtctcctataccggcccgtacgtccttgatacgtacatacaagattctcaaatactaagatctaaaactgaaaatgtactggatatacatcagaaaccaactcccagggcatttgatcgagaagcgagacaagcaatatggaattgatactgccgaacaagcaaaaaaacgagagggatacctcgacatggagttcgaaccaagcaagaaggctgatttggtgatgaatggaggcaaggtatgttgttgttctactcatgcaagcttgagtcgagattgcgcatattgagagaatagatagttgatcttaattgtggttcgcttgctcgatgagcagaaagtaagcttggacaaatagtgcctggaaatttcgataggatttgaataaagggttgttggtgagagagatgggagagcatgcttatgtattgaatacaatcttgcagtatgtatcaagtatgtatcgatgaacaaagaatgttagcaaaacagtagattttcaagacgaattcttcagtcgaccatacacaggacttcttgggttgtatgattgagtcgagcgtacttcatcatcatcattgatacagaccaccaattttaagcttcatatacctcttatcttgccccacaaacgtctttctcactttaaaagagagaaaggtgcttgaggctcgttcatccggaacgtgatggtcttcgtttgtgtaaaagaatcgatggcatattttccgttgaatcgaccgtacccagaagatttatgacctccatggggtagagatctatgagcagcccacaaattagcatatatatagacaagattatgagaatgagaaaagtagagagcaagaaacaaacccttggtcgtgtacggtattagagttgatgtgcacagcggaacattccagcgcttttgcgacctgaatagcttgtcggtaatcctagggcatcatgtcgaaagtcatcaagctcgttatcaacaagaaaacaagaaaatgtagtaagaatagagcctacctctgtccaaacactcgaactgagcccaaactcgctatcgttggcaatctcgaccgcatgatcagcatcgtttgcacgaattatggagagtaaagggccaaaggattcttcaaagtagacgttcatctgtgttattgataacaaatagcgagaacagataggttgagaggaacataagctaatattcatatgagaccaaagtgagtagaatatcgatacaaagcgaacctcagaagtgactccctctagaacgatgggttgggctttggatgaatgacatttttccaagctgtggatttcgatcagagaagtcgcgccctgagtgacaagatttacatatcaaaagacaggaccttggtaagaaaggtggataacctataacgaataagaagagaaataactaagaaccgatactaaccttgttcaaagcatcttttaccaagcatttgactttctcagccgatccttctcctgacaaccccatctcagcaacttcactttcatcagtcttgagtgctttgatcagatcagtgaccttgcgtttcataacggcaacaaagtcgtcatagatggaagagacaacgatgactcgctcagtggccatgcaagtttgtccggcatggaaactagaaccaaagagaatctagattcagacagatggtatgagagccgctcagacaccactcaaaagataacgacgagtagaaagaggttagaatagtaacgaacagtgtgagctgctttctctatatcggccttttctaaaacgactgcagcagccttgccgccaagctcgagaattgcgggtctagattgagcgatatgatattatattcagcaaacaagtacatgccaatagatgcatgactgctcacttgatatatcgtccacaaattgatccaattttggatcctactgctggggatctatagaataggtgttgagaaaccagaaacaaagcaaacacagttataattggctgtttgattcgaatgttaacatatatatatgaagggcacatacccggtaaagttgaccatctacgattgaaggcgttccaggagtggttaatgattacgaacacgttcgaaagctacagtatctagatgatgggcaagtcaattaatgctcacctttatatctttatgcgcgatcgtttgctcgacgagtgacgacacattgtcaggatcgaactgaacaatgtttagtacgccatctggcaagccggcgtccttgaataactctcccataagagaatgtgtatacggaatcaacggagagcctagttaaggtttgaaaagttttgatgcaataatataaagacaagagacacgttcagaagagtaagaaatacattctcgagagagatgatgagtttgagtcgccaaaagagagcaagcacctttgagcagaacagagttgccgcaagcaagaggccatacgattgctcgaatagagaggatgagagccatgttgaagggagagattgaaaagacctgtaaacgttgacagaagtcaaaagaaacaaatactttaacttcttcaggcatgtaaactttggagcagatgaagcgacaagaacgcaccgttccaaagggctctcgagtaacaagtgctaaggagcctggataagaaaagagttattcagccggaataaagttgattgagcatgtatcaaggtgactatagatttgatgcgaaggaaatgagattaccgtcaaccgtctgaggaatatcgcccgtgatttgagaggtgctattgattggatgattcgatggagagggtttttatcaacagttttagtgatagattcgacagcgtccgaacattacatagtacacagcaaagcgagaaaataagatcctacattgcagcagcttcttctattgagttgatgctcaatttgaagtcaacatcctgtgtgagcccagtcgcgctcgtctcagcggcttgagcgtccctgaagattgctttccgttcatgaagcagctgagctactctggttaggatctgtcgacgctggaaagctgttgtagatgcccaagttttggctccagagcgggaggatgatatgattttggagctgaagttgatgaagaagaaaatgagagcatttatcaaattgtcgtagcaaggaagtggactaggcaacagaacgaatcatacagttgagatgcatcacaggcagaggcctgagagatgtctcaagatatggaaatcaaccagtgatgagatgaatgagctagtagtattgcttatctatacacttaaaaacccggtctaacctacctgggtagcgatttgcttagaggccggatgcctaacctcaaatgtaccagaagtatcaagaagtggtcgattattcacccaaagaggtgcatacttgacttctgcagcggaagcgttgcacagtgatatcgactgagcaaacaacctccttcctgtatgagcgctcaaggtaagagctacagcatgttgggataacctatggatcatctggaacaaataaacacgagaatcaacgactcggatgatgaacagaagaaaagaatgtctggctgtttcgttcatctccgaatgatagcggtgtaagatgtatgtggcgataataatcacgtggctcggttaaacaaacccattccatacacatacatacactcgcttctatctctttctgtccgtcagcttaaccttgtcagactcttcgtactagagatggcagactcagagtagttcgtattagactatgctcctactgaactgacaatcaagatcatcttttttgaccaagctaagctaatgatgaaaacaaaacatccggcttttgcattcagcctagacacatcggctcctattgttctgccttcggtcttcccttcacatagaacagatatagacgacgaccgagacgacgaagacagaaagtcagatggagaactcttggatgagcttctggaggaggaagctgatttcgattggggaggctttagagaagcaagaatgcagcaaataaaggaggagtatgtgtttcgttccttggtgctgtagtgacacacatccaggctattcactgataaatcttatgatctcttctctggattgggatatttgcagagcgcaaaaacgtttgcttttacaaaatacccttcacggccgttataccgagattaagaatgagaaagagctaatcacgaccgcatcgtgagtgaacgcttcctttcaacaaagagcatacatcgcttcaaacgctgagtatgatgtcgttcaccttcttgtttgtttgatgattacagaaaagagccatactgtatcattcactttttccatcgagacttcagacggtgcaagattatggatagacacctcgaggttcgcttcttggcttgatatcaacctcatccgctccgttcttcctcgactgacattatccaattcgcgctcttctgaatacatcaacgacctgtgaaactttttgttg

SEQ ID NO: 1592 - DNA, 39482 bp, Xanthophyllomyces dendrorhous
ttgttattattattattattattaaaaatgacagaaaatagcaccggctcatccaagtactcttttcctgaaggcggacgtgacgaatgtaccatggctggtccagaaaatgagcgtcaaagtcctgccatgcgtaatctgttttgtgggaggagcggccaaagacaagttcgctctactacctcttctgttgtgtttttgatcatcttgagtgatcagctccaatatcatggtctgactctcactcttcgttgctctcttttgtcttcctttgtctcaatcgaacggttttgttctcaatccctcatttgtaaaaatctaattcaacaaatcctcgtcaggatcgtagggtttgaagatctttcttcgatacccggtaaagaggatgaattccaatcgggggctctcgaacttcggttcaagcatagtggtctgtccttgaatctcgttgttaccctttcaaaatcatcctcttgtcactgacaccttttccttttcttccctgtgcccttgattctttcacatcatggttgatcatctccaggcgtgattcctaaaccaggcgctcctctcccaggtcaactttccgctgttgactacaactttaccaacactgcgtttgctaggcaacgtcgagctggcgcatctgaatccggagggattcgacaggcgaaagcaagagctggtagtgatgacagtggtagcgacagagactagaacaaaatgaattcaaagaaaacaacatacgtcgtcatcttccacgtctttgggtacatctcatttgtgatgacttttttttccctctcatcagcccagcgagcgggtagcaaatacgggtaagagatacatttcaaacaataagcgacatagacaacgacaagaggtgcatattaaagaaaacagatcgagcaagaaaaaaaaaggatttataatgaagaaaatatttttttatgttgctgtcaaggagtatagcgcaaactactgcgtcagaaacgttttacaaatcaacatgacgttttcattcgtatcgctgcaactgagacttctggtaacatgcagacgaagggtttgacacagaacaggaagacatgaaagtaagtatgttgtcgcggacgagaatgttggttcgaggagcaaaacatgacagaccttatccttgaaaggaggaagaccagcggctatccttgttcctccaacgagaccacaccaatcaagattgccacctccgttggctcttgcggcaatcaaatgctgatgggccactgtacgaagacaacagatggccatgatcagaatagaaaaagaaatttagttacagcctagattgagtacgtacaatcgatggtgggcattggcacgttgtgctcctcggcgagtcttcgaatgtgaccggcatctttgatacctccctgcagagaaaagccatcctctccagaatactcattctgtcgtcaaattaaaagaagcaatgttcaggctagttgatcgagcggcatacagtcaaccaagacctcgctgcataccttgaggatctttttgccgtaagtgaggaatgagggcgctgggtaaagctctgtttcaaagaaagagaagatttgatctgagaaacagaagccagacaatagactgaagaaattctacagaaggtaacgtaccctgaatgagcttgtacacgttctccttaccgactccgctttggtcggctgaagccacatgaagccatacagaggtcagtacagtctgaccacgactctgtgcctgaggctcaagataactgtcctagacttgagaacaggactgaccaagtgtcatggtctcggagagcatctcgatagtggccaagatcatactgtttccgaccaacttgaaggacgcagccttctcgacgttggacccgagatccatgacctttcggccaagggcaggaatctgagattgagaacagaaggatggagatgagctagctgagccgggaacttgtacatcatgggcgtggaaatactgaccagaacgtgagacacgctctttcgggaccggtaatctggtcatgaagagaagaagcgtccaaggacgtcagtttggttaggctgttcaagtatagacttaaccgaactgtcatagcgactcacctcctgagatggcaaacacaagctgagcacgagcggcagcatcgggccgtccaaacgcaggacaagtgaggaaatgacgagttgacttcttggaggcctctcgctcgagtttgccagcagtggcctacgatccaaagaaacaacgtatgtgtgaaagtaacataggaattgatttgattagttttgtatcacaacaagaatgatagaggattgactgagcagaactataagcaggaacaacatacggggtagatggtggaagtctcgatgtaagtcgtatgcttggtaggtcggctctcctgaggttcagaagatgagacacagctggtcagcatgagttcgctgagccactatcggatcatcgtttaaagggaaagagatatgactggtactgacttcatggctcttgaaaagctctaggtagatttcctcgacggcctcatcggttcccaagctggtaaagatgtagtcgcactctgaagagtcgatcaagagtaatctatcagcaacagaagctgcatctactccatgtacttaggcctgaaagactttgagacgattgagacttactggaaccgatctcggagacgtccttggcaacctgaatgggaacttcaccatcagctctcttctgggtagtttcgagaaacttgtcggtgtgctccttggttcggttccaaaccaacaaaggggcacatccttggttgtgaacatgaacggcgaggttctgtaaaggtttcagaagaaggtgattgtcagacagtgtttgttttaggaactatgatcgagagatgagggcgaggagatagaaaagcaaagaaaaaagggagaaaacgaaaagtggattgaataggtacacgggcaatcaggagaaggaaaaaaacgcactagagccatgtgctttcccatgtttccgagtccgataaaaccatatcgcttctgtaaggcgaaacggataggaacagaaaggagaatcacgcaagatgaaagaaagagacaactgtgtgagctagacgccaaagagaatccagtgatggaaacgaatcaagaaaaaaaaagcctcacggtctctcggtggccagccggggaagaaggtcgagagaaagggttaggtgcttcttgaacaggagtgtttgctccagactgagctgcagaaggagtgttgggagtgttgggcttgagtccgaccatggttttgaagattatgtatgagtgagtgtgttggaacaagttgaatgagagatgaggcagaaggggaaaaaggggaaggccagacttgagcgcgtcatcttttgccccaactgagatggctagtcagccttccagcctgccaggccaatcgattcgcgctcgtccctattgttagggtcagttccctaggtacttgatctccttcgatcaactccattcttccagtagcatcccgttcgttcttgttcttattcgcacagtgacatcgaccagcatggcataaccaactcaacaaacataacgacctatttggagacattggctaaccgatagaatactgatctacttgaaagaagaagaagaaaacaaacatcaactgattaaaaggcatctctgtcgatcaatattgacgtctgaccggacctttgtgcctgcaactgatccaggcacgatccatcaggccgattgttacccgaaggcgagagcaaagaagaattaaagtagcgcccatccgatccgctcacccattctgatcatggaggacatgttgatcctcggctcagagtcagaggggagtctggatgttggatcttgcccttgattactcattgcgtaccttgtggtgaccgtgtccgcccacgaaatgttgaccggccttttttttccttctgctgctcctcctctagcttgtttcacccagttccttgtgtccctcgaaccccgagatgtacctgttcatttagaaccgaagctttcacaggaaacaacatgatccagtctccatccttcatccctcattcatattcatctctcttcccctctttctcttctgttcacctgtaccatccatctagacagattcgatcaaggttttcttcgattctctctcgccctcgttcttccttgattttttccgtctcccttcagctccttgtcttttccaagaacctcctagccacttatgtctggtaccgttctccaggacagcacccggatgaaggacagtttgagcccttcgttcacgccggtgcctggacagcctgggtttccctacagcgacgcatgggacaacttttccaacagaacttctgccgtctgctctgggatctcgacgtttccggcagaagcctatcggtttggcgctagcaaccaggccccttcggtcaatagacagccatctgacgagtcaatggtttccagtccctcgtcatcggacgaaaccggtctatcgtccctgccgagtttggaaggcgtcgggtcggtgccttcgaactcttcaataaacagctccaactcgtcaacgttgaactcgccgctgttgcacaagaagtctccctccagaaacaagcacttccttcgtctgccccataccgtcatcaacactcctatccctccttctcttctcgatcctaccagacgaacttccttgccggtgtccgctggcacttcttacacttcgaatttcaacattgctgtcaatcgatcggcttccatgtcctcctctcagtctgatgggcattcttcccttggtcagcaggatactgcgctggcaacggacgatgaggatggtgaaccctccagcaatggatctaagggcacccggcctcccctcaggcccatggtgcgcaaaggttccaaaggaggatggccttatgataaagcgcctcagtcagctggttatggccatgctcttggttcttatactggcccttcacccttgtcaacttctacgtcggctacatcttactttccaccccaagccaagtcgatatacccagcatataagaatgtcgagggctattcatatgatccttccgttcaatcgaccaaccagtctcatactcctcttgtgggaatctccaagtttgcgtcttaccaacagttggcctcggctcaggcagcctccttcaacgctccacccgaacaaaattcgctggctccgcccagaggggtcaaatctcaatcttcctcacttgcgccccctccgctctccataccggcgagcaattcaggtccgatcactcatcttcttcttgatggacatgccctcaatcctctcttcgagtcccgatacgatctcagtgcagttcttgggtcgggagggtacggcttcgtctgtgttgccgtagataaaagacgcaacaaggaagtagccgtgaaattcattctgtcgtccaaggtacctgcccatgcatgggtagagtggacctgtcaaggtgagagcggagatggtatgcctcctttgggcgggaaagttccgatggagtgtgagctcctcagacggatccgacaccagggggttgtccgaggagaatgggtatatgcagatggaaagttcttctacttggttcgttactgtctactctttttctcaacgtatatctctcgagaaccgatctcaccatcgtgtgccatgtcacattgacaataatgtctcgacatcaggtacaagagcttcatggtgcctcctggtgtccatcaacacctgccaccccggtaacgcccagtactccctcgactcccgccagtccacacatcacggcagccaacctggctgatgtgtcctcaacgttagctttggatgcaactcgattggcttcacctacaccattcgctccttcgtatcctctccctgcctcgccagcttgtggtcctccatcgctgattcccaatggcacagtgccgccactctctggcttggaatccaggagaccttccttgaatatggagagaagaggaagttgtgatctgtttgaatgtgtagaagcaaacaagagatttagcgagcccaaggcgagaggaatcttttttcaagttggtaagttcttctgcgttacgcatacttatcaagcatcatacactggctcatgacttcggctgtttgggtcactagtcgaaacggtctacgctttatcaaaggaaggtatctatcaccgagatataaaggacgaaaacatagtggtcgaccgaaaactcaaagtgaagctcatagactttggtagtgcggtttgggaaaaggagccggagccagtgagatataaggacttgtgagtgctatccttaacgttctctcttatcgagaaaaaatttatcaaactgtttatgcccgttcgtcagttttggcacgaacgcttatgctagccctggtaagtataacttccaatctgccttcggctctaaggccacagctcatcgacatttgtttattctcaaccctggattcatcagaaattctgcagcgcaagacttatctggcgtctgaggctgaggtctggtctcttggcattctcctttgcatcctgatcaccggcgagtctccattctcctcgtcttctaacgccatgataggccgtcggtcgcctctaaggaatggggtcgtcatgtccaaggagctcgttgatctgatcgataggtgtctacaagtcgaaccagagaagcgcatcaatttggaagaaatgagaggccacaagtggtttagatcctgagctctgctaagtcctcctctggaatttctctttctttctcctctacattatatgtttttttgtcctctatctttctttgttctcaaatgtatgttttctccatttgcatagtcgctgcttgatttcttcttgctgagaattgcagttgtcgttccattctctcctcaaattttgtcttccaagtaccaatgtcgtcatctctacttttgacttggttcccataactttgaaggagcaggcttctctcttcttaatgtttgcttcttccagactcggtggtgatacccaactttctaaacttatacctatcctttttctcccatctcaaccgattccaatctcgtagttagacaaactgtagccaacattcaatccatccttattgtcctctctacaggacatattataatcgttcgacatcccatctttcttttttgttccattctctgataaattcaagacccagtgttccatcagatgtgatgtttgtcttaatttgaactaaattgtcgtctatcagtggggattgaaatgcccatgaatctgtacacttctttctttctttctccctcccatgtatgcaagaaagcaaaagtgtccgaaaaggcaagaaagaaagagatggaaggttgaatggaagaaagcaggatggtataaagcaagaatggataatggatcaacagcgcaagacattgtaaaaatccgaaaaagaagatgaggagtggacaagacgatagaatgaagaaaaagagagcgaaagtcgtaggatgaagttatagcacaaatgaggggggttcaaaacattccaaaactgatagacgtgatctatactgtcgttgtcgttgtatcggtagcgagatcagccggagaggtgtctagaccttcagaggataaccgtcgagtagagcgatcgactggtgtatccaacaactatttcgtttgttcccaagacccagaaaaaaaagagtagcatcagtatcgccaatgaagaaattcagcaaagaacaaatcggaatctagacatacctccttcctgagttgttctccactcaaatgttccgactcgtcctcatctatctctgccgctcccaataagacaccttttctaaagacctcaccctcctcctcgatccaatgggttctcttcttatccgtcagagaatcgatagaagatctgctttctttctcggtccctcctgatgcatccttcttttgctctgccaaggcctgtccgtccgagcttagcacgcgtgtggtctggatggggaactggtagtcgcctggttccgactcgttctcatcgtccgaatcgccggcaatactaaagttcgggctgactgccatctcgttcgatcttgatgaggaggaggatgaccctcgatgaggaggagtgctcggaacctccaaagaggttacgcccgagggaccgagtgcggaagaagatttcgatatcggattcttcatcatctccaaccgagctttcttctcatcggacgctgcctttgcccgttcagctcttgaaagctgtgtggtcaaccgatcgaccaacccgagaaggacctgcagtttgtcttcttccgacgacgcttgagtttcttgaacggccgctgactgttgaatcatctcctccaaccgttccctcagcgccttggcttgctcgatcagctcgaggatctcatccaacacgacacctagcgagttatgaacttcgaccgattcatccagcgaaacgatgagttcctcggaccgagtgatcaccaccgtagggctatattcgtacacggtcaatcgggcttttcccgcaggcgtcgatacggcggattgaccatcagcaacggcacgggcggtgtctgcttctttcacaatccgggccagagtagatttctgaataggtccccagacggctgcacgggaggctttcgatgttgttcgctcttgagcgagctcagtatttcggatgcaactctatgaaaaggagaaaaaaacgagtaagacgaccagctccgaccaagttgcccaggttagggaatagagaaagaatgaaacaaagaaaaaaaaagaaacaaagaaaggagcctagacgtgcctggaggatatcttgagacaacgtagcaacatcctcattgttgaaaggaatactaagatccaagcaacgcatcagtcggttgcttcggagtccgacagcgagtgccattattcctgcaacttcaatcccctggttcatagtcaggtccagatggagcagatgcctagcctctgggaagaactctgctagcgcgatcgcgccttcggttgttagacctgtatcagcaaggaacagtctttttaggttggtgttgagcgtgaatgatgttcggagaccgttgatctgttcagtacatatgagatgtggttcatgtcaattcggaaagtttggtttggacttcgtcgtgtgaatagttttgaggtctttggggcttactccttcaagtccaggaccggagcacgggttatggttcaaatccagagtgtctaatgtagagttgtatttctacaaaaggcacaggacagttgagatgtttgagtaaccttcagatatcagatggatctagcccataattgaacataccaatgcttcagccaatgctgctagtccgagaacatcaatcctgttttcagctaagttgatcatcttgagcgtccggtttcgcttgaggacctgtgcaatatacgtgactccgccctgatggagtcagagaagaagggtgataaaacatagaacgagaacttggtaagaggtctgagttgtgtttcacaacgttctttttttttcttgtcttctgtaatcaacgattgacatacgcggagatcgtttcctttcaaatccaaagtcactaggtttccaattcgctgcgcgtcatcaagacttcgaactctactctgcatcatcccacccaatactctgttgactgcagacatcgccttgccattcccttcctcggtttgaccaatggatctgtcgtctcttccggttggatagccttccggcattgttcttgatgtgatcccacctcctgagtttgatacaaccaacgggatggtcggcaatacacctcctgggccgttcgtcagatcttcgagttttcgtctggaacggggtgtgtacggagtatatgttgtggccatcgacgcttgctttcctatgaaaccggaagacttgtcggcggtagcgaagggcgaagaggaggaagacgaaggcgaagagggattgacgtaggaaggattgaacgggttggagctggaagtggtgagattagtgtctggataatccttgatcattagcgccacagctacaccgccaaggctgttgattttgtttcgacgaagagaaatatttctgatgttggacgatcgaacggcttgggctgtatgatgggagcagatcagggtgatcgttagtcggaacgcatcaaactcgtgttccttgcctgagcacaaataaacgactccatcatgggtatagattcgtgcacatacctagactctcgagtgcattcgctcgtagcacacatccatcgactctcaacgtctccaatccctgcctctgtcccactttcgtgccatcatctcggaaggactttgttcgatcgagttccctctgtttcaacaaagaaacctgcctggtctttttcggttcggcttctactctgacttgtccctcgacttcgtcagactcctgatcgtttgataccaaaatcaatccaggctcttccgtgatcgctagactctctcctcgaacatttgcctccaaatcttcggcctggtccggtcttttttgcttttcttttggacagactaatgcttcggccaatgcatcgacagattttttatcaaacgtgttgtcggagatatcaagatcccttagcgatagattttgtgcttgggtgaggtagacggcaatgatcttccagctcgtcgtttttagacgacgattcgatcggatagatagtgttggtagggattgtgagtgaaggagtgcgtgaagaatacttttcagggccttttgatgttcaatcagtttgttcgaaagaaaggaagaaacaaaggaaacttgcgtcagagaacgagtctgggaagtcttgacggatagaaagaaaagttttaacactcacgtcatcaaacagatcacaatcatcgagtacgagcttggaaagtccccattcaatggccaggacgtcggatagagcatctgccgtgaaacggggtaggtttacgcctgttaagtcgagtactctaggagtaggaggcatcacatcgcccacttcctattgattcaaggagaaagaacgatgagcgcacaaattcagtgtctgactcgttagtcacccaagcagatgtttatccaattccatcagcacacatactcctacgcataaagagggacacaccttgagcgctctccaaatacgttcgtcgacgccttcgtctcgcgccctacatgcccgctcgtacaagtccaacaacttgagagacgaccaatactgccagccttcttcctcctgaagttttgcgagatatttcgcttctacttcttctctcgactgtgcgacggattcagaatacgggggtaacgcggacaaaattgggtacacgactgatatcgaaggcagatggaacgaggctcgtttgaggaagacggaacgctccggttgaatcgagtcggaagatctagcgggaagcgtagacgagtctagagagtggtttgatgccgatgcagtgatttctgaagaagtagacgaggcagaagcagtattctgagcaaaatcggatgatgaggactgctgaacggatgttgattgaatgttgttgagcgtcatagtggctgccatgttgagcttctcaaacgctttggagaaaaacgcgccggctgctgttgtcgctacctgaggggttgctccgtccccgttcgactgatactgttgttgctgcgattggttatgctgaagttgcccactagtcctagtatcggccgcaccttgagaataaggtgtctcacccatcagtcttgctcccaagctccctacgagatctctaggctgtcggcttatgagtgaagcgaacactccttttggtgcttgtttcggtggcttgagaatacctctcatcggcggcggcggtctcctatgcggtggtggaaggacaggaggcgtggggatttgtgttgagggctgaaggatgatgcgagggccactcgcaggaacggaaccatcaaaggtcgatgaggttgacgatggggtacgcgacggtttgcatacagaatcggagacagaatcaaacgaggtcggcaactttggatctacgcgagacggagaagatgatgttgggaccaaggctggagtcggagctgatgaagcctcaacctgggtgccggtcgagctggcgtctgatggtgcgtccatctgtaggtcaaaggtcaaatcagaccaagagatatctgccggatgtatgttgatagacagaacgatcagatacaatctatgttgtccggcaaatcacttcaatcacaagaaagaggagcagagagaacaacaggagagaaaagcacgacacaagcgtgttgtcgtgttgagaaggacgactgatgcaaagaaggaggctagacgacgaagagagagactctggaagaagagtgccaccaaacgatcttatctcacacacacagagagaaagagagcacgatgctactaacaggctgggaacccaaagaggatttgtgtgtatggtgacgttgatcagaaggtgagagatgcaagcggaaagagaccagaggcaaacagaagagagatcgggccggggcccaaagagtccgttcaaaaaaacgtgttacgcgtaattgtctgctctcctttcttcttctgaggatgaacatgtcaagtttcgttgcgcttcaatctggtttacttgaatgcgcatagctcgtcacaatcgtatgataaccattttagccaaagttatgacgagcatctctgaaggcagggatatttgcggttacaacgcctcagtatagaaggtttctatcttgcgttgttgctggagctgaaaggaaacgaaagaagcagtcttggggtttccatatcataagcaagatctagaagaagtattgatcaatcttgctggatcgcaagtctagttttaacagaaggtacgggggatagagaattctatgaaacataaacgccgcatcaattctcaaagttgacggtcagtttctgcccaagcctagattgatgtctgacctcaagcttctccttctcctcgcgaactctttgaactgttgtcccagccctcttaacgcttcggctgattccaactcttccgcctttgttttccatcctgtacttttaatatcgcttccagctcactgagcgctttttgttcttcagccgtcgcggtctgtgaccctatcagatgtccaaaggtagtcccgtcgagaacgatacgagtatcggaagcagaagtggtaggaaggtcccggaagcgagattcatatggagaggctaatggtgagttagcaaacgatgttgaggttgaagatgacagattgggtcgcgtgcgggttgctgctgattcaggttcctcgtctgccacaaatccaggaagagggaagtcagacgagctggccgactggattcggtctctactcagagaacgtctatcctcatgtgactgaaatgaatgatcgtttgatgatatgagcggcggctgcttccttgaaggttttgatgatcgtttcgagcggaaagacggatttgaacggccatccatgtcatccggaggtaagcgtatatgctcataggccttttctgacctgttgcggtcaccatttctgaccttgtcttcgtttccgttgtgagtgagcttcatgccaaactgactacgaccgccattcttagaggatgcctgactggaagaggctgcccctgcaaattgagagaatctatccgggatacggtgcgacgagactggtgaccgaggtttaggggcttccgaagctcttgaggacggccgaggttgtgtatgattcttgtgtatatcaccgaaagtaatacggttcttcttatttggccgaggatagctcgatgcaagtgagctagctcttggctctctcaagtggtgttgttggttagaaggagcttctgctgcaggtgctttcgaaggtgccgaaggacgtgaagtcgaacgcgaggaaagggaggaagggcgttcatctatcccaaagagaggcctgaacgaaaagggagcagagtcatatttaggcaaggacgtatggaaagagacccttgacgtttgagtggctagctgccgaactgctgagcgtcctccaaagagtcgtgtatgcatcttgtctgatgagtccagaatttggtgctcttagcggttcaatttgggttgaaagttcaaggggactgtgctcttcgaaggcacgtgagctcgtaaccctaggagcaatacaattacataagcagattaatattacataattacctctgcacatccaaatgacgtaacagggcagagtctcggctttgctctgacgtgcgttgtcctgctgcgcgatgcacgtgtaggccagccaggcaaaaaaaggcacggtcggccactcagggcgttgtcggagatttccttctttccccacttttcactgctcttgtctcttcttttctcttctcttccttcttctcaccaacatctccttctctttttctttcagtcttcttgtctttattggtctctctcatctcctcgtctctcatacaacgtctcctttgtatccacgtacagcaatcttctcgttcggtacaggatctcttcccttatcccttctacccaaatccatctttcctcgcctcttctctctttcctcttgaatcagtcaacacatcatggaaccctctctcagttctattcaggagcctcctcaagggcccaacgtctctttggaagacatgcgagcccgggtcaagtctcttgaagatgatctcaagtcgaaagagttttctctaagtggtcggcttatccatgtttgcgtgagtggttgcatctcatcagtttttttttcctcagctcctatctcctttgcgtccctctctttttgtgttgtcgacccgaggctcttttcagactaggagagaactatttgttctatattgaggtagttttgggaatgatctgggttgatccggtttaggagaagaatctttctgacaagaaaaagcatcctcagtacgagtcctgaatacaaaccaactgtatcagatcaaagaactgagacagagatatcaaacttgtcctcttttcgactcgagtgcaatctgttcaatcatctttattgacgttgttcctttctcgtcatttatctcactctcgggatgcccgtcctctttctcagcactacctccctgtcgttcctgtcttatccgctactgccgaacccgaacccaaagaggagacccccgccccagttctcaccgctcctgctactcccgccgtcgaagtccctgcgacttccatccttgaggatctcgcaaaggcaactaactcgctcgccgcacaggcaagctcgaccgccgcatcggtcgcctctaagttgacggcctcggacgcctcatcatctgctctctcgtggacggtgacccctcgacgaggacacaccgcgatgaactctggaatccagtcactctctgagactcacaagcaggtggtcgtcggatggaccgggacgttggagagccagtcgaattcaaccgaaggagaaagccacgtcgagcaggagactagcgagaccgataagctcgctctggaggaaaagctaaagggcgagccgggagcacagttggtgcccgtctggttacctcccgtcgtcgccaaggagcactacgagggctactgcaagtcgagtacgtctctaatcgtctagttgtgccgttcactcggacccgtctcaattggcccatcttcttgtttcttatctagctctctggcctttgttccactacctgctgtggcaggatggtgagtcatacttccttccccttacatcacgcactttgtcactcattcaaccatttgatcaatccacagtcgcttctgagtatcccagagaggatcctagttttgcttcgtactacaaggctaacatggcctttgccgagaaggttgcttctatccacaagcctggagatttgatcatcgttcatgactgtcagtccagattcttgccccttctaaaactctgtggctgtttgcaagaccactgaacctacttctcgtttcacagaccatctcttgctcgctcccaagatgattcgagaactacttcccgaagccaacatcgccctcttcatccacgctcctttccccagttcagagatcttccgatccttgcccagtgagtctcttatcaatccacactctctgcttgtttgcgcttctgacaagtcatgttttcttcattctcagagcgaaaggagattctcgagggtatgctcggcgccaacttggtgtctttccaggtaagactttatttatgtagacgtcttcttcactcaacactgacatagctcttgacaacctatgcatatagacctactcctactctcgtcatttcatctcgacctgcatccgagtttgtggattcgagacgaccccagccggagtggaccacaacggcagcgttaccgctgtctccaactgtgctatcggtattgattgtgagcgggtgaccgctgaccggtaagtattccgaccggatgctgttatccgagttccagccgagccagcgcttaattatcgttcattattttccgctatcgacatacagaaaccgaccggaagttgcacccaaagttgaggcccttcgatccctatacagtgggaagaagatcattgtcggccgggagaagctagatgtgtcaaaaggagtgattgagaagctccaggcgtttgagaagctgttggagtgctacccagagtggagaggcaaggtcgtccttatccaagtcacccagccgtcgttgaccgaatcaaggaagcttgagcgacagctctccgagctcgtcagtcatatcaacggactttacggaagcttagactttactcccgttcatcactagtatgtctatttgattcccattctctatagtgtcgaagctgatgttatcactcttgtccttgtccttgtccttgcccctgtccttaccgcctcagccatcaaaccatcgaacgggacgagtactttgctcttctttctgttgccgatctccagctcataaccgccctccgagatggaatgaacaccacttcaatggagtacgcaatctgtcaggacaagacgaacaagtcgcctctcgtcatctccgagttcatgggtaccgcctcatcattcaactctgccttgttggtgaacccgcacgatgttttgggcgtcgctcgagcgatcaaccaggggcttgtcatgagcgaagaggagaaggttgagaggcacaaccagctgtatgaacaggtcgtcacccatacgagcgcccactgggcggctacgctggtcacccaattgttgtccaatatcggaggcgacaacaccgctcaccagacgccttacctagaaaaggtggacatgaaggcgaagtatgacaacgctaagaagagattgctgctctttgactacgatgtaagtgcccaacgaacatcgtctttggcgtgatccatctgcgttttcttcagaaatgtatgcttaccgctcttctctgattttctctctagggaacgctcaccccgatagtcaaggttccttcccaggcgaccccgacagagaagacgctcaaagttatcaaagaactctcaaatgatccccgaaacgtcgtctacctcatttctggccgagacggtgatttccttgaggagcactggggacacgtcggtttactcgggttgtcggctgaacacggatgtttcgtgcgacctccgggatcgaccgagtggaaggggctcacggatgcgttggacatgagctggatgtcagaggttaacgaaatcttcaagtactacactgaggttcgtgcccttactttcctctgttggttcgaagatctgcctttgcttactctgctttctcttggatcacttattatttcttgctaccagagaaccacaggaagtttcatcgagaagaagaaggcgtccatcacatggcactaccgatcaagtgatccggactttggatcgttccagtgcaagcagtgccacgatctgttggagagctcgcttgctactcgacggcccattgaagttttggtaggaaagaagaacctggaagttaggcctttagctattaacaagggagagatcgtcaagcagattgtgtacaaccatccagatgctgagttcatcttctgtgccggtgacgacaaggtatgcctttcttcttttctttgccttttgcttttgccacaaacatcatgctcatctctcttttgatacgatatcagaccgatgaggatatgttccgatccctccgaacgatcgcctctagctcctctactatggcaccgcccatcgcggtcacctcggcctgtactgcagaggaggcggccaagttcccagacgtcgagacccatattcaacccgagggcatcttctcgaccgccgtcggaccgagcgcgaagaagacactggctaggtggcacgttaccagtcctgaagaggttagtcttcctgtgttcggttgcttgtttagcttgggttgttctcgtactgattgtttaattctttgactactcaatatcaggttgtggacatgatggatttccttataaactaatctttggccgtgcttataatctcttctagttccttctagtatcatcatgatctgcttcttcgatgggttgtcttttctctctcgctaaagaatcctgtcctgcatgttagctagttgactgtgtatcgtcagatccaaggactctatctcttcttctcttttccttgtttattcatatattttgattgttttgtttctcctagtgtgccttgtactcgatgtagcccccgagcctatctcttttccttggtcttgtgtctaaatgtctttccttgtcgtaaattttgtttcccatttcggtctcttctctatctattgagtgtcatcggcttcgtaatcatttggatgtattcgaggttgtcatttgagagatccgtcgtaaaatacaatacataagaatcggctcactttgtttgagtcaatccagttcatagtactcgcctgaagatggagtattgcttcacagtctcctcaacttgcccatgaaaagatacatggttccaagtacaaggataaagacacgtaaagaagaatacgtggaacaagtccggccggaattcgacgtttcttacccatggcgcgtagttcgtcttgtcttcgtgagtaggttacaatagttttgtggccctttctgcccgcctccttcctctccaatcccccgcttcttcttcttttccattctgacccctttctctttctctttccccttcaagtctctacgttctccctttagaatcttgacaatttcttagaaagagtcgcactcgacactgtcattgttgcggctgatcctctccattcttcggctcgtttcgcatcggtttctctggagtataccagttcggatttataatcgaggctctcatccggtcgtttgactgctccacatcgccaaaaccagtttatttggtccttcctagtcttctttctgtttctcatccaacgatcctagacgtgacgatctcttggctgtcgttctctgcataaacttataactgatcaatcttttcatcatggctcccgtgagacaacgtcttttctttcgctgttatcttcttcttacatcttgatcgaagccatccagactctgactatcttttcaattggtatcgttcatgttatatgtcaacgggtggcaaccaacggttcataaccatctatagacacgatctcgacaggctctcttcccagtttatgtcgatcctgctccttcactgtccctttcgtcttgtaacatccccagtatagaacatagctctgttcgaacgtcgcctcagaaacggaaggcttcttcgaagtcggttccatcgttcaaagaaaaaccggtagacctcgtcgtcgttgcaggaaatggactgaaaaagagggatggaatgagcgacctggggaaggttgggaagaacggggagagggtcgtaaggagggaggtgctgagagatgtctctcaagagtggggtgttgttggttgcgagccggagggcttcaagaacgctgtacgtttgtgactcttcagttgtccgagaacatagacttgcgatcgcaacatgctcactcaaaacgattttgtcgtagtctgttatcaagaaaccgtttgatcccgtgaagcctggcaagcttcggatcttcgccgactctgcatcccttccttctagccggccatcagcatccatcaacaccaatgataccgtcaccgcgaccaatgctcaaccttctcgcaaaccgttctcagtttacacatcaccttcacgaacgacgtctgctatcacgcggcctaaggggcttggtcttggcgggccaggagccgctcgaggccttcgaagttgaatttagccggatctttcctcatttgcccgtttagaccactatgtaacagagagtgaatgtcttgctgaaagcttgacaagcttttttctttgttcatcgcatcaatttcttcctcttgtttttttcctttccacctcgcgactgtcttttcataaaaagaatccatccaatcatctttggccctgtaactgacccatcctgtcctatcctatcccttctcttctcaaaactgttcttctttctttcttctagatgtctaccgtcttgtgtttttgttttttcttccctatcgcagatatttcgtcggtccggctttgtttttcctatctacaagctgcgcacacagatctacgcgactcggagcgagcgggcgcgcatcttttgatttcttagtctttttcttgcgcagtagaagaaaatcagtcgcgtctttctttcgtacttcctactctttctctctgtactcgtccgagatctcggtttgttctgatcactctcgccttctccaggtcagttctatcttacccaatgtacatacccatgcttcgtgctctctttatgaaaatactctgttttcctcaacgcaagccgagcggaagtgagatcagatcgcatatatcagacacttacgtaatatatagtcactctaaacaattgtatatgaaatacttagacaaattcaaatttggtcatcgcagtaggtcatactcattctctccaactctctggcttcatcacattaagcccaatcagcgactatcaagagattatatcctctcctctccttcccatcgacatcatctaccagtatggatgaagagaaacgaaccgggaaagttcacttcttctgggatccgttgaagaccacccgcttcgtcgtcgccgctagaggcctcgtcaagctctacgactggcaatcatacgttcgtcctgatgagctgtatctagagcacttttcagagaacctgtagtttgctgatcatgatgcgctgtgtctaccccacttggactacagaaacgatctcctatcgaactcaactctcaaagcgagttgggatcgataacagtgagtcttccccaagattgatatctcaagtccatccgttccatgatctgaacacgactctcttattcagtccttagcttggtctccaaattcggtcgacccatttctagcagcagccacttcttccggatcagtcactctcctttcgtttcctccgattttctcttcctcggatctgaagccaacaccttccatggcctacctacaaccacctcgtcaatctcgaacgtgtacatccctcgctttctctacgcctcacccaggacaatctcacctcctcgctcaagggttcacgaaagctcgctcagatccttgtgtgctcatctgggatgtcacccaactagaacgatcccacctggcatccgctagagaagggtacgatgtggatgatctcaggcgtggatccgcgcaagagggaacgttcatccctctggactttccttcgttgtcttcgtctggaatgtatggtctagacaccgggctagaaaagatcaaaccttgtgtctctctcgttccctcagagacgattttggacctggcatggatgggaccgaacctgttggcagtgtccactcagcgtcaacatatccgactgtttgacatccgatctccttcatcgataggtgctaatccacaaccggttattcaatttggtggttctcaaggagccttcatcggtggttctcccagtatgagcagaaacgggcttgcgcctgccaatgccggcagaatgattgctaccggtctgtcggccgatccgttctctgaagaccgattagctgcgtatgacgaaggtccaccatccaacttgtccctcgccgggagcggagcttctttgcgggatggtatcaagtcaacccttacagccttcgggaccaccggtggacctgtgagagtgtgggacaagagagcaccaaagaacgaagtcatcaagctagatggacccggagggatgctcagaggcggggctctcggcgtcatgtgggacttggagaagccgggaaggttgattgtcaccgaaaaaggcggaggattggctatctttggtctcgtgtctcccaaacgacgcgacgaaacaagtgaactggcgcccgatgagcctgtcgagagtctcacagagttagtagtggaaggagaagctatgaagatacctccaatcaccaacgcatctacggtcactctggcctatcctgggctgacagttgcccacgaaaagcctcagagtcaaatcgctgttttcacgccctcacgtgggggagagatcatttggcccgtcatccctgagcgaagtccactacttttctccgaatcttcaactctcagtttcggaccaaagttgaccatcgttcagcctcctcctcatgtgtcaatcggaaaacacgctgcctcggctcgtcacaaccgtcgtatatcacattcttccgagtcggggatatccgaaaattctaccactccctactcgaataccgtcactctgcctgatcgatcgggattcaatcagatacatacttcagataatgagacatcggtgggctcggtcatcgaagaaaaagtaaagagtttcgatgtagacgaacgaggggctgctgttcatagactgttaatcagtgatccagcttatgttatgaaggccagagcagagaacggatatgggcttgatgacgtgagtcccttctattctcgaggttgatccacacacatgaccaagcttactcattcttgagatccttttgccatcaatgtattccagcttgatcgaaacgccactgttgcagagtcgatgaatcaagaaagcctggttgggttctggcgatgtttcaagatctggactcgcttcagttcagacgccaagataggcaattttgattttgcttttcaaggaactcaacagcttatcgaaggtttccccgaaacggttcccaatctcaacatcccctctaacctattcgaatcctctagtgcaatgtcttctcctcgactccgagctctcgcgcccactaagcgacgaggactgtctccctctccatcaaggacgcctatgcctagatcgcctcagtcgtacacaccaccaaaggcgttagagtatcagtacgcgatgaaacttttgaacgctcaacagagaaccgcagggttagcaggcgatgttgtgttgggtgtagctggccaaacgaagctcgagcaggagaggataggagcgctctctgcgttgggatgggcaatgtcagccgaccagcttgagcaacatgttcgacagtacgttccattccgtcatatggcttcggtccaatatcagaggaaaaaatcgaggtcgaaacgttgagcgcggctatttcctttcaattctaaaatatcctccaatgcagtcttatggatgaagaagaatatgagagagcagcgttctgtgctttgttcaccggttccgttcatcgaagtatagaagcccttcaagcatcttctagtacgtatctctatctgcttcgatcgaaatatcgcttatttaggttcttgtgcatttggctgaaactacatctcccgacagaccaagtatatttgacgatcgcattgactctccaagcgctgataagcgacgacaaacctcagccagccaagcacgctgcttcgttacggacgttccgtctgatcaacaaagttgattccccttatcttcgagctgtatggagattcggactgacgaatgactgggaggaagtgttcaacgaggatggagtaccacttgaggacacgctcgggcttgctttgatgtgggtgtcggatgggttgttgaagcagtatatccgagcaaaggcagctagctcgacggcttcgggtgacttgatagggcttctcttcaccggtcttcggaccaatcaaggactcactcttctccagcgatacgtcaatcgaacatccgatgtccaaacagcagctatcatcagcgctcatgtaccgaactttagtttcaaacgacaaaatccatctgttcgatggaaggacgcgtacgaacggtatcttctgcagtggaatttacttggacaccgggtggcatttaagataaagagtgcgaaacttgcaagggacagaggaggggttctgaatgtgcctccttctgtgtatatccgctgtaatttctgtaataagaatatcacagaggtcgagcaaccgaattcagcaggcggaggtggcccacgaccgaatttggtatgtatccccaaatcacaatctagcccatttggatacctccttccaaaaaatactgacagaagctggtttcattaatcttggtacgttgggggttgcttgggtaaatccaaaggcaagactatgcccgtcgtgccaaaatgtgctgccaaaatgttcaatctgtttcctgactattcaaacatcaaatgttcaaagggaaaaccacatcttggatccattcagagatttgcgtaagtgttcctctcaccatatcttctctctttgagcggttcatcccattaaatctgttgtgtattcacatctctttgtatagactcattcgagacggatggagctggtatgtgtcctttcgatttctgattgtccatttgatctacttttactaatctggtttatcttgatcgatcggataacttcagcttactgtcagagatgtcgacatggaggttcgtggtctttttacatgaatatttgtctaacccgatgaggaagagatgtcctgacaactgacatccgtcttgatcacccttttacgtatatacatatatcacaggtcatcaagcgcatatctttcagtggttcttcggtgcccgccatgacatcagctatccccgatctagacaggcctccgccgtgcgttcatctcgttcgagaagcgcttccagagatatcggtcgagatgatgttcgaggcagactcactcaaaacggtgaggtttatgacggcgagaaagacggagcagaaggtgatgatgaggaaggagaattcttggagcaaggcaattcagtttgtccggtcgttgggtgtgattgtagatgtatggattgatggtcgaaccctctcctctacatccatattcatggtttagaaaagttcatctctcctagaaacgagttccaaatctaagcttctggcagaaagacggaggaggacatggaaagaatgaaatggagatctcacaagaccatcagaagagcgcaagaaaacgcggtcacccgttcagagtctacaggtctcctctcgaaacgaatcaatgacaggctgaacgtcagctaatgtccagctggatatgtctgtcatcctgatggcggctttgatagatggctcatcagctacatcacatagcggggtcacacccatcctattgacatgaaaagaattgaaatgagacaaatgagaagaagaacaacgtcatcacccgaggagatggatcaagctcaaaagtggaggaagacgaagaacccaccaagtgcaaactccatacatagcctgttttggtgtcattacttttgctttagctagcgagagtattggatccgatcgagaaaaaaccgcatctaaatccatcgacgtctcccagatggtcttgagcgcgctcccttgaaagttacttgaaccgaaaggagattggatgatatcaatctgtgctccatgagagagtagccagtctattctatgtttcgaatagatggtcctgatgccgatctttgataagatctttcctattcgtattcaaaaatcgggcggatgatgagaactatacatcagtacatatcaattctgatgaacgactaaaccattggcatatacagaccctcttgaacaagttgttttagaactaaaagcgcgctcaatgtttcttcaggagttttcagctcttgagcaagtagataagagtctggaggtcctcctagatgctgagtgcttttttcgagagaatatcgtatacgttgttcgattgtttgctcagccaaagctggatcttctgcctcaaggtcaaatctatctcgagtgatcccaagataaaagaaggaaaaagaagaggctgtatgagttctataggttaaagagactgtccgtaaagatcgagaatactcaaaactcgctttgtttgcacgaaaaggtcatctctccaataattccagtcccgcttcaagaaatccaaagcttcgcccacaagatcctccctagagatagacacggatggtgagagcacgtatcagattctgtgttatgtagagctatcatagtgagtaccaacagagctcgaaccgatagtattctgattgggccgacacgtcgatccctgcgaacccggccaggatggccttcacgatcaagactgtggtcttttggcctttgctgatggatgcccgccatatgtaaaaaaaaagaaaaagaaaaaaggactgggttcagatcaagttcggataaagtgcaattaactgagacacaagacacgtactgagcagtatcaaacaggatacctggagcattgaaagacgataaagacatcagatgtacgagagatgatggaggaaccggacgaaactctccagcggctttcggcccggatatatccttgccgcatcgatcacgtgccgtatgtgttgcatagctttatacggccatacttttttaatcctacaccgaacgatcagcttggtatcattacgttcgtctacctatcaacttgaactcgtccggaaggaaagatcgtatatagagtcgtgttggacccatcgatatatcagctgtaacaaggtgagtctgttttgttggacaggcttgtcaactagtgacatttggattgagtgggcttctttcttaattctgtaaattctctgatcgtctttctccagagctctccttacccttccccgatcttcatcgaccatgaccttctactctcgcgtcctttgcatcacggcccggatgccccgacccatgccttctctactctttggtcctcttcgacagacagctcatctcaagttctcctccaaagcaacttcatctgcctctgagattccctcaaaagagcccggtgaaaccaacgaaaacgttcatcattctgccccgatacctggatgggaagacctgaaatcagctcctattcttactggacatgacatcagcaaagtccagttaaaaccctctgggagccattacgaacagctcgagaagaagagaacatccaagaataagcttcggcgacaacaaaggcgattaaaagctgtacagctggaggagcaacagctctccgccctaccttcggcgatttcgacaatcccttttgtccaaagcgacgtcgcttctagccaagagaaagaaccgaagaccgcagaagattggtctttcttgagcggtggggacaccaggccgataaaggatacggctaaggaaccaaaagatcaaccgactgactcggaggcattatcaaaagagccttggagggctcaaaaggcgcaaatgaacaaggtcaaaaaatcctcgggcatctcgacctggagtcctgtgaatcggatcactcacgaagagcaacacagactgaaaaagcttcgagcggacgacccagacaaatggaacatccaagccttatcgaaagagttcaagatcagcccagaggcgatcatccgaataatcaagtctcggtatcgatctaccgacctgagaccctccagattggccaaggcactacaggaggaagaaaccatcgacgccgatgaatgggctaggcttagcgaagaagagaaagaaattcttcagatgatcgaacagtccgatgagtctagccttgccagaaaaggcgatgaagagcctctggacgagaacgacccgttcggtgatcttgaaacagtcgattttgacacggtcgaggatgaaccgaagactattgaacgcaaatgggaggaacgatacgaaaaaattgctgatttccgtcaacgaaacaaagagtttgaggaggagcgtgcaaagatcaggagtgatctttggggatggcagcctctcaaagcaaacaggaagagaagcccgagaagagttcaggttgagaagcctgttgaggtagaggccgaggcggcagaaccggaggactcggtcgaagaaaactcagatcctacttctgccaagtcgacgtttaactgggttcttgcgctgcaaaacaagaagaagacaccctgagaagagggttgtacatgttgttcttgcggatatatgttatgttcttctatttacagtcaaagttactcagagcgcgtcaaatatttgttctccctcttcaactataagatacttgtcactctttagtttcaaaactttcaagagcgacagtctagaactacaaagcaagagaaagaacggccggagcttaaggagtcatgagtactctccgtgcttggtgattctcgagtgttttattctgtatggatttattgtcggtaatattttctcacgcgttttctttttacctgctcattttcagtcgtgtccaaaccaacttcaggagtactcttctctgtctttcaccatcatcaccacagccatgtcagacgaaacggcgctctcggatcagattcaggcagtctctcttcaggtaggtctcctctgatcccttgttttttttttgtttttcaattcatctagttttcttgctcacgccttctgaaccgtactggtctaaccggagcagaaagagaagacgcctcttcaagctttcatgtaagaacatcaagaactctacccagagatgttcagtccttgagagaaatgttggtttatgctgaaccctctttttatgtatctgttatccagctcttttccctcgccatacacccaaacgttgatcctgacctcgctagcgtcaaacctgacccacctcaacattcttccttccctaccgacgaccccggcatatcctcttctctgttgggcggactacgacgttcttccccacgagctcatccagtcaacatcggcctcggctgaacctctgctcctctcttcatcatacatctaccgaaagtctctcatcaggaagcattacctccattcatccatccaggagtacttggggaagtatgatcattgggtctcattgggtaaggtcaagggtgacactccgttgagagcagcaacgcctagagggtggaggatggaattgcaatttgcggacgaactggacgagctatttgcggatgacctgtacgacctactagagttgatggaccagggcgagaatagacaagcaagcggggagggagagagaaactggttcattctgaaacctggaatgagtgatagaggaatggggatcaggatattcagtacgcgagccgagttagaagaaatcttcgaagagatggaggatgacagcgatgatgaggatgaagacgaaggcgaggacggggacgaggacaacgaagaaaatgaaggagggaaagtagcgacgagccagcttcgtcatttcgtcatccaggaataccttcccaaccctgtccttctcacccctctcccagctgctacgaccgatctacctctcgcgcctgcaaaccgaaagtttcacctccggacgtacgtcctcctcagctcggcctacaccgtacacctctcccgaactacgctcgccttattctcctctctaccgtactctcctccggaaacgactgaggaatccttgttgcctcacctaacgaacacgtgcctacagcctcctcagagcccaggcgaagtcaatgaggaaaacgttcatttatggtgggagttggaaggcagacagtttgatgaaggaaagtcagttttgacgaaagagttgttggattttacttgggagagatgtggagaagttgctggtgaagctatcagagctgcagtagaatgcgggagcgtacacatgcaattgttgcccaactgtttcgaggtgagtcttcctgtcctcttgtattctctcgcacacctaattcgatcggttggttgtgcctcatatcctgaataatctctctttttgttctttcaaagatctttggtgtcgacttccttctcactctaccgtcaagttcatctcctagcacggaccttcctcaagttcacatcctcgaattcaatgcatcacctgactttcatcagtctggtgagcgactgcaatccaaaatcagagagatgttcgacggtgtcgtcgacggcttcgtcaagcctttcttcggcatcgacgatgatagcgatgacgaagaaaatgaggacaaggagagcagtgccgaaattaaatgggacgggcagtgggaacaagggatggaacgcgccggctggaaatgtttcaccaagggagagatccggagaggatggtgaaaacgatgaatgcttttcaactgaaacatagaaactccggtgattcgtgtcctttacagacgaacatgagattgagaacaatcctatatgtttctctttcgttttaaaaaaaactaacatgctcccttcctatcctctgacctcttacgatcggaccaacccactcaaaaactcgtcccaaactttcctagcaaatatcttatccaggtccccggtctcatcttgcgccatttgaagactgtcgaaactgtgttcgagatgtttgcccttggtcgtatcgaagggcgattcttcatctgtgacgatccaaagtttgtgcgctaacgatgactcgccaggcgcggactgagggcgttgacgctgatgatgctgaaccagagaatcgtataccgcagtggattgggtatagtggttgtaagaatccgactagtttgatcagcagccaaaaagaatagagttgggctcaggcttgtgtctctagaccagaccatagaaagatgatgacaggacgaacttcagagtgaatcaagaacgtcggaggaaagtcttcgtctgggcctaactgattgatcagccaaggcacgctccatcgttctctaatttcttggacattcgttgtgccatacactttggggtacagaagacctgtaacccattcatgatcttcgatgtcagtgcgcggggttgaagagagagaagaagggaacgaaagaaagtgggtataccttcttgcgcgagatagaacatagcagctcctctatttttgtaagctgcacaagcatagcgaagcgatgtcagccattaggcgtagataaatctcacgcatacatatcaaatcgatggacaaacatacaacaagtctctagatcaatgtcatcttcctgagaggcactgacgaccgggccatgttcatcgagcgattcttcaacctcgtcaagctcgatcaactgtgttctacctcttgggggatttggaaacgtttttgcgtccactccctcgactgtcttaaggaggaacgagcagaatcaaaggggaagcattagtatctctgcacattacatcagatagtaaggataggtttttaccggatcggcaagcgcatagagcgagatgatggccaaaggtttgggctccaagtatgagcctgcgagtaaagcgagatgaccaccagcggaaccgccggcgacgatgagtttggaggtatagacggcgatgtgggggatcaaggatggcagtgtatctctagcccatcgacaggcgtccgcgatatcctatttcaccacgcgatttcacgagaaaggcatcaagtatgagtccgaactgggaaagaacatgttgagcggaatttgaagaacacggataaacagacctgatatatgccatcaatctttgtttgtggtgctaaacgatggtcaagattaacgaccacgtagcctcgttttgtaccggactgccaccaatggggtcctgcagtgatcgaatagcagtttgttcaacaacggagctgaagcaggaaggtgaatcatcagaagacgaaccggcggttgaacgtgagaagcacatgaaccctgacattctatccaacaacaagtcgaatgcatttgaaatgtatgatggcatcagcccatgtggtctgacgtaaaacatagaggaagagaatgagagcaaagactagagaaacacaccggatgaagagcaagatgggagcaccatttgggaacagtgtagcctggtcttcagatggcacgtagacgtcgcagccgatggaatgtccagagggatccaccttgtagatgaacgtgctgggaggtgggatagccatgtggtcaaagcagatggttctatgtgtgttggatgacggtgattgaatgtgttctatctgttctatctgttcaccatgtgctttgtcttcctcttttcctccgaaacagaagagaatgagaatcattcgaaaccgattctcatctcattccatcaccctcaaccctttcctaattatcaatcacaaagcatcaccatcacttgcattcatcattgagctacatgtccaaggctgagaccgtcgtcaatccttaccttgctgatccagccccgccagtagtgagtatcatcgtctccacccatcgggctcgtccgatgtgccgtctctttcctctttcttttcttcaccatctcgtcccgctgactatctcactcgcttctcttcgcaaactcattcagtgcgggttggaaatcacctcggcgttcaacaatttgaccaaaaaagaacagctgtactcccattggcagtctaaagcaggatgggaaggagctaggatcatcatggtgagaaattcactcctagtattctttcttcaacgcacgatcatggggagttgactgtttgtcgctgcactgttctctctctaggctcaaatgtcgcatgatgtgaaagacatcatcgatcttctcctctatatactttccaaacctaacccgaaggctggtcggcagggcgagccagacaacatcttggtcgatcttccaaatgtcttcaaacaggccggcttcaacgaggaggaacagcagcagttcctttcgtatgcctcccaggtacgaccttccttcctttcctctcctttccttcctttttcatcttgttcgtctacgtatcagtttcgttgaccgggttatccttgatcgatcttgaccgtgtcattcataggtatttggaaacttgggcaacttcaagtcatttggtcacactcagttcatccctcggcttacacaggaaaaggtatcacccagtcgatcagtctccaagcgatgtataagatatgctgactttatatctccctctttctgctttcatcagtttgctcggatcgttgccacagctatccatcacaaagcttcgcctctctgggagaaggtgtgttcggcgtattctgctctcttctactacctcagtgcgctcactatgctcactctaaactactcatagataaaagttgcgatctactcgatcaagcgcaagtctcagttaacaatcggaaaaccctcatctggccacacgtccggctattaccttcctcggaagacaacctacgacgataccgattcagactaccttcagaccgtgctcgagaagcatgagatcagtcaactcaacactcgggtcgagaagacagaggacggcaaactcatcgtctggatcgcctctgtagaggaagaggaaagagaaattgaggatggcaaggttatcatcaagaaaggagacttcaagcgagaaatggaagccatctcccttgctcttgaacaggttcgacccaaatctttgtgaatcaattgcgatcaacgtctaaacttttttatttatttttcaaaggcgaagaaatatgcggcgaacgacgcccagaaaggctttattgacgactatgtcaaatctttccgtacgggattgattgaagaccatgtgaaaggaagcgagaaatgggttaaggacattggacccgtcgtacgtctaactctttttgtttcctatcaagcatcatatgcgctttaactaatggatgagttcaaaaaaggttgagacctatataggcttcgtcgaaacttgtgcgtcatagtcttccgctctacatctgagcaacagacaacttccattctgacgcctttctcacgaatatgatcacgatcagatgtggacccatatggcggccgagctgaatgggaagccttcactgccatcgtcgacaaagaactttctgctaaatacgccaccctggtcgactcagccccagagctgatcaaggctctcccctggggaacagaatacgaaggtgtgttctttgttggctcttactcgattcggttgtccagtctgaaaccggttctaatttatgccctgtatagtcgacaactttatcaagccagattttacgtccctccagattgtttcttttgctacaggtggaattcctgctggttagtaaaaactatttcgttcgccaagaatgataagacgaaagacgtcgctgactgtgtatgaatttgttttgtgggcaggaatcaacatcccaaactacttttcagtcagagacaaggtcggattcaagaatgtttcgcttggtaacatagtaagtgacctttaacatcaagttggctcttcgttttccctcttgttgatattgcgctaacgatcaatcgtttagtcggcggccaaggatccgaacgagaaactaacgttcctgactgaggacgatgtggttctttacaaagaatttgaatcacaagcctgggaactccaggtcggtattttaatcacataagtttacctcttctgctggctcgtccttcaccccctcccaaagaagacacatcctgactcttgaattgcgatgcccgttgattgtttctgatcacaggttgctcttcacgaactccttggtcacggttccggcaagctcttccaggagtccccggacgggactgtgaacttcgaccgggctacgatcaacccgcttacgggcaagccggtcgagagctggtacaagcctggacagacaccggatagtgtgcttgggacatgtagcagttcttatgaggaatgccgagctgaggcggtcgcactgtacttggcgacaaacgaggatatcttgaagctgttcaaagtaagtcactttcctttgcccttgagccatttgtagcgatccgatgcttacaatgtgtgggcgatttgtagtacaccgacaagaaatctcaagaaggtgtgctgttcacgatgtacctcatgatggtccgagcgggtctccgagcgctcgagttcttcaatccagagttgaagaagcacggccaggctcatatgcaggtttgtctcgactttttctatctcagagagcgcgtgagcccgtcgatgttaatgagtatgtgctgttttgcggtttcctcaaggcccgaattggtatcaccaacgtcttgatccaggatgggattgtctcacttattgagactcgaaatgaggacggaaagctgacggacgccaccatcaaagtatgctctcttttgtcattcattgttttattatcttaattcgcctttagggagagctggatgatcctgaactttagtctcgttttctctgcaacgtatattgtagctaaatagggagaaggtgttgaaggaaggatcgaactcgatgggtaggttgttggttgagctgcaggtcaggaaatgtacagccgacggtaaaggtgcccggtccttctatggttcgtctcgtccttccctttgtcgctcttctttcattcaaagaagaggaaaggaaaatctgtcaaacatgtagagggcgctaaaccggtattgcgacgtttgaacgggatagaacaattgacgacaccaatcgagaattgggatggagaacttcgcgatctagtgatctccaagaaagcagtgagtctccatttttctcctttccttttcgagtccttctcgatccgttccactttgtctaacacaggtatatattcttgttctctactttcaaaaagccacgaaagctgttctgtcagccaaacacgtttatcgtcgatggagaagtcatcttgaaggaatacccgttgacgctcgagggtctcatcgagtccactatcgagcgagggatctaagaaagggggatgggtcgagtgagactgttttgtgtttccgtattctctggtcttgtgtcctttgtctcctcctttctttccactcggattcttgtatacgacaaagatatgggcacgatgaataatgattgtgttatgatacatgctagggcatacccgtttgcaggtcttggctcgcgaagtaaaagaatgaaagaaaaatcaattgaaacaagaagagagagacagagagagatcaatcatgcagatcaagcgcgagtcgaacggccattccgcccaggacccagatacctagcccgatggtcagtcctgccagacttgattttatctttttcttgagtttccttctccttcttcctttgtgtgagataacactgctcctgctgttgctcggtgttcttgtgctactgttatcagccctctgagttcccctcgacaagagcttgtagtcatcgtcctgttcttcttcatcttcttcttcgacttccgctccatcatcctcatcgcctgaaatatcttgttcatattgttctgcattgtgagccggggtgatgggctcacttgcctcgcgctcaccaccaggtaagccccagtcaagtaacgcgtccaagaagaatccgccatccaacagacttagaggcaagagattgaagatcgagagcgtggtcgagatgacggtaaagtatttaaagaggagggcgattgatcggatttgagggtagagtgatagggggattagagaagggggaatggtaggtgatgtctcgactgaggaagagaggatggatacagaagaatacaaagaaagcacaaaagtaaaggttatcggacgacatccggtcaggagcaggagcgtaagacagaagagagaaacgaactctgggaatagattgattcactcggaccctgccaaacgatagattcctcgacgtcagcccaccgtttgtttgttccgctcggggaacgatccgaccgagggctgagaaaggtgatccgaacaatctctcctttggactcatctggctcaatacagatctcccctgaagcgagacatgggcacctctgtggcgtccttccggtagagtctacctgagtggagggaagcatgattgagggaggtagacatcgacctgatgaggacgtggaggcggaagggttgaagcatatcgtcaaatcagaggatggggtactcgctggtttgcaacacaagtcgttttgcgctgagcgtgatatcctccagaacgctcgtcagcaaacaaaaaataaactaaggtgaatgagaagaagagaaaagacgctcaccaagaaaccaagcttcagacacacaccagccggacgtaagaccgggaatgtctgtatgtctgtcgacaaacatgtctgaccagagcttgtcggattttcccagactggtcgccccgagcggactgtcgtcgagatgggtgatgattgagcccaccgggatagcctgtgcgagagctgagccaggttgaaaaccaaggacggctcttccgatatggctgacgggtatcaacgcttgatttgcgagcagggtaagagcaccgaggacgatgacggagagaaagttgtgccagcatccggcagccgctatccgcgctcgttctctgggtggtgtcagagcgagctcgatcgagggcaaagtgactgaggccgagggaaagatgggagagagttgaactgtcatcagcagagggttgattgacgatctagggcaggacgatgacgggcaggatgacgagcaaggagacaggaaacaaggcgataaacagatcaacagaggaagcgaaaatgtagaatcaaggcagagggaggaagaaagctaacaaggcggcagagatagcatgaccaggttcatggactagttgggcgagtaggaaggatagtataaggtataatgcctgagagaagggaatggtaattcctgggatctggaagaagggcaagaggaaagaaaggaaagaaaggaaagagagcaagacagaggacaaaggatcagaacagagacgacaaggacgaaagaaatatacagagacactcactaaaggttttataaagccagagtcggctgttgtctcgaccggggtcgctcttttgacgagcgaggcaatcccggaggtggtagtagtggtggtcatggcgacggtactgccagtgggactgccggtggccgatacaaatgcccagagggatgtaccaacagtccaagcttgccccacgagcagactcagggaaagaacgagaccgatgacggcccaaatgatgcctaggtcatagaacagacctgcacgagaacgagtattgggtcgaaccgattgaaagagcgcggctggcagctgattgaatgcagtggtggatagagcgatgcctatcggatttgagtataaatgccatgagtgagaggagaacgagcgatatttggtgggacgtagcagatggtatccagcccaagctatggagagtacgatgaacgagaccggcaggacgaacgactcttgttgcatcggtgcatattggggaggaagggatggaaaggagagggtaaatgaggattagtgaaggtgagtaacgaagaagattagattgctgtgctaaacacgtgagggatactcggcatcacgtgatcatcaatgccaaaaactgtcagggatgttacctgagttacgctgaattgataagccatgacacgtagacctccacctttacttccactactcctcccgctcctactcccagcgcatagaccaacttccagcgcattatattgccaacgcatcttttcatgatgttcatagggtctgacaaccatatataagccaagcttctcgaccacttgtagatagaaaccctagtcttggatcctttgttcattctactcctctccttgtccttgtccttgtccttgtccttgtccttgtccttgtccttgtccttgtccttgtccttgtc

SEQ ID NO: 1593 - DNA, 44928 bp, Xanthophyllomyces dendrorhous
tctccttgtccttgtccttgtccttgtctccttgtcctcatcctagtgatcctatcaatcctgtttcccagtctcaagagcttgaatttccccctgaagcctaagaatattgtgtggttactgctttgtaacctttcgttaccaacccagctcccgtccttaacaaatactgtcaggaatgtgacccgaggttacaccctggaaaccttcccttacttctagttctcctgcctcgttattccttatgctttttcattgcatcaacaggcaggtatatagtctgttagcgcatgtgcttctagcaccttctatgatccgttctcttatgcttaatcgttggagtctgaggacgatatataagacgtggttcctttgccaccgaaagtatagtttctcaagccaaaattctttgtcatttctttgtcatccctttgtcactcctgggttccctagtactcttgttcccagtgttatacaaatcttgttcttccaaatctcttcgccttgtgccctcgtcacagtgactaagccagagagcctgaacttcctccctgttagccacatttccgtctggttacacctccgtaacctctccatcgccctctgaacgcggattctgacaaatactcggttcgtatagacttgtagaccgcgctttcggcatgatgtcatagccaggtgtagataagcactgaggataaagttctataaatagatactgcgtatgactgcgtctgggtacgcgttggtgttatctgccgatctgacagtctgtcggagggacgaacagatggggataggaagcaaactattgggggacacaaacaagacacggtccaaacaaaatagacaaaacaaacaaaaacaaacgcaacagaccacggccgtgacgttgccggtgaggaacaggcagctgtctgaccagcaacctgtttttcaggggtacaaccaaaataaagccgaccggaccgaaagcgcgcgagaaattctgctcgatttttctgcaccttccattccgacatgactcgtctcttcggttttctttggtcttgtcgctgtcttgactgtgggcgccatacggtaaacctgctgagctggttgagccgaccgagccgacggagctaactggactgactgagacgtccaaaatgactattggcctttcctcccgccggcaggtcagcgcgaccacgacagcgacagcgctgaggccggcactgagaccgagatgaccggcgttggccgctgtcgtgcctttcgtccccttttggtcctcactgccctgacttgtattctctagccccggcctccgctctggctcttggtctgtggccgctacgctcgctccgactttttcttgcgctagctgtttatttcccgcttgactcttttactttagaaaattcatttttattctctattttttgctttcctcttcttttctctccgtctcctcttctagacaactcactgacctataccaccactgaccaacacatccacaccatgttagacctcaacggagatcagatcttcccgcccatcacccagaagcaagaaacgcaacagttcgagtccgcgctagagtcctacgccgtaggattttctaacccagacccagagaacccgcaggactggccaaagctcaaaagatggagaggtcggtctgggtttctttgcttcctttgccttgttgttgcctagcacatcgtttacggttcttctacacacgcacgcacattcgctgacagttcggttttattcattgggttctaattgatcaacagtcctttgcgtcgctctgtttgtaacgtacgtacgctcattcgatcctttcccttcatttccttcatccatctaggccccacattttctccctcagccaaaggctcaccgttttaaaccattcatatatcctgttcacagttacacctctgcctgttagtatcatcaatgactctgtcaatctcccaagaattgtcctagagcaacctattcattgtcatggtcttttccgtcgtgaccgcgtcctcacagtcaatgcaacggtcagtttttttctttgctatctcaaagtcttttcgtttccttccaacgcactgcagtacatttactccactacaatacatacactccactacaatatattcactgccatacaatgcactcatgacccaccatgctgacattctttcctctttccctcatttcaggccaacggagccgccagcgccggctttaggaaagagcaccccggtgtcacgaaggccgtgttcacctcgtccagtttcacctatcttgtcatgcttggtatcggtcctctgtatgttcttgcactcgttcggtcgtcgagatccttcaagccgtccatctcctgaccgactcgaggttctctatccttctttttttcctcctcttcctcccgccggctttctatcctcccgctcgcctcttcccctatagtgccctagctccaatttctgagacgttcggccgacgacccatgctcgtcatcctcaccggcgtcatttgcatcctcttcttaccccaggcacttgcccccaacgtcgcctccatcatcgccaccaggttcttccagggtctcgcagcctgtatcgaagggcccgtcgcagccggtgtcgtcgccgatcttttccctaaaaacatccgaggaccagccatggggacattcgtcctcaccgttttcactggtgagtttccaaaaagtcatttgattttgcttcaactttccaagctgatattttcttgtccctctttgccttccagctaactctaccggcccgttgtgcgcggcttggatcgcgcaaaagctgggctggcactgggtgtattggattcaaatgatgtccggtggcctctgctgggctctctgcctgtttttccttccagaaacccgtggagatgtcatcctgaccaaacgggcaaaagccataagcaagcagaccgggaaagaacactttgtctttggactggacgtacacgacagcttcgcccatgctatcaaaatttccctttctagaccgctgctatacttgtttaccgagcccatcgtcaccgcactctccctctgggtcggttttgcgtaggttttctcaacttgctttctctcttttctactcttttcccagcgctcaccgttctctcctctcctttccttttccctctagctggggagcagtcttcctcctggtcggtacaatctccaacgtcttccaggtcacctacggcttctcccaaggtcaggcaggcacagtcttgatctgcggctttattggtgcttccatcggctggtttgaaaactattacatccaggagcgattctgtacgttctctttctcttgcttcgctttacattcttctgtctttccttctctttcttgcctttttcttcatgctcttctcacaccgaacacaaatacttttatccttttttaatcccagatcgaaacgcaatcaagaaaggcaacggtctggctgctccggaggtcagactttactctagcgccgtcggagggattctattcgctgtcggctgtttctgcttgtgagtccttgatctttcaccttggttcattcttctcatcgaccaagactgattgatctctcggcgcgctcgctcgcacgcacaaacacttacagtggctggacggcgagaccgtggattcactggattgtgccctgcatctttatcgtcatcctcaacgccgggatctacactatctatctcgctacgtacaactatctcggagacgtctacaatcggtactcctcctcagcacaggcttcccagtcgctcttaagaaatatcctcggcgccgtctttcccttctttgccttgcccatgtataacaagttgaccttcccttgggcctccaccgtcgtcggctttatcgctctttccttttctgtcgttccctggatcctgatcttcttcggcgctcgactcagagccaggtcaaagattgccgtcgatctagccaacttggagggaacaatcatccctgacgaaccgtctgcgatctctgtcacccaggagaagacccatgtttagttgcacatacctttctctccttctcttctctccctttcctcctgttctatttatccctctcccttttcccccacttgtcatctcttgttatcttttggttgcttcttcgtctcgctcgctatcagagaattagttaccacacctagttgaacctctcgttcatccgagcctaatctttcttttctcaaaaacctagaagtctgaatggcattttgccttcagatctgcacttgcaccagaactagacggcctcctcaaatgtagaaccggaccatccatcttcaggtcggttctggtttcatcgtagatctctcactacatggatccttagaattcctagaactcctagaactttttagactgtcagacgcgatcacctgtgttgacatcattctggtattcttgattactttttttctttttctttttctcctttctcaaaacctaattgaacctcttttctctttctgtcaatctggtttatccagccatctttctttctcgtctttttttctgtcttccttttcctcttccccttcctcatctctccttcctgtcgtgttcgcctgcctgttgctactctattagggtgtatgtctctctgtgtgtgtctgtgtgcgtgcgtgtgtatgtgtatgggagtgaggcgtgtagaagagcattgttagcaagagatgaatgaaacgttgtatttcttgtctttccgactcgtcttctaccatctcttctgttcatcgtcctggtccccactcttcgtttgattactcgccaagcttgacgataagccgaccgccttcgatccctttgtccgcaaaacctctgccagctggtctgttgcctttatcttcgtcctcccctggagcaagacagacgatgaaacctgcttcgctcgaacagtcgaatccttctatactcaattgttccaattccgagtttgacgagtcggctgtacccgtcggaggagtagtagaagaggaggaggtccggaaagcaaacgtatgactcgtcagagggcttccttccatgttttgatttggatcttggttctggtatttgatctgatcgttcagattcggtcgatgcacgaactggacatgttatcaacacatgaatgaagggggtttaccgtttgacaaatcagtacttcaggcttcgaaccttatgaacagtacactcgtgtagaacggaagcaagggaaaagggagatctacacagagaagaagaagtgaaatccatacggaacgcaaacaaattgaaagctcaccatgaaccgttctccgatttgaaggctatcctctcgttcaatcgccatcccgcctcgggccggatccccactgagtatcctgacgaccctgttgacgtgccccatggaaccctgatcttcggtcgtagatacgccctcgcgcccccggggacggatgagaccgagaaagaattctttttctttgctacccagatacgacttgtggtcgaaccctgcggaggacgactcttgaagaagcatgatcaaatgtttcgtcgggttggcgatggtgtcctcagggtccgatgcgcatcggctgatggacaatagaaggttgccttgagaactattcaagagaaatgttcaaacttgttagcacagcgagtgagacatgagtcccggaggaaacacaggaaaagttaagatacgaagagaaattgggtacgaacgaaacgacttcgtatacctgcgcctcgaccggttccatgccctcccatccgatatccatcctcactccctccccctgcttttccttaatgtctccttccgagatgatcgccaggccaactgcgccttggtcgtacgtctggttcatgaaatagagtgtgtacggacggccggtcgtgaatggcgtttggggcagaactagccctgctttgcaagatattgagggaaggagatcgaacgtcgggctcaatgatgtcggtgtggaaaacaaaaatgtcatcccgatctgggctgggcttgagagttgatacaaatccatcagcaaaacctagttcagaaccgaaacacagcaagtcatctcgatcgaaaagcaaaggaaaggactcaactcgaccgattccaagccttctaaatcaacgacctgtccgtcgacttgtcccccgacattactctttttccattcttcccaaacatcagaccagtcccctcctttgaccgctctctccaacacgttcccctctcccttatctccgccttcttgtatgttgctcgatgtttctcctatgggtctccatctccctacagacgctggatccttccctttctcagccgatcgaaagagccggtacgtcgtccggtccgtgtcccaaaaatgagcgatcgagatcgtatctgtcctcctcggccgatcctcaaaggatgaagccagacagccaatcgagttcggaaacttttcatgaatcaaaggaatcagagtatgtaaggatgttgactcttggggtaacgtgtagatcgtggccgacggagcggccgatgggctgatgatggaccgaggaggggttggaggcgtgtacgtcctcaagaacgcagaaagatctgatgagatgacggtgtgggcaaacgagtactttcgtctggacaggccagccgttgtaggtgaatgaatcctctgtcgaatgctcatctcttcaaatttagtcggttgatgaagaacagagctggcaggatgggagattcgaaagagatcgtgtgagagatatctcgatgatgtcacgtgactgataagattgagcctgatagtttcataacgtttacgtttcccctccccggtttccagacaaatctctcttccatacacaaaatgatgatacaacaaactcagaagtaggaatatgatattacaacgaaacgaatcagattctcatcacctgaccgctgacccctagagggattccccactgatctctgattactgtgaaactgaaacaacagctgatctcctttcctgttctcctcaacaccggggtcgagctcgaaccaccaggccctaaaatatttcctgcagtgtttgtagtatttgagctcgacccagacatggagttcatagcattcgcagcagctagcgcggcggcattccttttcagaagacgcgccggaggacaaagcgtacaggtggtcaaaacggccttacgagatgtactgcaaaagagatagagaaagaacaaaatggtaagtcaatgaacgactggtcaagatctatcaaaatagtttgcagacaaggaacatactcgaagccaactgattgagaaaatggaacagaattgtattagatactggtcagaccttcttcgagcgtaaagcagacaagaaaacgtactagcacaatattgctagatcatgtgcaaaacatacttcagtcagtatataatcaaaaattacaaaccacagataccagagttcttacctcccaaaagtttaccgctgagtcttcagtcatcagctcataaatacccagctttccctaaagaatgacatccattcaaagcccaagtagaagaaaaagtcaacctcaagctctggtgagtagagaagtcaaaaaggaacacaaacgtctttgaaccaattaatgtctattcccaacagattggcaaacctgtatggaaagttgcgtgaaattttcataagtaacttatcgggaatcgatcttgatagtaaagcaaaagagaacagaagtatattcactcattgttggccttgaatatctgtcctgttcgcctccaaaacaaactaggcgttcgaacaacttttcatatcaaattcgccagatgaatatatgaattggccgataaatatctcatttttgtctttgacctattgaggtaaggacaaccaattggactgatggatgagcaaatcggacgcacccgtaaagcaccgatccatctgtaaaaccagccgttgaaacccttcttcgatcaagatcttttcctcttttgatagactggcaagaatttctcggacagtgggtcgaaaaattcgtagtggggccgagattcgctctttcgacgcctcactaacgctaagcagagggaaagatagacggaaggcaggagtattcagtttgaaacaacgatgcatctagatatgatactattactaacgtggcatccatccagctttccaattttgcccaacccaactcccaatcccaaccttctgaagcgctgaccaactgcgaactttcaaacttggctctcaagatcgcgtgtagatgatctcccaccgccaaactcggaactggctgcaactgactgtgcgctcctgacaacataggctgatggtcttcatctttttgatgccctggattgacatattgctgatgttgttgctgctgtggctggtggtgaaacgtatgctggacttcgtctgaagaaaatgggaccggatgtgacaacggatgctgagtcgaagattgtgctgcaggctgattaggtaaaggtggaggataaggatggaaatgatgagggaaatgtgtagggcttgcaggtcgagacacccttgcttgaagagctccaagattgatcttgtgctgatcttgatacgatttataaagctgatttaaaaggtcgttgaaagacccgttctgttgagcgttggcaaagagggagggagacgcggcgctcgcattgagtgaatttggtatgaaagattgaccggccgattgtgatggggaagggaacgaagtcgagttgttcgacgataggggaaggagagaagaagggaattccagggtgtttaggaactcactatcgtaaaaacaagcaatttcatgctttcgtcagacatataacacagacagtcattgagaaagacgtgatgacacgccaagacgactcacctaagacttccccactcagcatctttgtaacctgagttagatgccaaagtcgaaaccagattgtctcctggtggttcttccagtcctttatctctgcttacacccaaagcctcagatgtcctcggagtcaaggtccctattccgttccagggagaggctatgggcgtcatgcctataggcgaaggtgccaacgatggatcaatcattgtctcctctgtcctcatgacaggcttggagtagtttggagatggtggtcgcaacggctttgggtttggtatcgaggtcgctttggaaagtagagagtaagcctgctgactgtctggttgaccaaccctcggaccaccggaggcgtgttcaggatatatttgaggagatattgatggtctttgagcagacggatacgattgtggtagaggcggatgttgaggttgaagctgagaagaaagggggttgtgctttgattgtaactgatgggctatgctttgaggaggaaaggccttgttcaaaggattgcgctgttgatgttgacgcaattccggcagagttgcagcgttcgattcttcttcttgctgctgctgctgctgttggaggctagagatctggtcttcttgtggaattgaaggcacttggtcatcccctgaccccatacttttcggtacgatgggcggtaggaaaggaggcggtccagcaagcgaggcttggtggttgaaaagccgtctcttatcagaagagatttcattggtagaggatgagctagagatgcgatcagcaagagatggtcgccgtgggttagaagctaaagcttggctcgacggtttgttaagagagtgtttcgttcgagagaaggaagacacgcatgatttcgacttcggcggtggagatgccgaggaggatgatgccgaggagcttgagcccaacgaggatgaagttgagggtttggttacctgctgcgacctcgacttcttgccagcgttgagtgaaacgccagaagaagatgaagaagatgcggcggtgatattagcagtagtggcggtagcagcagcgactgtcccatcggacgcgttggtcgtggtaagtgtcgatggatccaggtctgtgcagaggtgctgaattccccgacggacacacctctcacaaggacgttctgttgattgacaagcagagagacttagttgttgattccagttcgtacatagtccaatatgctgcaaagaaaaagaagaaaaaaaaacaccaaccattcgaacagaccatatgagaccgcttgcaaaacacgcatgcgatctggacctttgtcctcttcttttccctctctctgtcctttgaagcagacgactgagtctgtgctactgctgctgccgatggtggtggtgatgaaggtaatgcctgcatggctttccgcttggcagatgacatctctccaagttcgtagataagcttcttccaggcctcttacgcaagtcactgatttctctgtgagatgatggatggctcgtggtcaagagatctgtttgctttccagttcggttggttggtcaaattcagatatgattacgtaaagtgatatttgaccactgacctccgtcgatcattcggctacgatttaagccgacgccaagtctcaattacccacatccatccatctaaccatctatttatcagtctatctaatcattcagatactacagcgttctgttgacgatgccgatcgacacgtccgctaactcaaacgttctgttgactggttctcaaatctcgcaactttcttcactggaagttcaaacctcgagtggctcttctgttgcctttggatcgctcatcaatccttccacgggtaatcattcgaaaacacttgttgtggcactacgtcatttctggtgtggtctgtgtaaggcatacctcactcagctatgcgagcagattccagagagcgtcgcaaaagaacacgggatgaatattgtcgtccttggatgtggaagctgggtgcgtcctgccatcctgtctaatttgggttttcaaggaacaagggaccgactggctgatcagatcgagaagatttgcgcttgaaattgataggaaccgatcaaagactatgcaggtcggaacacgaatcttcttatacctagcaattgagtcagcctgatctgatgacgactttctgttgctttcatcttgcaatagctactacaaattgtccgtatccaatctatgctgatcccaccaagaaagtctatcaaaccttagggacgacatccactatggcgcacacacccaggtccgtactgatctcctatcagaactatatgtcagactgtactcatcttctgtcctcttttgtgacaactcgtttcttacaagtggacaaccaagaaagagttacctcaaggagtcaatgttcacgcaggcaatgggcagtttgaaagtcgcgctcacgaacgtcggatcggtcaacaaagttggaagcttcaagtatgggccgctcgaatcttcatatgcacttttaccatctatatggctctcgaccaataaactgaccttcattgatccttcttttgatcatgttataggcaaaatggaggagagttcatcttcgaatcaggaccgatcaatatatttgcgcataggatgcaaaacacggaggaccacacagagattgcagagatcatagatatgttgagcgtataggttcgaaaaggaaagagattgcaatatgtatgattcatagtttttctgtgagggtgtaacattcatgagactctgcctgagggcttttgtacttgatacacaatcaacaagtccacacaacaaatataaagtaaaaactcataagatcgtcaaaaggtgcatatagatagcttttgcgcacataactctatgaacgtgaagtttaaagaaaaatcatggaaaacgccgaaaggccaatcctctgctatgatcctactcaaagctttgaatcggcaccggtaaactcatacgcagatttatactgaacctccttcactttctcaaccaactcttgcaaagacaatcccctcaaatcgacccgtcgatcaactttctgtttttgtgccacctggatcactcgggcagcgacctgtgcggagatttcctggattcgatctattcttgggtagagtaagtttgcggcagtctcactaggagtgagtgcttcagagagcgcgatagaagtctaacagagaccaaagagagcaggtgttacatcaagacaaggtcagagaacaagacagatcgtatggtaaaaacggggaagagacgtacagtttcaagcatcttctcagtcactcgggtggccccgcagagcgtcacagcctgtcccaaagccgggaagatataaaagtctattccagaaagagatgatacacgtttgttagtcagagcgagccaaaaagaaaaaatatattcaaaccactggtcatgagaacgagaacgtactgtttccctgggcagcttctctgtgctccccgttgaattcgatgggatcgaaaggcgaaccagaagcaaagatgactctgccttccgtccaatcgagagcgtcttggaacgtgagctcacactttgtcagcggattacttaacgggaagacaatcggtcgagggttgatctgagccatcttgcggacgatatcctcggtgaatgctccctgggtcgtgctcaatccgatcaacacggatgctttgaaaccgatcgaaggataggttaggtgtggggtttgatttgaggaatagagaagaagctccactaacgttgtacggaatcgacgacatcctcaagagacttgtattgttttccctcgttgtcgtccctagaaaagaatttcttgtgctcggccagtttgtcacctcgatcgttctttatatgcgattgatgtcagattcagaacatgttgagaagtgtaggtctttaggagcaagagagaaagagaagaggacgcacagtgatgagacccttagtatcaacgagatatattctctttctggcctcctcaggagaaagccctttggtggtgaagaaagagacgagctgtttggcaactccaactgctgccgatccggctcccaaaaacactaaagagagaacgaccaaaaggaggtattatttagcgcaaatcgacgaagaaagaggttatattgacagcattaccaattttgtgctcgcttaagggaagtccgctgatttttgatgcctgaacagcagcgttgatgagagcggtatagatgacagaggcggttccttggatatcctgttcacctcacaacacagagacttgttaagtccaaactatctctggggaccatgaaaactttaagagatatattcacgtcattgaaggtacagtatttgtcctggtatctctccaagtagtggaacgcagcctcactggaaaagtcttcgaattgcactgtgtgatgaaatcagagcgcatgttcgatagtacgtcccaattagtatacatatcttgagggccatcgcgagagcaagtagagtctgctagaaaaatgaggtgaatgaacataccaagcgcatcagggaagaccgccttcatagcctccataaactcgtccaagaatgcctcgttctcagctatcgatcgtcgtttctagataagagaggagatttagtatctgtcgatctatgattagattcttgatagacacataaagaactaaacgtacctgtcggaggccaaggtagaggggatcctcgaggagtcgagagttgtccgttcccatgtcgagaactaaattacaaaacagaaggatgacagaaaaggagtgagcatacgcaagcaagtatcgaggatagtcggattaaacgaaccgatgggcaaagtctgctcagggtggatacccgctctagttcacacagaaccgacatgacagcaatgagaaatgaattagtggtaggcgtgaaacaaagtgtaatgaggttgatggattgatggtattcacccagcgacgtagagagaaagctttccaatggagattcccattcctcccaaacccagatctccaagtcccaagattcgggatccctaagagatcggagatagcaaagcaaacatgtcaggccaaacatcacacagagatcggaaaaggttaagcgtatacgtacatcggtcacaacggagatcctgactttatccttgtttggccagttctcgagaacttgtctgatagatcccttatcctcgatagatataaataacccctcaggccgtcggtaaatcttatcaaagagaaaggagcaagcaaagttcgatgaacaaatgtaacgaagagcgcaaatggagagaacgagaaggaacagacctcggagtatctctcgcaggcttccccaacggtaggagtgtagatcaatggggcaacttcggtcaagttctccgttactgttggcagaatgcagggatgtatacatcagttagtatccatcaacctcatcgaacgagattttaagaaacgcttgtaccaattttgtagaacaacctgacgttggtttgtcggaggttggaaagatagatgtgtttctcaatggccgagtccttcgatctgagctggataagggcccgcttgacttgattacccaacgattcgagggcgctgtaaagaatggcatgggagaagatgaaaacactctcagtatcatttcgaaatcaataccctgcattcgtcttcattggtagtacggctaacagcctatcgcagacgaccacagattgaaatgcgtcgagaaggaagccaagaatactgaaacttacgcaggcatcaaccctcggattccatgagcatctcggtttgaaagcgacagaccaagatctatagaaatgcgaaccgaatcaaattaattaactgtttccaaggtttggatgagtcaatagcctgcgaagtcaggtgcgcaccctggttggtaagaggatctcgatgaatgtacgatcttaacggagcagggtcggtagaacctatagaacgacatgattcggatgtttggggtgagtcagatttccttcatacgaattttccgattgagcaaaagaagcggggaaagagagggaatcatattcagtgggtaggccagtaactcaccaggcagcattgcgcgagcagagtcgacgagagaagctacagaaggcatggtcatggaatctttgctgttatttttattggtagtagtggtggtttggggtgaatttgtagaagtcgtggatgaaaccaaacgccgctgggagtattgtgtattgatgggatgaagcttcgagaagaggagagaagtgatcagatggtctttatttgtgcgggagagcagtcgggaggatgacatggtattcatccgcttttttaatttttttctcggctcaaacccgggttgatgatgagaggaggatggaaagaccgttaaaaagagcgactcaaagaaagacaagagttagaggaacagtgcaaagagcaacaagcgagaaaagcacatgtatagcagatctgtataaaatactggcggcaattgcctcattgggaattctttcgtccgagaatgaaggagggtgtgagaatgtgcaggtactttactggttaaaatcggttgattagatcaagagatagcatcatcatggctttcttcggatttcctcggccgacctcgtgaagtttggccgatccgatgtaatataccatacacctatacggccactcgtgattcatgcttgttcaggtcagaactcgagagcaaagagatgaaggcgagattcagctggtcgtctgtccgtctatatgtacgtcactgactctgcctatgattgttaaagatgattgttaaaaatgattgttgtgcttctcttcgctcttgttaccatccttcttcaagtctcctcaggaaataattccgataaaacctccagatttaagagtggctttagtcgtgtgcgcttatttttcggcttttcctaagctttcccgaaaaggaagaaccgaggggaacagggatttcgccgcccatatgttgggggttggacgcccatgtcttgggtgtcatctgtggtggtcatatcggtgactaaccgaccggtttcccaaaaattatgcgattcttagagttgaacgacttcacaatcttgtatgggatagacaatataagttatattatcaacacatatacacactctcaaccacgttcacaatcaccatcaagtctccatgcctaagtctgctaaacagaagaaggccaaggtggcagacttctcggtgaggatggctcttttctcgcactcgtcagaatataactatactgactgaaatatacccttctgttacaaacgacaccaatacttggttcaacagaaagcaaagttcaagcttggtaaagggaaacagcaggctaacaatgcgactgatacatcttataaggtaagcctcaaccctgtctttaaatactcatagtctcaacaaggattgcaacaacgcctaataatatttttttgttgaacaggctcgatgtgtgtcctcatatccgctccagcaataccttaattgtgtcttctctcacactcaatcttttcaatgctgacctgcttgtctaatacttctctatagccatcgttctacctaaccaatcgatatcggtagagcatgatgagaccgtccctctcaccaaacgaaaccacacttttgcagacctgatcgttcaatctaagcactataacgccggcatccgaaaaggtatcgttgttgtaatctttatggtgatcgacgagcttaaggagactacaaatcgatccttattccccttccttgaatacgtttgttataatctagatgccatctatggtttgaaagaaatcttaactgcgtatccctcgctcagagtaaaggaactttcctcggtcgtgggcgtaatcgtcagatatatcaacgacgaagtcagtttctttatacatttcacgtcaagtctttcttggtgcaacccactgacccgttttccctcatttcattcaggactcatctgtccgaaagacccttcccgtcttcctctctcatctattatccatcctaccccattcaggtctcatccctcacctacctgtcatattccttcacttctcttccgcgctttcccatatatttcccgaggtccgaatagatgcagtcaagtctttccgtgttctgctcgagcactatccctcgctctgcgtcgaaggatgggttcagaatagagggaccggtggaagagccggtgaaggtctcatgggagtcttgggtcttggaggcgggaacaatggagggaaacaacaagctggtgtagcaagtgtacccctcaaatcaggcgcaaaacttattgtccttcaggccctggaaaaattcctgaaggcggctttagactcgaacatgccatccacttcgacagcatcagcgacgtcttcatcctcttcaattgcagcaacatcccgagaatctacctggttctttgctcattcgtttgcgtctcctgtggcgtttgccgaattttctaattctcttaccagcactccttcgtcttcggcgggacgggttgactcttgggcgcttggaactacaccagacgcttgggatctttcctctctggccataaactcatcttcgctttcttcttcctcgctcatttcctccagcccagccgaaggaagagaaggaagtggcatccaaccggttgagagaagagaaaaggctagggctgcagcaggaatgtatcaatctctccacccgcttctgctttcaacattcttggatgcagcaccaggcgcatttgatccttctggatcgatcactcaagtttcggtggcgggtgaggaactggagctgattgccgtggtaggagaattagcaagtgtgctgggaaggacagtcatgggaaattctgaatctttggttcgtagctttttccccatcatttggtttggctaaattttccaagagctgtactcaatgtcatcgggatggtgagctgacaatttgtgcatctattctcatacactctgatacatgcatttttcccaaacagccaagagaaacgttgagtggagtcaaaaagggtctgagaacgatgttgaatcacatggccgtgtactttcccttcaattcgtccactttccagaagagggatgtcaaagtatgtccatgataagtcaacatgttcaaattcttctatgtttgtacaatacagctgatcatcttcggtttcttctgtcctgaagtccgaatctcttctcctatcgctctctcttgcattctcctcactcgttgctcaagtgtccttgacccactcttcagtcgcccccagaacgaagagttcgaaccctaccgagaggaagaaagcattggaagaatgctatacgagaatgagaaaagggaccggggcgagcgagaaagtgttggttgataaggtcgctgtttgggtcagcgagctactgagaggagaagtgagtcttcagatcaattgtcaatatgaaagctctaaagtttcaataccccgtctgatcaaacaacacaaaccgtcttctttcctcgcagaccgtttcggcttcctctcctctaggtcaatcgcttccttcccatacgtatgaagctctccttccgactatttggtctctcctttgtcaacctcctccagctccggctgtcaagacagaccaaactgtctcacccgtagagaacggaaagaacgtatcgctcttgattggaaaggcagtgtttgaacattacaatcggttgaagagtttggatccgacgaagaaaatcggattggagttcttgggcaggttgtgcttggtatgtacaatgtttcttttccttctgaacccagtctctcagtttctctagttgtgactcgagatgctgacatactcccgttttgtccttcttgtgtgtaatcaaaccccttcctcccttcagctggagacatttaccttatacaacggtcctttccggttgcgtgaaccttcgtccgttctcacatcaggtctggcatcagaggtcgagaactttttcaagacgttgcctcggatcatctgggaagctggaagtaaagatcttcaactttcagaggtgaattttcatctccttccgcgagaatcaaggaagatcagtagactaactggactgttgccatgtcattcgattttgatatatgatacacacatagctcgtgcttcgacttactcagacaatgctcaagacctacctcaatcgcatcctccccgctatcctgccatcgtttccctcgtatttcaccatgaacattccctcgcgcggtgcgcttcctggaccgtggacgaaacttcctttggaaggtagaggtcgagttgtcaggatgctggctatcgataccgcttggttgctctgtaatctatcgatcttagaaggctcggctgtagctgataaagatcagagacaggctttggagaaagcggtcgagcaagcagtagatgttgtcgctgtggaagacaaaggtgaggcgagtaggtactgggttgggttgaaagaacttaaaagatagaaatgaagactttgtcgtcatcgtccttgtttacactggattcttcgagagtgagatacatatatagaattgttcatcatggagagttacttgaaccttttttttacatatgtttctgaaagcaagcaaaccggttgagcgtgggaggacgggatcaaagtagagaaagactctttcaatttctggcggcttctctgacctcttcctcccaaaccttcttgaactcctcgatatctcttccgccgcctatacagttgacatcaactgggtaagcgggccaggcaggcgcattcctcgccgccatcggatgagccctggaaggaatcatcaaaagaagtggtaggctcgtgatgacttcaacgtcttgttcttcctcatcatcgtcgtctggtgtagtttgagacgctggtaagtctgaaagagagagagctgaaagagcgtcgattgggtgagagtctcgtgagagtgaagatgactcagacccggtacatgaaggtgaggacaaggtggacagatagagctcgtgcagttgttcataactgaaaagaagaggagaagtatgaaacggatggtagggtgaaaagtcgacgatgtgtgcagatgaaaggttagatgtcatatagacatccacgacgtctgtaattcgccatgacaagtattattggttaggctcgagaaagggttcgcagtttttctgaagcagctgacattataaaagaagagagtaggaaagaatgaaacatacagtcgggcccaccggcgaatttgccgcgaatggtggtgtcaaagaactccagcaacgactggtgtatcttcgcttgtgtgtccggatccaccagatgctcataaaagtttgtgtctcgctgacagattcccagcagtgtgttgtcccggatgaacatcctaaattctctggatctgtcgagatcataccactttttgagaaccatctcaagtagttcgccttgaccctggtcctcggtttcatcttctattaccccgtctacggcttcttccccatccgtgcgtgtctgattgagcgcttccattacgccgttcatgagcccgcttgctttaagaaccataaaaaggtcttcgatgctgggacatttcataggcagtggaaaaggcaagatccattgagcatcttgagggcagacagagttaagcttaggaaatactccggacggcttgaacgttgtgaatgtggaggcaatatgagatgtgagccgagggagtgaatacacaggaggtgtagaggatgagctagatgaactacaagtggtatagcagaggtatgcttcttgagtaattgatttgtcaatgaataagaacaggtagaacagacctatcgtcgtctgccacatcatcatcatcatcatcatcatcatcatcagcatcgtcatcgtgactctcgaggtcctctagaagaacaccatccggcaacctcatcccatcctcgtcgaaccacttggtgaaggtgacttgctcttccggagaaaatttgaaaaccgtccctctgatagaaactctcctaaagactgggtaccattcagagaaccgaaaatgacgaagtttcgatcgggtcaatgtaggaacaacttggggtggcgatggtgcagggactggcattatgttcgtgtgcttgatcgtccgactctgtagacgactacatacatgtgaggttaatgacgatgaacgtgagtgtagggttaagagccgatcgattcttaggtaatcaccaccgcggctctggcccagtcaaaagttgcaccttctgactatgaacttttcccatgcctttcatacttaccttgagttgacagagagcgtcataaaactctctgtcctgtatcgatcgctgacattgcacggcgacacatggtcctcatcagcttgtatcggtagagtgtggttggttcgccagcttcagattcgtaatctttctcaagccttcattctcccttcggggcgggcggaggtgcatcctttttggttttgttcgtctgcttcaatcatttagaacgatttagtatgcacgttgtgttgcttagtttatcacttataacgtcaacacttcttgggagattatttatttaaaaatggttcatcgggtacatatgcgttttgtatggggtgtatgtcgagaaaagagttgtatcatcatggaaaaagagttgagaacggccaatggaagtgagatctttgatcgtttctctactcttggtaggcaggtctaaggtccgctcgccgtggtgctatgcaagtcacacaaaatgagtcagatcaaggttctatcttcagatcggcacttaactaaacagactcatgatgagacatctcaaaaggaaaaaaagtactcacagagtaaagggtggagttgcgacagatacgtgatcccccacctaagaaggaaacaagacacatcatgacatcacgttcgatcagacaacatgatgatattcggcgatcaaagtcagcaatgagacgtgtatacgattgaccagccggacaaaggtagaacagatcgatcaggaaggagaggtcgtacataagatagcatgacgtgagagcgagaaggatactcgttcggatcaatctattcatcatgaaaatcacaatcacaaatacggtcaggttggtcatccgttggttgatttaatcgaaacatgaataggtagtgaagaaacaaagtggatagagagataaaagtcttgtaaaggagaaggacgtacgtctgattcggacctttgggaatcacaaaccatgagccagagccgagagcggcctacaggcagggtcgacatgcagaaagagagagcaaagtaatcagcggaagaaagacacatcatcttagcagtatatagggggatagaagaggttcttacagcgatgagtgcaataacaaccacgagatatccagacatgttgtttgaacgaggtcaatgggtttgatggtttaaagcaaaggagatgagagtcgcgttggattcgtttcaacggcgagcgccgcctactttcactttcctcctctacataccaaaacgtcgagccatcctatttgcttgagacacacctacttcaacccattagttctcttcctctttttcacaacatggtgcctacatcggttcatccatcccagagattcgaagtctctctcctcggccacttagcgtcttcaatccatcctttgttgatcgagaaactctcgaggatgtcgatactatcctccccgttcatccaggaggaaagtctcatgcagcctttggctagacaaataggatcgcgagcagaggatggaacgatcagagctcggaaggtggatgaggatggagaactcatgacgtccgtcccttcttctctaatcatgtttcttatactcatcgacctaatctgacgtggctcattcactctctccatttgagcagatatcttgtaggcgctcgtctatactaaaaacatgcctttctgttattatattgaactcaccacgtcttacgagatattcaaagaacaggtagcatatcaacgcccagagtctatccgtgccactccccaggtaagctctatcacgttctcattactatctcatttcatatgcgatatgattctgacgtctagaattgctcacttgtgtctttgcaattctcttctttaaggcgctcgtgacaccgtgtacgtacactcaaatctcagccgggtgttcaggagaggaagcagctactcaattaggctttcaaaagtatgttttcctccgactatgtttcactcttccaatcctacttctttttcagccgatacctgcactctagctgaatatatctgatgcattgatacttaatttagagtctcgagctcaacaaaaagaggatttatcttcatgctcgccgttgggctccgaatagaagtttactcactcgacacaaacgacgtggtacgcaacacctatcatctctttcatcttgtgacctcgttttcttctttctaacgcccattcaatctttacatcatgttgcgcgtatgaatatatagcgctctccgtctacaccggaaacatatacaatcaaagttctgtcgcctcctataccttacgctcttgttgctcagacgatagaacacgctctaaacatcagacgacagcttgttggacttgtgaaactaggacgggtcgagggatcaaattaattaaaattctcgaatgatgacaatgataatagtgttagaatacatgcaaagattgcgtggaaacaggtgaaggctgaaggatgggaaaggtcaaaaattcgaagtacagaggtcttgagcgatgtttctcttgtttgatgagaccattcgttcactatgaaaggcaaaaattgatatcatagacaaccctatgacacatcaagacatatcggctttgattatagcttggagaaatggtagaagacatatcctcagaaggatatagtccttacacgtcgactagttgtgagtagcggcgtaggaagaattctcctgaaccaagaggaacgatgacgttaaaattcattgaagctgatttttgcaccgtgttagaacgcgcctatacctacgactaccttcgccaacaacttgtagtcgactgactaacttacagacaacaaccagaactcttgccatgacttccgatccaaatcactcagatgaagactcatggtcagaatcttccgcttcttcatcaagatccgatatcgctacaagcacaatgctcggtcttcccgatggtctcattacccttccctccgacctctctgacccacaagtctctcacctcggcggcagaccttccttcctcactggtatcaaatcagtgcctaacctgaaggaggcaagttgtcctagctgtgagcagggtatggagctgttggtgcagttatacgcgccattagaaggaacggaggatgatcgggtggtctatgtctttggatgcgcgaggggaggatgtcaaggtgagggtgggaaaggaaggtttgtataagttctttctgcatttctatctttttcgttttctctgtgtgatcagaaaagcctaggaggaagaaattatcgaaggagatttcttatgagacacaaaggttgctcatcaatccttccacggttttaaatctcatatgtatagtgtccgggcgttcacttctgtcaagcgtagtggaagctcttcaactactcagaagctggaagagattgaccaggcccgagtaaaagttgggcagctccagctgagcgacaagactgttgattctggtgagtcgccttgtagagactcaagtcatttcgcaggtaactgtttaacctcttccaactcttgtgtcctaatcttttggtttttctatatctagcctggaccgagacttctgcttacccggctcaataccttgaaactgagactgaatacctgacgaagaccaaaagctctaaagccgccgaacagacatctctcgacgctgcctctgctgctgcttcttctgggaagaagattgtggatgagtttgacttcacgctaaaggaaagtggaatccccgggttggatgaaacacttgaaaggtttttgggcaggctgaacgaggagccagaacaggtcgtcaggtaggtgttctctagccttgtagttgtctccatccgactctcttctatcacagatctgacctcttaagcaatcataaccgatcagatacgactttggtggcaacccgctcgcttactcctctacatccaaacttcatcaactcctctatcaaacacctcctcttcccacaggaacgctcgggtctacctctggtcccaaacgaaaggtctttgacccgacgcgaattccccgatgcgatcggtgtggggcggaccgagcctttgagcttcagctaactcctggtctgctcactatcttgagagttcaagaaatcacaaattcttcctcgcttttcccgaccggtggtgagtcgattgaaaagagtgatacagacaagaagaacgaaacagacgcaacggagaaagaggaggaagaagcaagaaggagacaagcagaggtacacaaggttctagagaagaaagatagggaggttaagacgggaatggagtggggaacgatctgtgtgttcagttgtgtagacggttgcggaggtgagtggggacaagaatgggttggagttgagtgggaagaataaatctatgaaatgtactcataaggatctcgactagtcatcaacagtcttccgtctttcttgatcttgaaactcatagaatatcagcgatatcgtccttaaaagaaattgagaacatcgatggttatgtacaagttgaggcgcgcaacaacatttttggggcaaggggaaaacacggagagtgcgtgtgttgatattcttggcgacctacgcttgctccctccgttccttgtttcccaaccgccatccagccacatccatttctctcaacaaggattctttctgggagcatacagttgttctctctagttggttctgtcatgtcagaggatacctcttcagccgtaggccatgttggcgaatgcgatcggcttgaagagccgagtgcgtcatcaattagtccgtgatccacacctgtccttgaacctgttgggctgaacacctgtcgttcagttcagctaaattcggatgtctatacttactcatttcttgtgccgtcaaacactcatgtttctgttatcagccttcgaaggatgtctacgatcattggtcccagccgacaaagctatccttatgaacgaacttcctcagcgtatgtctacgacttcctcactgactatggttcagatacgcatatatgcgtttatctatttattgtagccgtcctgatgaacgcgtttttgccgtttgatcgatgttctcacagtactggagaagcttagttcagaaaaggatgtccaaatcatgacgtccgatcagatgaatatcatccggatgtacgccgaagcagaacctgatctagagattgacctggaagggctactgaacatgtttgcgtgagtgtcaagggacagatcattcgtctacagttgaccgctcaatatctgacttggtgtcactctctagtcaaatgaacccggggtcaatggagaatgcgtctcctacttccgatgcttctgtccttggaacgcctgatctgtctcttgatctgacagattgctccgacctcaccaatacaaagtttactcttccagccactccttccacatcatcgaacccttctacagacccaccatcgaaatgctacaagttgaaccaaatttctaatcttaattcggacggtagcgacactcaggatctttccgtgaatctccaggattcttcccgcaagtttcagaaagcacctccaaatagttgggaaagattttctagaccaacgcctttgggtcatggcaggagacgaagtggaggctctattggactggcttcggctgccagcgatgccggaagtgaaggtgaaggagcgaggaatgaggtgagatgagcttcgtctttcttcattttgaatatagagtatatgcactttgtttgtcctaaacattcctttcggtcgcaaaaacgcttatgagaaggctcaaatcgcctctactcccacgatgaaagaccgccgagcccgaagacgttcccgtcaggtatcacagcctactgatctgccagcttcgggtggttcaatcagtacccctccaagacgggtttctcatgacggttcatttttgagctcacctggtttgaacgaaaatagtttcatctcagcggctaatctggtcagtcctgattcagttagcataccaaggaatgagcgtgagggcagtctagagtgggatggtgaagtgaagagcagaggctctctaaaggatgaagacagtctgtgtgtacgtgctcgcgcaatcttttcctacaattctcttactctcattctgacaaccttggttctgactaaatcaaacaaaaaaaactttgccaccattctcttcaatacagaaacaatcgacagactccccgcaagagctcgctgagatgcaagaccggatacaggaattcgagaagactatcgccgatttgactcgaaagctcaggattgctcaagaagaactagaacagactgcaacagatagcgagaacttgacggccgagtttcaaaacagacttgaggaaatgaaagcacagttgaattcgaagcgtaaagaagaaaaagagttgagaggaaaggagagagggtatttagaacagattcagactgtacgtggtccgtattgggcgcattgagatatccattgccactgacacttcttgatggattcttctgactgttagtttgaagcagacgttagtaaactacatcaaatggtggaaatgtcgaaaagcacatattctacgctaatgaagagctacaacgaacaaataggttagtcatcgcctcatcctgactctttcgacttgaaagttcaagatagatgctgagcattctacatctatatgccctcaaccagccgaatgcgagagcttgagaaactccattaggactcaagacgtcgagttcaaagctacgcaggaagttttggatgcattggaaagcgatactcagagggtgagacatctatctatatttcttgcattcagtttgtgtttctattgatgttttgtatcatggctaacaacctcttggctcctgacagctcgagaaggaacaaacctatctcaaacaagccaacgagctacttttacttgacctgtctgctgcccggcaagccgagaattgcttggaagagcagagaatggaaaacttgtcgttgaaagaaacgtgagttatgacaacactcttcatactttcttgcgtgctatgtgctttaaagtcccaccctctctgaatttaaacacctcagcatcaatcgacttcgagcagatctagataacctccgaacgatgagtgccgccagtctggtttccattcaacgcgttcaagcgcataatggccctgaaactttaggtcgaagcttagagaaagagcttttgaagcaattgcaggacccatcactagaggtagatctggcggatccaatgagatgtgatggcgcgactgaaaacgagctagataacggtgatggagaatcgcttgttcaggcgttgttcgcggcttctcgtgaacaggtaagatctctctatcgaagtctttcttagttttgcactcaagacagatatcgattgactcgcgattatttccttgttggactaatagtatcagagagaggcttttgacgaagatgtcgaaactgaagatcagcctgcagtaatcgatcaggaagactttactgtacggccccatgcagcttgagacacgtatgactttctggaggctagaacgctgatcaaaatttgtcgatttcctctctcttaaaactcaggtggctcctgaagaagaggggtctcagatgcaggtgccaatacggacggacgaaccaatgatggctggtcttccagcatactctcctcgaactgctgaaagtctacccacaggaatatcaactcagacctctttgatcgccaccgctatggacgattctgtttcttcattgtcgaccgtcgataaatcaggttggttgacaggtattaggcagcgacaaaagaagattcgaactgttcggttgaaaccatcattgtttgtccttttgcccactttactcgccatacagcgggactggtgtctgttaactgctctgctcttgactgataagatttcagatggtcatttgtaatcttcaactttagtttcacagatagtgaggcgcatccaagctcatctctgtctttcgaagcacacttctgggattttacaaagcgacacggacggtccatcattaccggagcttttcttactggcgtcacattctaccgtaagctctcgacatttcctgatttttgtgcagcctttgcttcgatattcataaacgatggtcctatttggttacagtcggagtcgtatatgccgacaatcagcatccaatcggaacaaatcttcaaagcgttctgtctggcgatgccagcgtatggcaggtacgttatatgctattcctatcttttggcttccacgggcgatcctgatcatgaactgtacgattgatgattttctcggacaattgattgcagtactacaatgacctcgcgcgagctcaaggcgcaggagtaggcttcagccaggtaccttgggagcaacccagctggttagggtatctaggtgccatcggaattggtgctgttgaccatgttaccaggagagtgccaacctgagagccgttggaattgtgggttggaatatgtcggctttctcggtacttctacttttctctctccgttgtcctctctctttcttctctcgtatttacttactggtatgacgcttcacgactctcctacacatatacccatcctgtccaccgcttgtgataatatatatatatacacgtttgtaaacataatctctcacggcatcttccactgctgcagttgatgtgttcccaaccgaagatgcaaacgctaacgaaagaaaacggcgaatgtccttgttggcttctagatatgttatatgaccacataatcatgtagtcacacaaactcgcaaccacattaccgcgtaaccgcgtaaccaccaccacgattctctccacgcgacgcctcccgcttccgctcgtttgactcatcgctctctcaacctgaggatttccaagctagctgatagttgaccttcatccttcatcaatccgtacactcaaggcggtcgtcgttctctctcatccttcctcttctctctcttcctgacgtgtaaaatatgggaaacggtcaatcttcccctaacccacatcacacaccgcgcgaacacaaaccatcatcgtcccatcatcacctctctcgttcgtcatcacctgctgcctcaaactcggcgaacaaccgacggaagaaatcactcgaacttccagacctcgccaatctcaccctcactaacgttaacggaacggccgggtcatcgccttcgtcgccatacgctccggaggccctcggaaaagactgccagaagagttcgttaaagaccggaaacgcgaggaacgttcctgggtcagcaaagccggttgataacttgggtcttaagaaaagaccttcacctctcgctccctctttggtaacttcaccactctctccgacgtctcccaaatcctcttccatcaacgccgttcacaacctttacttctcttcgtccaatccaacctcttcttcttcgtctgccaacaacaccaacacgtcatcgcccacccacgtagataacgttctaggtagcagaggtgttggcgccccccgtgaaccggttcctattcccaaaaccccccaaacgcctaacgccggccttccaaactattctcgatcttacactcccaatcaacgaaccgaatctgatcctcctgatagacctccgtctaccgcaaggggtgatcacctaaagcaggccaagacggcacgtatatcggacagtttgccagaggagcatccaccgctttcgacatcgcctgcatcatcaaagcacagcaagagggatccctcgggtacaggcgaagatgaggtatacgttcgaagctcgctaccactaggcggagcggcctcctctcccggcccgcatgtagatggcaccgaagtggcttcgatgggcttaggtctgataggggcagatgcgaaaagtcagtctgtggagagaggttttggaagcaagaagactgctacacgacaggtggaggatcctaaacaggcagagaaggaagtctttgtcaacgtgaaggaagaaggcgtgccgacaatcatcaactggaccggaggaggcaaagaagtcttcgtatgtgggacgttcgcaaagaactggaaggagaggatcaggatgaataagaggtacgtttctgcctcgttcaaccggttgaggtcattctgtctcccagagcggtcgaagttgattgcagctgcttctctttggcaacatacgaatcacgtcgcttatgtgtatcaacttcaaatagtacacatgactttacgctagttctaaaccttccaccgggtccgcatagactcaagtttattgtggacgaatcctggaagtgctcagacgacttagccacggctacggacgcggatggaagcttagtcaattatatcgaggttcgtccaatgcatagggcaagaataaccaagagagatacaacagatacttatattttccttttattctcaaactatggtatgcaggttgagcaggaatcaagcaaagatggaaaaggctggagctcagagtgggagggtgcggctgaggataatgatggtgcgtttgttaccttctgtctttctgtctttatctggaggtttagacgatgtagacctattgttaaacttacctatgccgtcttctatcttaccttttgcatcacagatgatcctgatcaatggactactgaaattccagaacttctcacgcaaacccaagcggcggaagaagctcatctggcgtacattgccaatctgccaccagcaaaccgacaacccggttcggccgcactcgcgaatccgccaggtttgccgtacccgcctggattgccaagacacctggagaaggtcatattgaacaacccgccgaaagatggtggtcaaggaggctcaggagggccgacagaggagagtggagcgagagggcgcggagcaaagagtggaaataactcgatcgctgcttgctgttcgtacacccttctttgccgtcgcttttttacctgccatcccttcagtcgtggcgtctttccctctgtgtgagattaacgagaaagctttatctgaattgtctttctttctcttcctggttctcaactatcaacagggacggcgataccagatgataactcgattttacccatcccaaatcatgtggtactcaatcatctgacggccagtgctatccggaacggaacgttagccgttggaacaaccactcgatacaagagaaaggttggtcttttctctatctatctgtcaacatgtcgcttcccatgactgcagaatataatctgatacggtaatctaccttggccaccatgattctagtatatcagcacgttactctacaagcctgtcgagatacgggattgagtcatccgtggatgaaggtttctttcttgagttacttgacgagttccaatcagcttccttgtcgattctttattctttttatctaatatcatcttcttttacaatctgccatgtgtataaacttccctctacttccttttgatgtcattttcttttgtgtcaatcttctcggcttgatgattctgtactcatacgtccatcttccttcgaccatccccttcttccttgtttcctctctttcgttgagaccttctatctccaaacggagtagtccgggtctcaactctctgatgtcagcatatttgcccatcttttcacatgtgatcctctctacatctacacacaccatagtcctcttcgatctgggcttgtttcatctttacatctccttcctctgtcccccgctctatcaatcatatttctctctttttatatacttctggtcctctttcctccgtggtgtctctgtatgtggcctcacacgaatcgcagatagaaagacaagataagacgcatgcgattgtgcatgtgtcaagaagaaggttgggtatttactttgtttgtctgtctgactgtctgtcgacagaatctgtggttgcatgtaaccatggtcttatgcactcttaattatattctcactctctcccaatcttctcttctggcttctgatgtgaatctttttgtgttggtcagaggtgaaacatatgtgatagatcggatgattttgaatgcataggacatgggaaggcaaagctttgatgtattgtgtgagatggaaacaaagacaaaaagagaaacgagaaaggaaaaggagaagaaaagaacgtgtgagatacctgtgcgaaaaagatgagataagacgtgaagctgagaagaaagaaaggggtagaggcagaggaccagaattggaattgcatgcgacgagaaggatagcaaacagagatacatgggtaaggataaaagagggtgataagagtggatcaaggacattaaaaaaggaaactgtgtaaggagattggacccttttttcttttttgagaaacgaacatgagacaatccgatatgtttgatgacagtttgaacgtgtttcctcatagagacaagagaaacatgaaagagagagaaaaagacctggggatgttgaggagctataggtggcaaaatgtcaatagagaggatgtttatctcccaaagaaagcagaaattcctcgtttcttctccttctttgatttcggaggctccacatatgtatcaagcttgtttgttgaagtcgacgccctgcccaatgatgcgtcatctctgttctgagattgagtctgcatcatcaagcctgatgaaaatgaggtggtgggcagatgataagaatgggtccggccttccgactgcacaggtacggggaagctataaaccgaggaggctccgcctgtacttatgtatggttcaggcgaagaagatgggaggggaggaaggtccttgtccaggttggatatggtcgagatcctcttgagatacagaggacgagaataatacccgtcggtcatggagggcgaagaagcttttgactggaaagaaggcatgtacaaatccgtctgattttgcagtaacgacgagctcatctgcgaaggtgtcaaggatgttcgagaagggaaagtgttggccgaataagatttactatgcagtctttgatctcgttccccagtaggatcaaagtcgacaggaagataccccgtctcggacgtataatccccagtcatccttcgctttttcccatcgaacaaagacgcattcaccggaccacttccatctccattatcgacgacgatgagtccgctcttccggctacctaatgtctctctgctgatctgtcggtcgaggaaccgcatcgatgatgtgggcggagacgacgtcatcgagggagttcgttgatgaggtgggactccatatggcaaagacgggttgctcccagcaacaggtgtcgagactgatcgaggttgggaagacgaatagcttacgccggtcgagagggcaggtgggaagttgccggagaggcccgaggaaccagaacccgatcgaccgtgtgtggacccactgatatcaccgtaccctctaggaatgttcggtccagagctatgtgaacctgaggagcttccgccccctcctgcgcctgctccagacttcttcgacaagaaggacaaacttgggggaggagccaaaggagaattcagatcgtcttcccccggagtttgaggtctggattgactgaatgttccagggttcaacatctgaggtgaatttccaaagctcgatgttgtccggaccgaagcgccactgcccaacttggagaaaaactttttgatccctcctttacgcttcttatgatctggatgatctggcgagtgaggttgcgtgaagagatgagacgaaggttgcataggtgaggattgggagtagttttcaaattgaatggtagaggcaccgagtgtggatgtgtgatcgaactgctgacgccaagattgagaaagaccatcgatcgaagcagctgcaggagggtatggagaagagtattggtttctaatggccctctctcgttctctctcgagtccaagacttataatagcaaggtagacgttttggttagtcaggcttccgtattcactgatggtacattatggtgtcaatcaaaacttactgcatgtcaaccatactgccgcttgctccatacatactcccctctccacctgctaaatcgctggtctcacttcttccactgccaccagcaagcctacctttaaagattcctttggaatccaacccgattgagcttgagctccttcctcttcctgcccaaacagcaaaactaaatggccgaacgactcttgaatctatcgaattcgggctaggtgcgtccgctcgagaatccactatttgctgatgagaagtcgtcatcgtcggaatttgaggatccgagtatggctgatgattcggtcccataggtctcgaagagtttgaaggcgttttctgctgtaagaacaaaggcatagtgcttgaccgttggtgtgctcctggctctcttccaggtggaaacccgattgcataagcattcgaggattcatatccttctataccagagctctgtcgatgggcgtttccaggtggcccgatggattttgcaccaggactgtttaagtttccattatgagaaacccgggctcgaccggcagtcgactcgagcacgccaagattatttggtgggtctcggcgagggctggcgagcgagctgcgcactttgtgtgaaagagcctttggttcagattcagtcataggcagattagacaagctatctaatgcgtccggatgaatcaatgtaagctggttgcgcaagtagacttgaagagtgcgaagccgatgggtagacgcaggtgggttctgttagggacgaaaagcaagacaaaccccgttagttgagacaaaactcagaatttttcaagcagtggaaattcaaaacggaccttgagtgtccattctttcaaggcgctttctgtcaactggtctccggcaattgaccgcttcgctggcatctcgaacccaatcaccatccccattccaacaggtcctcctccctcccaatctttacctcctttgagtagttcagtcacgtcttccccggctgattccctagagacgagatctgcgaaatcaacatcagaatggcgtgcccatattccaggagacgtgacatcaaccatgattagatccctatctcgagttaagcatctgtacgtaacaaaaaccacacgcgcacatgatcaagattgaggtaagctccgtttctcatatgacgatcgtgaattttacagaggtgaagaagactataagaggaaaaactgactctagacagacttccgggccaaaggatgttcccttctgtcctccaccgccaccctgaacacctagtctgagtccaagtcctggatccaaactccttcgagcggcctgatatggcccatcgatgtcaaacgcttccgatctcggtctgaacatgtcgtttccgttgggaaccggaggtggcgggggtggagtcggactgaatgctgtcaaagattgtcgaggtcgagatgacggagacgaagtcggagggagaggttgtgatattcgtatagatgtcgaggtgtgcgttgggatattcgagaagaggggcggctgaggaagtgcgcgtctgtctaggggtggagaggaagccgggtcaagttcgcccggagggtaagatagcatggatgtagattcggccaaaggggagaataactggcgggatccaattcctgcatagttgattggttcttcagtcgaagcctgcttgtcaggaccttccgcccgggagaatttcgactcttcgagttgcgagcgttgttcaagtgatgtgagactggattcaatcttggaaggatctaatacagaaccttcgcaaggagattgaacggtagcgtgtgctgattttgaatcggacggattggttgagaacgatggtgggatgggtagaggaggcatagacagattaatgtgtgtcgtggctgttgatgtcgatagaacggccgatagattccccgaagcgctcgtcgcagtcgaagcggacagcatgtttcccgctcggggcgacccaagcgcggcccctcgagtcgaatgattaggggaagatgaagacttgagggatgattgagactcggcagtgccttgccgtcgaactgcgtacccattcctgctgtcctctcgatcctgctcggttttctgttgagacttggagttttccggggcaaactcgtttgaaagactgtgtgaatttcttggtgcatctcggatgcccaaccccaacatgacttcttcatcaatggctgcaatgttacctggcataacgctcgcacctgtcgttctctgcctgtcgactgttattgaaccatcagattccaagtcttgagaaacatccggttggcgcgtatggatgaaaggctttgaagagatttgtaagatttctggtgactgtttttgcttttgatggctaagcgaaggtgcagaaggtgtaggtgtggatatctctctggcagtcgtagctgaagccgacgctttcctaggagacgtcatgatagacgattgcgatgatattactgagccagtccgaactctttcgcgccggcttctcaagctgaagcttgacgttccacccaggttgggagagactagggaggatgatggtggtacagatccggagggagaagacgaacgttgatcgaaatcttgaattcgaaaatctttaagggtatccaaatgaataggcgggtaatcaagcacgacgggaggggagatgggtggagctgatgagtcttcacggtcggacaaagttagtgtaggaaaaaatccgtcaggagattcttcaagaggaagaaatccgttggacgactgaaactcctataatggaaaggagaggtaaacaagccacccagaaaacgctattcagcctaatgtgtctcgagacccctccattggactttacgacctaaccgaaagccattgctaggagcgatgatgaacagatagtttggtacgtacaaaggggctcacgggagcgacggttggtaggtaatctgatgtgccaggagtggatgaatggctcgccggacgaaggtaggagccattcggtgaatccggtgtagatccccggctactggagcgtgccatagtgctgttttctttggtctcgtttcctcagtctcggttggatagaccttggaggcgattgatcaacttgtacaacctggtggaagtaatcacctctcgttcgagggaaagagaagtagaaatcagagcggaggatagaaagggaaaacggttgatggaagaaagatctcactagagtcaaacaaatatgaaattatgacaactcctcccagttgcgaatctcagtgggtggcagaattagagggttctcgtgttctttcttctctactgttttctctcgttagtcttgcaccagtaaacgttgagatagcgaggaacttgtgaaatgagactgaaaacagacgagtgtcaggaggatcagaacacgaggaaggtttcatcttttgcagcttgatatgtgcatgcatgcaacaccaacaacatcaaaccaactcgccttgcatccataacagatcgtttcccgtcttctaaatgtctctcagtctctctataccacctcaaccagtcgctattgtgcacacccagaaggagattacatatgatacagtcttttttttctcttgtgttctactctcggaacagaaatagctggcgtactctgcctcgccgcaagcatcctcttgtcgcaccatgcaggatataaattatcattgtttactctggcttggatggcgctgagctggtctcgtccagcccaaatggtttgggggcagttggtccatcctcaagtctgttgaaaaacaatatcgccaataaacatccgtcagaaaatgtagatttgaaaaagaaggtatgtcgaaagagaaaagaatcgggagctcacggcgggggggcagaatttcctgagttggcacgtcgctatgatccatagagaataagaggacatgttagcgggttgcgctcaaaaaactcttatgtacagaatgcgtccgaaaacgaacctcaaggaaatcgtccatatcgtcctggatgtcaaacggtcgtttgccaagcaattcaaccatgatctctcgagtcaagacttccttctcgagcaacttctttgccacaagttcaacctcggctcgcttctcctccaacaaatctcgtgttcgctgtcgagccttcaacagaagctttcgaacctgtgggatagaaaaagagtaatcagcataagctcggaacaattctttgacaaacacatcagagaagattctaagagattggaaacactcacctcatcatccagtagttcgccggtcttctcactgaatggcttctggaagctctccgagtctcgtcgaccataactgactggtccaacggcctcgctcattccatagttcgagcagatctcaaacgccatctttgtgaccttctgcaaatcatcctgagcaccagtagtgatctttccaaaaaagatctcctcggcaactcgaccaccgagcgtcatactcatcgaatcgagaagctgctcggtcgagtagaggaatctctccttggggagatactgggcgtatccaagtgcacctactcctcgagggatgatagagatcttcaaaagagggtcggcatgctccaagaaccaaccgcaaacagcatggccggcctcgtgataagcgactgtagttttctcctccttgccgagcacccgactttttcgctccaagccaacaatcactcgctcaatcgcgctttcaaagtccttctcttcgatcgcaatcgcgtctcgtcgggcacagtggagagcagcttcgttgcagacgtttgcaatgtctgcaccagaaaatccgggggttaaaagggccaacttctcggcgatcatctcggttgagaggtctttgatcaagacaagaggtcggaggtgaaccatgaagatttgtcgtcggcctccgatatctggtcggtcaatcgcgatatgtcggtcaaatcgaccgggtcgcataagcgccgaatcgaggacgtccgctcggttcgttccggcaaggacaacgatgtgctcgttgccctcgaaaccgtccatctcgactaagagctggttaagtgttgattctcgctcgtcatttccaccaaatgagccggattttcctcgagcctttccgatggcatcgatctcatcaataaagatgatgcagggtgcgttcttcttggcgttctggaacagatcccggactcgggaggaacccactccgacaaacatctcaacgaattcggaaccagaaacagaaaagaagggtacaccagcctcgccggcagtcgccttagcaatcagagtctttcctgttccgggaagtccagagagaatagctcctcgagggatcttggctccaagggcaaggaacttggcgggctgcttgaggaacttgacaaactccatgatttcctatatatgtttttatacgatcggtcggttgtagtcagcatagttgatcgcattgaaacctagtgaatgctggcaacaagagaagaaatgatgaaccaatttagactaacctgcttagcttcatccataccggcaacatccttgaacttgacagcgatatcagtctcgtgactgtaaaagagaaaggacgtcagcttctatttcttagggatcaaatagacacaacgatgacaagagcccactcacttgaacatcttggccttgctctttccgactccaaagatcccacctgggcctccacctccacctccaggcagcgccttccttgtgctccagacaagaactccgacaagcaataaagtaggcgctatgctgaagacccactctccccaactggtttggtccttgtactgaatcgggattcgctcatgactagcgattccaagctcatcctgagcaagctgcatttgtcgttcgaacgcatcaggcgagccgatggtaaagtagtagcttggctgtccggaagcggcaggctgtgtgggagtaaaggccccgttgcctccaccgctccaggagttattgtcgttagcggacggaatggtggcaggagagaacagggtgacgagcactcgagactggttgactacggtgagcttttgaacgagtcccttagcgagtagcgagtttcggctgtggaagtttgatcatcaagaggtcagacagaaacacgcagccaagaagatggtccaagtaagcaactaacaattcctggtaggtgatctctcggtggttggtagaatcaccagagagcagttgataggccatgacagctctgcaacaatggtcaaagaacgtgaggtaaggtgaagttgagtcgaagataagataaagaaactatccgtcagctttgcagttcatttcgtatcctacgaatgggtttcaaaaaacagagacaaggataagagatagaggaggaaggctcacccgactccgatcaggaaaaagttcctgttggacatgtttccgccaccttcgggaaagccaagcttgaacaatggatcctcgctattttctttcttgccatccttgccgtctttatcgtccttgctgtccttgttctttccagacaagtcctgtgcagactcatcggtggacttgcccttattgggagatgtcggcatcgggttggtcgaagatgctcctttctgcttgggctgtccgaagaagccagaaagagggaagggctcctcagagtttgacttcttgggatctttggattccaccgccttatcggcggactctggagtatgcctggcgtaagacgcgatggaggacgagtggaaggccgatcgagagtgaacggaggtcgatgcggcccatcggaatgagggaccggtcaagacggacgctatccttctcgatggctgtactaaacgaagcatgtaaagaaaggaaagtttttatcgaaagcagcaaaggtctaacgccagcagatcaagctgaatgtatatctgtatgggtgtatgtaaggatgattgaatgctggttgatgtgggatgggatgaaaggtggaaagagaaggagaacgctggaacttccgtcagttggccgatcccatcggcaaagcgctttgtaaccatgtggttactgatcgtccatggctacgctgctctcttgaggctttttcttctcaactctttaggaatgtttcgatatgcaaaagacacctggaagaaagcagagtaggatggaaagggagaagagagggaagaaatatcaggcgattgatcggccatcgatgaagaataactatggatgagtctgctgtcttgtgtatggatggtagatctgatgtatgtgaggataatacagaaagctgggcagactgagcattcagttgatcctctgtatcaagcgtaccatacatgtggcatgcgctgtaacaggatcatcaaagaacacagggcggcatgactctctctttcttctctcttcatacacgatatcttcaaacaagcagacaacagtcaaccagcttcttgtagggtactcattcagatagtctactcaactaggcctttaccactagagcccacttggatgatcggtaagtggaggtccgaaccctaacaaacagtttgattacctaatcaagttcaaaagttttttcaccgctttcgtttttatcgcttgcaacttttttttttcttttttttctttttttttttctcgtctagcattccctacatcgggaaagcaccacgccactcagctcttcacaccttcacccactcgcataaaggatagcctggtagttggctggtatcccttttctacagatcgactgcatacacatatacacacgcgcatccttaatttgtttttatatcattccgcttggatttactttatcatttgcagttcttgaacaaaaatgctaccggcaactttcgacccatttgctttaaacctcagacagcaggcacacgctctccttacccacctacagatccctgagtctccggctccgcctacatcgactcccttcccgtttcttcctctttcacatctccaggctgttcaccatgtggcctacactccggagcaggtcgtcccggatatgacccctgaggcattcgtcgatgtcctctcggatctactagaacttcagcccttggctgagaaggtcgccgaaatttttagaccgcttctcatggttctcatggccagatggctcgagagagctcgaggaggcagggacgaatgggtcaggaggctcagctcgggcgtcctgatcgcaggctgcatcgaagaggtttggccgtgagtttctacttagttccaccatcgagcgtctctatctatcttgatctgagtaaaacttgacataactttatggccactctttccctttatgacgctcagaataatttctagtttattacaaaccccgacatattcgttatacccacctaccgaagaatcgttgctcctccctcctaaagatctccatcccctactcctcacccatttacgactacttgctcttatcccgtcctccctccttccgaagcatataatctcaacagctacccttcgcgcactattcaccacccctcacccagacttgtcgactcggatgcttgccgttcgagcgttctccattcacaacgggatctcagaatcgaagcgaaaggaatgggaagaatctctcttgcagggcaaagcatttggtcaggacgatatggtttggtatgagggtttggccgtcatcgagggcgttacccaagaggtttggagtgacggttggatctggcctctcgtcgaggctagaaggctggatatgttggagagcgcttggaacaagaacgtccaggagctctacacgccttccaactggacattatcgtcgagctctttgcccaaatgcttggctcttgcggcagaccgggtgcttctcttccgaccggcgcccgcaccatcatcatcatcgtctgcaccgagagtcaatccaaatgtgacagaacaacctcatatacctacaccatcaaccacaaaatccttgttggcgctctcccttcatctatcaaaacgatcccccatcatgctcacttcacctccatcgagtggcaagacccatctgttgacgtacttgtctacgctacatttcccgttccactcaaatccgacgttgactatttctctagctgacacatcgctcgacccaaaatcacttcttggtaactatgtgtcctctccgaccgaccctggaaagttcacatgggtcgaaggtgcccttgctaaggccgtcaaggaaggaaggtgggtcattctggaggacattgacaaagctcgaggggaggtccttgctcttctcggcggattggccgaggagatgagcagagggaccagagcggttggcgacagagggtcacttagaatccctggaagggaggatgtgaggatcggagacggctttgcgctctttgccaccaggacgatcaaaccatttgctgcccctgctaccacctcggacgcagttgacgaaatcgacgtcgccaagccggacgcgaggtttcccaaaccgactttcttaaatgctcaaaagtttgtcgaggtgttcttggaggagccgacgaagcaggagatcgggatgatccttcaagctaggtt

SEQ ID NO: 1594 - DNA, 47774 bp, Xanthophyllomyces dendrorhous
attagaggcaaatcaaattgaccagcttatgtcggcttggagttctgctcagatcggcagatccaccagtggaagcggtattggtagtggaggtgctgcaggcagagaggtaggactaagagacctgatgaagtggtttgtcagagtagaagccctggttactgggtatgttttcttgtctttctccttcttcttcctcttcagaccaagctcttgcggagtccgaggttcttatcacgcatcatctttcttcctatctatagcgcgggatcgacccagatctttggtttggatggatctttcgtcaaccctatcgttcaggaagaggttttcatcgaggcgctcgacgtcttctttggttcgcttccaaagcaaaacgttgctcgagctattgcagtcggagctcagcttgggctcaacgaggaacgagcggagtggtgtatggaaaagcgaatgcctgaagtgagaacgatcggaaacgaagacggtggagaggtcaaggccgttcgatttggtagagttaagttggattgtagaaagtctgccaagggtttgtcctctttgcttgtctcttctcggtgtttctctttcaatattttgacctcgattgaacttgtgtgcgatacttttcgaccgatcagcttaccactctgccgcgaccgagcgaccgtacgctctcacccgaccctcccgacttcttctcgagcaaattggagttgccacctctcacctcgagccctgcctacttgtcggagagactggtacaggaaagaccactgctgtttcctacatatctcacttgcttcgtcgacctctcgtctcgttgaacttgtccactcagacggaatcctctgatctacttggtggattcaagccgctcgatccaaaaattccggccggtgaacttttggtcacttttgcggacctgttttccagaacgtttagtagaaagaagaacaaacgattcgaagaggttgtcaggaaggctgcaggagcaggaaagtggggaagatgtgtggagatgtgggaggaagcaggtagattggctagggaccgtttgaagaagaagcttgaaggtgtagaggaggatgaagaggtcgagtgagttccttatcttcctttgtttttatacatgacgagagtttacgatcatttcaaaagatcggacagagtcttatttgtaccatcttttcgaaaaggtccacaacggctccctctggatctgataccactctcgacgcggttggtcctcgaaagcgacgaaaggtggccctcgagcagcaaaacccagagaccgccaagctcgtgactgagtggaacgcgttctccctcgaggtcgctgattttgagatcagacacgtcaaggccggtggtcgattcgtgttctcgttcgtcgagggacctttagtgaaagcattgaggaacggagactggttcgtcccaccatcaccctgttctttcactgtactgttcgcaagtggtttaacggtcgacttttttctattctatcttctaggctccttctcgatgaagtcaatttggcctccccagaaactttggagagtttggcttgcatcctagagagcccttccgcttcggttgtcctcaccgagcgaggtgatctcgagcccgtggtcagacaccctgatttccgtttgttcgcgtgtatgaaccctgctaccgatgttggaaagaaggatcttcccgccagtctccgatcaagattcaccgagatctatgttccttctcctgatactgaccgacaggccctccgagatattgtcaagcaatatctggacgtcgccgatcgagcggtcatcgaggatgtggctgagctgtatctcagtatcaagactctcgccgattccagacaactggctgatgggtcgaacttcccacctcactactcaatgcgaacacttgccagagctctgacgttcgcttcagagaacgctccggcatacactcttcgacgagcgctctgggaaggatttttaatgtctttcacgatgctgctcgacgccaagagcgcggctattgtgaaggctctgatccagaagcacatccttgaagccgctggaaatccacaggccatcctttctcaagtgcccggattgccttccggaagatccgccgatgatatgtttcggttcggacacttttggctgcagcgaggccctaaggaagccgatgacgcaacggagtatgtgctcaccccatctgtatctgagaagttgatcgacctggccagggtgatttcaacaaacaggttccctgtgctcattcaaggtccaacgtcgagtggaaagacaagtgcggtcgagtacctcgctcgtcggaccggccatcgattcgttcgtatcaacaaccacgaacacacggatattcaggagtatctcggtacatatgtttctgatccggacaccggcaagctcgtcttccaagaaggagttttggtccgtgctgtcagacgaggtgattggatcgttttggacgagctcaacttggcccctacggacgtgctcgaggcgcttaaccgattgcttgatgacaatagagagcttgtcattcccgagacccaagaggtcgtcagacctcatcctcatttcatgctcttcgctacacaaaacccgccagggttgtacggaggaagaaaggtgctttcgagggctttccgaaatagattcctcgaagttcatttcgacgacgttcctcaagccgaattagaaacgatcattcatcaacgatgccggattgcaccttcttatgccaggcgaatcgtctcggtcttccaggaactccagacaagacgacaggccggcagggtgttcgaaacaaagcagtcattcgccactcttcgggatctcttcaggtgggcgatgcgagaggctggagacactcagcagttggctgagcatggttatatgcttctggcggagagggcaagacgtgcggatgacaagttggtcgtcaaagaggttttggagaaagtgttgaaagtctcgattgacgaaaagaagttgtatgatctgtcctgtgagttgctgtcgaggttttataatcatatctattgctttgaactgccagcacaattgtactgaaaacattgctttgtactcctcacagcgtccgatcccgccgagattcagaaacgtttgggctgtcccctacctccactatcaactccctcatctatcgtttggacgagcgctattcagcgcctctatactcttgtggccgctgctatccggaataacgagccggttcttctcgtcggtgaaactggttgtggtaagacctcggtttgtcaattgttagcctcggcactgcaaaaacaactttttgctgtcaattgtcatcaaaatatggagacggccgatcttctaggagggcagaaaccgatccgaaaccgagcaggtcgtcaacatgatgttcttgaagagctcagaagtatactctcccgcatggacgttaccctttctttggaggatacgaccgagtccgaacaggtcatcgttgctgtggagacttacttgagcggtcttcctaagcctcttagtgaggacggaaaacttcttcgagcttctgttgcagagctcaaacgatctactgctctgttcgagtggcacaacggaccccttattgaagctatgactactggcgaccttattctccttgatgaagtttccttagcggacgattcggtgctggaacgattgaacagtgttctcgagccagccaggacgcttgtccttgctgagaaaggtggaagggatattgaacaaatgactattgtggctgctgatggattccaagttcttgcaacaatgaatccaggaggtgattatggaaagaaggaactctccccggcccttagaaatcgattcaccgagatctgggtgccttcattggattcccatgatgacttgatcaagatcgtcgattcatcttgggcggttgaatcactcaaagcatacagtgaatcagtcctgtcctacctccgatggtttaccgctgagttaggagagtctgggtccccagtaatcggagtccgagatatccttgtgcgtccgcccagttttcagtgttgttacatctgctgtgtatacttaatgctaaccggatgaacgattcttcgtggttttatctttccgtaggcttgggtcaactttaccaacattgctgtcaagaacttaaacatctccgagcaagaagctttcgtgagtagttagcttcacaccttccatgttttggtgatatgctgacaatagacttgtcatcttgcttaaccacagcgtcacgctgctcacatgactgtcatcgacgggttggcccttctgccccaaacatcaggcctatcgtccatcgcaatccaaaatcttaagaatgagtgtgtcaaaaagctcgaccagactctcggttcttcttctctcccccaagacttcactgttttggatacgcccgaggtcttttcagttggtggatttggggttcctaagggtcatctcgccgaatctgcttcaagtttcagtcttcgggcacctacaacctgcgctaacgccatgcgagtgttaagaggctgtcaacttcctaaacctattcttcttgagggtagtcctggtgtaggaaaaacgagtttgatcactgctctagcctccgctgcgcagtcccacctttgcaggatcaacttgtccgaccagacagatttggcagatctgtttggatccgatcttcctgttgagggaggtaaacccggagagtttgcctggaaggatgcggctttcctttcggcattgcagtctggacactgggtccttctagacgagatgaacttggcgtcgcaagctgttcttgagggactaaacgctgtgctcgatcaccgaggtaccgtttacatccctgaactcggccgatccttcacccggcaccccgatttccgaatctttgctgctcaaaatcctgtcggtcaaggaggaggtcgaaagggtcttccgaagtccttcctcaataggtttactcgagtctacgtccacgaattgacatccgaagacctgttgctcatcggccagcatatgtaccctgacttctctcctgaacttcttgccaagatgattgagttcaacagccggcttcatcttgagaccatggtgcatcgttcgttcggtcgagatggaagcccttgggaattcaatcttcgtgacgttctccgatggctgtcgctccttcattcaccttcggcgttagacaagcgccctggtcaccctatagaacatctgcagactatatatcttcaccgtttccgacaggagcaagataggatctgcgtgttgaatctgttcgaggaaatcttcgcggaaaccctttcgctcgaaaaccatcctttaccctcgaccactccttcgtctgttcagtttggtcacgctctactctcgaggttatccagtacagcagatgcctccaaggacgaaaggctgtcggttcttcaaactcagcttgccccgttagaggccatcagtcgttgtcttgatcttggttggctcatcatcgtttccggaccagctgccagtggcaaatctggtttgatccggttactcgcgcaaatgtctggtcagcgtcttcgggacttcccgatgaactccggagtagacacaatggaacttctgggtagctttgaacaagctgatgcctctcgccgcatggatcgaattcgacatcgattagctaacttgtcaagaaaagcgttagttctcgcagtcttcaatgactctgagtggtcttcgctatctgcggcattggatcacctggatgaagcttctctcactatcgaaggttttgttgtagaggccttggccgtcttgaaaaccctggaagccatgctcggcgatccccattccattctagacgtggtttgggttcgatctgctttgcaggagctttctgcgtctagcagcacttcaggtcgattcgagtgggtcgacggagagcttgtacaagctctttcagcgggagactggctagtgattgacaatgccaatctttgcaacgcatccgtactggatcgaattaactctctctgtgagaccaatggaacgttggttttgagcgagcgtggtacggtcggtggggagcctcagatcttgacgcctcatcccagtttcagattgtttatgaccctcgatcctcggcatggagagctctcgcgagctatgcgtaaccgaggtgtcgagatctgtttggatgccatcacttccccgtatgatctcgcccaaatcactcggcaatctcgacaatccttgacggagccttcggaccttacttcgcttctggctcatcgtgccttagctactttcgacacactgccagccactgtgcctcgacaatcctggtctgcttttgcttctcaagattcatctctggctggaattctacctcaccttcctactccagtactagaatctgaacaggttgcttctttatctctcatcccccaacaagttgctgatcttctgcacttgctatcttcaactgctccatctacttcgaacattgtccgacatgttcttgccttgtatgataaggctctgggactgccattatcaagccacctttccacggctctccagaatgtctttgatcctcagattatcgatttgataactcaagcctcgaaagagaaagtattccttccagaatcattcgtgaggtaccaggtgagtactttaaattcaactcttcttcaactatttgaacttcgtctctctctttttccttcgcttccactcttgtgtaggcgcgttgtgattgtgtagctactaaacaagtgctatacatgactgtttcagcctatcgaccccctttccaactcccatatctctgaagcgagtccccggtcactgttcatcagccaaatgattgaacttgttacgcgcacctcgatctcttcggccagcttcacgtcttcattatctatggccgctaagaagtttgtaaacgatctatcggtcgtggagaagtctttcctcgtcgctcagggccgaaagttacctgttccggtggatcaggtcaccactgcgatctatcctttgattagcgctttctacgctacgattgagcggtcactggctcctattctaactttgcagtcgccggctgatgaagaggtttgttgagtttcccttctctatctgccagtactgtacattgaacatgccctcgattcgtttccttctttcttttcagacaactgctgcgttctctcgatcgttctcacaatttgccgatctagtcgttcaactcatgctatccaccagcgctccagtgcttgattactctgcggtccaggtgcttgtcggttggctactcgagagtgccatccgaattccttcgggtctactcgatcctctagaagcccctcttcagaacttgaaagattcaattaccttcgataccgggcatggtcaacaggaaatctggctagcttacctccgaagaacctcacacaaatccttccgagacttagttcatcgtcttcaagctcttttcgatggtgtcccgacgactcatgacaacttttcgagtaagttcggtcgttgttccgttgacagcttagtccgaactgatcatttcccgtgtcactatctttgtagagcttcgatcgaccgctttgaagctatcagctacatatggacttgatcttatgaataacgatcaagacgactccagcgcactccacgctttggagcaggacatcgaaaaggtgtgaattcagtcttttcgacagacttacatcttagaataatgttcaatttttttgaccttcctctttcttcccttcttttgacaggcgttgatcgaactgcaggacccggaaagctccccaactttgatttcaagatcacgttccggaattttggctaccctcagtcttgatatcctttctagcctactagtctctcagaaaggccaaaacatctcagtatgttatagttacttcttcctctctggattgttcctcactattgggatgactaattcaattctttctatacttgtttaggcggttcttccgtcccttcaagacctcgtccatatggccgagtctgtatcctcgttcccattacaggagacggttccccttcaacacgccctctggaatattcaagctctaggtatgcattcatttctttctattccatgcttccgatcaaagatggctgacgttgaacatcactttcaataggccatatggataacttcactagcaaggatcttcttgagtcttggctaaagactctttggctggaagctgacatcccagaaggcgtaagtttaacatgagtcctacaaaatattttcagatttattgagctttttttccctacgtttaggctcttgctggtcctgcggatctataccgacctactatactttcagctctgttacatgacaagttcgtatattaatccatcagtcatatgtatcaatctgtagtgactaaattcatcttgattttttactctttagggatcaggatactttgaaattgaaagatcttccctcccttgaggtttcttccaaacagctcgcgacggtcttacgtatccgttccaagacccatactcaaagtcatcatgcttcgtccattgatctacttgtccgatctatcttcgatgtaagtattgttgtgaagtgtttctcctatgatagctgccgtatacactactaatcatacacttcattctacctgcaggtctgcgaggcttttgctacttcctacccggagaagctctgggagactttgcagaaagcatccatgccgagcacggccgatgagattgagaatttcgttgcatccctcttatcgacaagccactctcaacttcgagttgctcttcagcagcatgttgttcctaatgttgaatcacttttcagacgcactcaagataattcttccgacatgcaacttcttggtcaagcttgggttggcctctcgattgccactcttcagctctacgtccccgctattcctattgatcccgcagctgctcatggatccgagcttcgacttcttcagtatcaagaaacacagtacgaggcagaactcgtttctcatcgacgtgctgagcttgaagttaccggaaactcttctaacttcaagatcgcttccaagagcgagcttctttggagagtccaacaggctatcgttggactaggggccctccgagtagaccgagaaactaacgtggctttgctgaatacaatgttccacgagattcatcaatttttagcccaagtgattgatggatcgagagtggatgctctgattgccaacattgccagttcgagtgcaggcaaggcagctctggaagaagattctctccaaagcaacattcgtgggttcttacggcgaatggatcagatgtatcatctcttctccgatattactcgaccaattggcgttgccttgatgcagcttcgaaccgggttccgcattctcgcccgagacgcagagatgcaatcggctcttcaagcgactcagcttgagtcgactctcgtgactactcttactgctttccccacgtctctcggaatcaagaatcttcgtcgatctgaacttcctattcgcttcaagtctaaattccctgttgttcctacttcaaaacttttactcttggaggtagcctccgttgcgtatgatctttctttgggcatctcgcttgataaccaggttgtaggggctttatttgggctcttcgaccaactctctcatctttggatgatggatcgtgagcgagaattacaggcccaacaagaggctgagagtctttaccgtcagcgcaaggttgatgaggagattctttcagacattgagctggaggagaaggagttcaaagagcttttcccacaatacggagatatcctggatgacgatgaggccatccagcccacttctgccacttcacaaaacaagtctgctttcattcagactgaacaactgaaacaaattggtcgattgcacagtaagtcgcttcttcgaatatatctcatctaccacgcaaggaagtaagcagcaatctgacatgtaaatacaaattactgtattctctagttgccatcttttccaccgctccgaatcaagactgcaatcacatctaccagtctcaaagagacgatgttattaaagacgttttcgacaaagccctcaattcactcgacgattctattgatgatgccctcgcctatcaaatccggtcgttgtgccaagaatcttctaagcgaacctcggttcctaccttccaggagcgaccttacgacttttattcggacgccaacccttacgagatgaacaaggccgtccagctcctcaaccggcttcttgtccgtctggaagatacattgagggagtggcctgatcagatggttctgcatcacctcattgatcgatgcaacgctatcttatctctttccctcggaagtccaattgttcgggtgatagctgccatggagcaacttctccttcataccgccgattgggaatcttttgcaaaccgagaaaactctctcaaacagttccaaaatgagattggaggactcatagtcagctggcgacagcttgagctatcttgttggtctcagcttctcgagactcaggctgtgtcatatgctgaagaagcttcaacctggtggtttaagctctacgaagttcttatccagggaggtaaagccgcttatctcgaagacattcagaatgaaacgtctgttgccgtcgaaaaccatatccgtggaatagtgactctgcttgatcagtacatagcctctagctctcttggccagtactccgccagacttcacctcctgcgctgctttacccggtttatgtcgcttctttcccaatcaactggtaacttccccggactgaaaagaatttcccgaactttggagagcatcactgaacgatttagtcttgccgaaatcaatatctcgtcgtctcttcgaacacagcgggctaagattgagggaagcgtccgagatttcatcaagcttgccagctggaaggacatcaacgttcacgctctcaaagccagtgctcagcatactcatagacaacttcatagaagcattcggaagtttagagaggttcttcgtcaaccctgcgctcctcttttgggagctccagacatgcttccttcttcacaaggaccttctaccatcgcggctgtttcaacttgggcctctgtcgagattggccaagcttcagagctcgcacttccttctcatttgaaaagcaatgcgtcgcatcttgtcaatctatcctctacgttttccaagttccgaggaatctttggaaccactattcgaccagcgttatcttcgaccaagtcggcaaccattgatgaacttacttccgagattctttctactgccaaatctttggccgatgagacccctggagttgccaacgaggagaattctagattaatcaaaaatcttctcactcgaaaacgacgagcttatggagatttgctcaaagaactaagacgaatcggtctttcctctaatctgaggtctgatgtcatgtctcgacaaacgtctatctccactctgcattcgttgccaacactctccaaatctcttgtcgtctcggaggctttgactcaaatgacctgtcgagttgacaattaccatttccgactggtcgtttccatggtttctcttcgagactctttgcgaacccacagtcctgacattactactcgagatcttcagagaggtatcggttttgtggagagtgtgctttctgtagctttggatcaccgtattcggtaagtcatgatcatagaacaccattccctatacattgctaatttgttttattatatattttgtagacttgcttcggctttggaagaagtcaacgagttgaagagctgcgtcggtcgactatctgatatcggtgcttctgactcgtctgaagctatcgcttgtttcgataaagtctctattcccacgctttcttctgactacgacaccatatgtcgaaccatagacgctctacaagagaccttggagagccgaaacgattatggaacaactgtcgctccgacctccaggggaacttcgactgaggttgcatcgagaactcttctgagcgcctgcttgcaacaggccactcgcatcaaagaagttcttggagatgtcttgacgaccgttaaggccactcctttcgcaattttcctcaaaagtacgtgctatcttctctatcaagtgacaatcatggccgttgatcacactctactttgatctgctcagaggatttacacgttattgaatcttgccgagaattcaaacaaaatactgtggacgtgcttaatcagctatccttcgatgaacctcacttccgacaactatacattggaacgctgagcctggtggacatgctctccctccctactccctcatcatttgcaactgctcctcaggctgatgctatcctgcttgagaaaggagacaaacttcttaactccctcttggttgttgctcaagaacttcaaactgtccgcaatgtgatcactgaagaggatgcagatgccgatcggttccttactgaagagtcgtctcttcaaacaaaggcttctcgaactttgcgtctgccagagattcttcaacaactcagagatcttttcacccaaccggccgatctctccacttcctacctcctcgttcagcgtatccgacctttcctcgtcgagtatgctactgcagcagaatgtcatttgaacgctctagcttcatggaccggggctaacttcaagcttactcatgtgctggttcaaatcatctccaacttagctttgaaaggattctgctcccctcctgaagctgaagatgctggtgctggcgagggggattctggtcagactatggagggatctgggatgggtgaaggaacgggtaatgagaatgtcagcgagcagatcgaagatgaaagtcaagttgagggtcttcagggtgaggataacgagccccagccaaaagacaaggagcgcaacgatggtggcgctatcgagatgagcgaggatttcggaggtgagatggaagatgtttcagcagatggttcagacgaagaagacgatgatggttcggacgaggaggaacaaaccccggatgagcaaattggtgatgttgaccctctagacgagaatgcagttgatgagaaactttggggtgatgaaaagggcgaggatgactctaaacaggatgaacacttggatcaagatcggtctactgagcagacacaagtacgttgtctgcacattaccaccgaactttggcaattcgctgacattttaacttctcgccttacagaattccgatttggtcgctaaggatgacgaaaaacctcgtcaagagcctggacaggagaaacctgaaggcgatgctcaagattctgaggatcagtccgaaggagaagaagcccctgaacctgaaatggatggggaagacgaagatggtgcagctgaggacagtcgagacaagggagagaagatgcctgacaatgttcccgaagccgaaacacttgatcttcctgactcactcgatctcggggatgaggaagggggagatgatgaggagactcagcctgagggtatcgatgacgatcccatggacgatatgccggaggatcaaccacctatgccagacgatccttcttctgcccaaaaatcttccactgaagacgaccctgcgcagcctgaaaacgtggacgagggagaagaaactacccttcctgagcctggggctgacgataccgaaatccctgacgaggacgaagatgcgcctcctgaatctgccgaccaggctcaggccgaagctggagaagaagacgcgccggagggcgcggaggaggatcaacaggttgctaagcctaaagttgaagacggcgctgataactcgaatagcgctcaagctcctgatgaacctggagatgaggctggtcaagatgacgctccccaagatcaagaggatggtaccaagaacgatgttggaaagcaagcccagtctacggccgctgatcagatggatgaatccggagacaccgagaacgcgtaagtcaatcagcgttcaaatctcagagttctttaacgttaagcttacatcatacgtatgtatattctacagcgacagctccactcaacctcctccgactgctggcgagtctcaaggcgggcaaggagaggctgttccgcttgacgagagtcaagccaacgaacaagagatgcctcaacgtggcgaagaacctaacccgatgaagaatcttggggacactatgaaggagatccgacgtcgacttgatgaaatcagtgaagcaaaggagaatgagaacgacactaataccgagaataagcctgaagccgaggaggcctctatggaaactggtgagattgaatatgctaaagaagatgatgatgaagacatgcaggccctcggacccgctccagaagatcagacccagaatctgtcagatctgcggatcgccgacgaccaacaagaaagcaccgagatttctcatcaaatggatattgatgaggaggacctgcccaaacccgagcagcctctcgttatcgagcagcctcctgagcttgatcaatcggctgacaaggccctcacggagtccgaagtgcgacaacgtgggcaccaagaccagccgcccttggatattgagcctcgatctcaactggaagaagaggaggatgttgcaccgttgaccgaagaggaagccaaaatgctcgatcagcaagttgagctgatcaacactcagtggctcaactcggaccgatcatctacttccgcggaggagatgtggagattatatacctccctcacacacgatctttcgcactccctttgtgagcagcttcggctgattctggaacccaccctggcaactcgacttaagggtgactatcgatcaggaaagcgactcaacatgaagaagattatcccttatgttgcttccgagttcactaaagacaagatctggctgcgacgaactcgaccaagctcgagagaatatcaagttctgctcgccctcgacgattctcggtcgatggccgaatctcactctgttcatcttgcatacgaaaccctagcactcgtatctcaagcaatgaccaaactcgaggttggtgacatcggaattgcaaagttcggagaggcctttgaacttctacacgggttcgaagagaccaacctatcggacgataagggtgctcaagtgatgtccagattcaagtttgatcagaaagcgacgaatgtactttcccttgtcgagcgtagtcttcaagttctcgctgatgcgagagatcgacgatctaccacgtcttcgacagccgccgacatctggcagctcgagctcatcatctcggatggaatctgtcaggaccatgagaaactccgaactttattgaggaaagcagctgaacagcgagtgatgattgtgttcattattgttgactcgttgcaccgatcgacggcaaacccttttgcgcctgcaggttctgtccctgaacctgcatctcagcagcgaaactcgattctctctatgaagactgccacatacgagactggaccaagcggtcatatggagctcaagatggagagatatttggataccttccccttcgaattctacgtcgtccttagagacgtcgaagcgctcccagaagttctcagcggcacgttgcggcagtggatggagaggtacgtgtctctaagttctatcagagagatgaagcgatcgaatgactaacgcgaacttgaaaattcatgatcaacagagtcagcgaggagtagaaggtgatcctactgtagtaggcagagttttcttcctctttcgaggtttgtcacgttccgtctatttctctaacattcaaacatgaactaatctacttctcccaatatttatagaatgttattttgctccttttttcttccaagcgtttcaaattgatacttttgtcacttcatttatcttctcttatttcccctctcaaactggtattcagttgtagaaccatctgtacttcaatataaaccttcaaacaagattagaaatctcataaggccctcccggacaccatatctggttttctttttcccgtcgtcccattgcttcattaagaatatacaactttcaagcttgacagcgcattgacgtatgttcatgtagatttttcatcagtttcttcaggaaggaaaaagacactaggatcaatagacaattcatgaaccacctaaccaagcggtatcgatttcgatcccagcatagctcttgaactttctaccagcgcgatctccactacgaaaacagaactgagaaccatagatgtcaaactcaagttgaattggtggcattggtgatgttgatgttgatgttgatgctgatgctgatgctggtgacaaagatggcgacggtggtatcggtagaggagacgctgagacagcggaaggagcagattgaagggtgtcgatcacgatagttgctggaggaagggatattcggaacgtgaaaattccgtttcgtttaggaacaactttcacacaacaggggcgtaaagattagattctgaaatctaatggggtcaagaaagaaggaaggaagagaaaaaagaaaggatcaatagcttacctttcaacttgtcttttggggttataattttgaaagtgttttctgtttcgtggattacaatcccttctacgcctaccagatctttgtttgaagataccttgactacaaacggccaaagacaaagggtagaagagcgataatagatcgtaagcctgatatcttatgagaaaaagcactattaatttaaacagcttgacatacctgtaagaaaacatcccgtaaattccgctttagcaatcttgttctgcaatgcctctgcatttccggcccacttccctcccaacccggttttaacatttggcttcgtgcctcccattcctagcagctgaaccatgtactcttcccagacggtccggagccctgtaaacagttcaaatcgacattcccgtggttttggcacccaaacgctcttccttttggcttcttttctgctcaacaaaccaatggtgccagcccggataccgtcctgctttctacgggcctgtcctgcttgtttcttagtagctgcagctgagagacgctgaggattgacaagaggaatcgactttgcatgaagcttggtcgcatatgttgcggccgatgactgtatagaaggaaggaggagactaggcagtgagtcaaatgtaacgggttgagggatcggatcggatggtgctgatgaagtaaagagcaatctgttcgactggatgtgtatagagaccaaccgaaagcaaaggatcagtgcatgccaagttcagacccggaatcgaagatcctaccttagtgtgagccggaagctctctaaacacatcgatctcttttgggggcattctggatagctgaaggaataatagagcagaagaacgaaggtaagaggatggtaaatgagttgaatagtaaagaatcaggcaagtcgaaaatccagacacgcattgggttaaaataaattaacccgcaatacaagcaaaacttttatgtcgcgcttgaaccagatttatagcccatcgcaggttaatatttcgacccgcctttctttccatcgtcttgttcctgacacgtcttggcccatctataacgacggacgaacgaacacgttcaacttcgacttcaccttccctctccctctcttcactctcatacctttcttgcctatcgttgtcatatacataatcttgtttgtcgctgtcggcataatacatcgagatgtcggccccatctagagagagtcattctcgtaggcatggtagcacgtcttctatggcaagttcatccggtggaagaagaccttcagtacgtctctctattcttctttttcatgaagatgatgagcaaactacctactttgtatgattgatctgactccggtctctttgttttactctataattgtcattctatgaatcatgttcgtttaggagaaaactcgtatgttttcttgtaccgagatgggactcgcttgcccttctcaagctcagtttattcgccaacctcgtcctgatcgcttttctttctatctggtttctgttgtatgatttttcgattctaccactttggtgatctgcaactcagacatggagtcaggtaagttgaatttcgcttcgaaagatcagtgctgtaatcggttctccactgatataggatgtaccgatatagctgttacaaagctgctggtttccactagacagcttctctcagccctaacagattggtcactgggtaaaatcactgaggtcgatgtgggttctacttccacactcctataaactggcgtcatatgattctaagatgttgtcgcgtgtaggtttcggatttttatgttcgtctaggaaatgatttcaacacggccgtttccgccttctctgatctagaaatcaatatgaggtacgggtgacagccttttcataatcccgtttcacttcgttctgttgagctcacgcactgctccttgactttagtgatctactggaagtgccaaaccggttacgaaactgcctcgaacgatgcatcaaccaagacccctctcctcaaaatcttgagcattacctgccagaaattcgacagactattgtctccttactccagggtctcaaagcaaaacaggcgttgtacaaatctcgaaaagatgatgaaaagcgagctagaatagtagcagcagagcgagaacgaacagagtaccttcgacagcaagaacaggaagccaggcaacccatctcacgtgtcgaccctgccgttagagaaacaggacaagatcctgatgaacgagcgctttttaccgaagacaatcgatgggtaccaccaatctcccagaccaatcaacgttatcaggctgcactaccccgtcctcagctttctgggtcttctcgttcccttccgttaccagaggcatcacaacggcctccatctatctccagtagacctacacaaaacccttctttacccagatcgtcatttgatatagcaccgagccaatttcattcccaacaccaacagcatcacgtccctagctcttccacactcaactacgtccctcatgagtcaacatcgagtactagtcgccccatttctcctacatcagcatctgaatctgtttccatccattcgcagagttccagacggccccatatctcatctagacatagagacggacctctcccggcacctcctccagatgcatttaagccaaccagatcaagatcaggtgcttctccttcagacgaaagaaatttcagtgggccgacagaagaaatgataggtcctcctttgagagtttcgaccacgtccctcccacccactcacgcaggtgcaggggaaccaccgagtcgaaataaccgtagttcccatcgaacgtccaactctgctgtcaattcatcaacgatggacccatcacgatcaagatatcagcagccgcctctcgtttcagagaccgatatctctaatacagacacgacatcttccttttccagaccagccttgcgacattcactttctgacccacccgtttcgcctaactttgccacctctttcacagaatctgttcttgtcgaacttccagtgcctccaacgatcaccgcccaatctgactctaccctggatctgccatcctcattttctaacgattcgaccgacaaattgtcaccccttcctatactcgctccggtggttattgagcctcttgcaggtccatctccttccagtcctcctaatgcggtttccatagctgatcaaacattgtccaatttgcgaggatcgggtaatgggatctctcgacgggcaagtcaacgatactcaagttaccagatcaacaaaatcatggatgctggaggattgggagcaatctccaatggagacaatattggtggaaatgagggaacatcgggaggggggcccggtcgatcaaaatcttcccgaagactttcaggaattccagatgagagttccttggagggcaagtcgtccaagcttagtcctgcccgttcgccccgtagcgtacgaataggacctccgcctgttcctgctcttccagaaggaattggagctacccctcgtcgaccactgaacacagaacgattgttcgttccccctgctgaagatactggggtcgaagtccgaatagaggctgacccagatagtgattcacccgtggcaacaataaacggaggatctgttgtcaggtccccatccgcgttcttgtcggctcaaagatcaaaaccaccttccctgatgtcattgtctgaggaagatcagtcgaaagaacaggagtcactgcatgtagcttcatcagatcgacccattggtgaagtggtcaaacctgcgggtgggcgagctcgagagttagcaaccgaagccgtaaatcaggtggaggaagagactgaacaagactcggcagcttctgactctacacggtcgatcacggttttcttagtgtataatagggaatgtaagaaatgcgtggttgaggcaactcctacaatcccggcacttaggttgctctttatggaaaagttttcgtacactgccgagacggaggagtttccagcaatctatattcaggacccaaagaccgaatggaggtacgagtgggaggaaggagacaaactgggtgatggggcaatgctgagtttaaacatcgagcgtaagttctcatctctcttctttcaattggttgatcgagggcctgtatactgatgagcaagactcgaaacgaaactgaattttcaaactatcagcgttggaccaagtgaagcaacatattgacagccagatcagcggtctatctcgaaagttagaggacttgattagagaatctgtcggaccgctctcctcccaatttgccacacttcaagctagcaacctacaatctcaccggttatcggccggactttcattagctaccgccacgcaagcccggtcctcgtcatcgacaaggtcgccctcacagaacataaaatcaggacacgaaggctcgttacctaaggtcattcgaacagcaattctctcagactctgcctctccttccgcgacgatcaaggatcagtccggttcggtcatcaatgccgtcaatatgacctcgtcacaagccagcacatctccaacaattgatctgatatcaaccttggttcaaccgtctatcgctactagccttaccgccttgacagttcctgcagacatccaccaaacactacgagctcagctagacgagattcaagcgttacgtcgagatctcggtgtagccaggcaggtgcatacagatggtatggccgtcatgaaggaaattttcactcgtgttcggaaggagaatcaacggctccgagaagttgcagcatcttcattgaacaccggccgggctttcgtcaacgcaagtaaatccaagattgacatccagtctcaggagacgcttcgtcgaatggaagaccttcaggacgtagttgaagaactttatcaagacgtaacagaacggatggtcgttcctaagccaatggtcatgcgttcattgaaaaaggaccttgagcaggctgaaggtcagctgaaagaactcctttcaacgaccaaggcggcaacgaccacatggcgagcgacatgggccgacgaaatggaaaatgtgatgacggaggaaaaacatctcaaatatcatctcgcgcttacaaacgacattgaggcagactacaacgagtgtaaacgagtgtttgatcagatcacgctttacgccgcccagcgaggggtcggtggttctcatggggggtcaattggtcgctctggcggaagcaactcatacagacagctagggcttccgacggaggatcctcagtcatcgttatcgacagttatgtttcaaattcaaggagctacggtcgatcccgaaaaacggcttcgggcaatcgagaacgcagcccggatgagacaaagggagatggacgggcagaaggaagggaatgagctgacgagtcaactgagtgagttcgttgacggaagaaaacttcgaaaaacaggtggggttgaagagacggaacggttaagacagaaaaagaatgagttggcgctcaagggagtgatagggggaggagtaggtgtcttgaaatcggttccctcattgacaactgtcaaatcggcagagacgacaccggcatcatcgtcatcacctatacctacggtgacagtggagccgagcgaaagcataggctctttatcataagtttcagatttgaccaccaaagaacaaacaccgatagacactagaatccttgacgaaagtcgtactgaggcaggatcaggagattcagcaaaggcaaccgagattaagacattcccgtcttcaaatactgtagatacatcctagtttcctagatctgttctgtccataattctgtctgcttcttgtcttcccggtttgattatctattgtcaatgcggcgagccccaccctcgatacgctgctaccttcttcgccttctcctcgtggtgatttagttgtaaacaaaaaaaaatgtatcaccccttatacatatcttgctaattagtttaataatgcaagatctttatgatgttctgacatgacatacggtgactaacccggacgctaacaaagtcaagagacacaatccatcaacagaccaaaccaaaccaatccttccttcaaccatgtcccagtatgtgcacacctttgtttccttcttgccatcctcgctgctgtaactactcttgctgattgatgccgataaactatcagaagcatcgaaatccctttccaagctccgttcctgcgctggtctccatacgcggacggaccagccacaggcggatggtcacctaacggtctagggtatggcactacacagccgaattcaaccggagcctttcgatggacacagggtgtcggaagcactctagaattacaatttaacggtcagctacatgtgtctttaattccttatgtgactttagtgtgtatttactgtgaaagctgagaggatggcttgggctctttggaatgtatattgtcgatcacaggtacggcggcctatgtatgtgtctcttcctataagaagccaataaactgtatgatgttaaaccgtatcggtcaagagctcaccaaatcttttcttgggatgcctcgcagatttatggctcagtctatggctcgccttcttacactgttacattagacgattcaacgacgtctcctgcggtcgacaacaccgaacttggctcatttactggtttatcagcatcctctgaacatcaattgatcttgaatgtcactgaggccggaacagatgactggttggctctcaacaaggttgttagtgagtccttttctcaaccgatcttcgttgtctgcttgcatatgggacaattgtttctgactggggctattgaacgaatgagaaatgcagtctcagtaccaagaaatggtcaagcaaactatacattcgacgacgcagatacggatcacttctcttactcgtgagtcaaatattatgacaaacccgtccagaaaggggtatatgaagacattgctcatgctgattgtggcgggtatcggcacgtctgtttggagctgctttgtacagaggagtttgggggtaagcagacgtttcttcatgaactcagatgaatcaagacaccgtttattaacgtaacgttcctatcgctgaagagctggggctgcagcctctcaggtaagttttctgaattgataccttttactgaaaacatatatgaaactgagcctgctattgtcttcaatctccatcctatagggaacatacaaacaaactacaacatacacccaggctaagaatgcatacgcgacggttaattttacagggtctagtatctatatgttcgggtacgtcttacgttgttcagtaatctgagaggaagatcaagatataattataagctactgttgacgttgtacctcttgctcttattcgtgatagctctattcagccggatcacggactgtattctgtttcggtagatggacagccggcgacgactttcaacgggagttctcgcgctggtcttacgcaacaacttctcttctttgggtcaggatacgacgcgtccaagacacatatcatcaccgtaacggatgctgatggcagtaagcttgatatggactatattgtcacatgggcagctccagagtaagccgcgtccagttcttctgagatcaaccaatagtcctatacatttctttggtggagttgtcgtttatggaaaaaacacaaagaatactgattgctcgatatcgttcattttggattcaaagtactacacgacaaagacagatagccgggatcagtgtaggagccattgtagcggcgatcatcgtgatcggtgagttcacttgagcataggctcgtttcttctgaagtcaggcgacgctgatgattgattatctatcaggtgttgtcttatggatctggaggacggagagaaagtatgtttgatatacagttgtttttgatagtgtcaacatgtgattgactattttgcatgttacttctctcgggttttatagcggtcgaagaaaactcaatacctatgtaggccgacacttgccatatctttacatgtcttgaaacacaattatggactcactcagattacccttctttgctttgacagattcgggagtatgtggagaaatctcagcaggttcggttgcattaaatctgctacccgatgtccttcaaccctgtacatgtgtcttttgcctgttttattatatgtttggtttgatgtgtcacttcgtttgtgttgatgagggtgtactgtatatcgacaatgcttgaatgaacccacgtttgaaatcttacgttcactgttaaggttaaagaaagttctgcatagatcaaatatgtgtctcggatggaagacaaatgaagttcgacgaagattaccaagctaggtcttgaaaccttgtattgcttttggtcggtgccaccggtctgtaagcggacatttgaacgaaacttacaataagaataggtagagaaagaaagaaaggatgaagaacgacatcaaatggaagattctaagatggtagacaagggggtatgagttggcgagggaagactataagacgagttgacgttttttctaccagatcttcatcgcgctacacggatgaatgtacgaaagaaccaacgctgctctgactgattctctttcagtgagaaaccctagctctagcttatcaaatggttcatgctgatagcagaatcatgactatcgtgcacatgatggataacgcaagatgaagcgtgcatctgcgagactgaattcaatcaagtgaataagttgtgtaatattcctgcttaaccgagttcctacgaattcagttagtcactcgcttaaggttgtcatccctcaacatccattctcacatccatcctccaaggctgtataatcttcaaacggaccatgccagcctccaaacgaggtatagacaaggcgaatctgtcctcagacgagattctcgctaatcagcgagagagaaatcggaaaaaacaagccgctttacgagcgagacgagctcagaagttactcgaccttgaacaggagatcgcccgattgggtgggaaccaccacccttctgcaaccaacgggaccggtgcacactttggatcttctctagtgggaagccagttgatggatggatcttctcagggctcagtacatcttgatgggcagagagaaatcaggaagttgagcgttgtcataggcagattggttggaaagctcaaggagtttggcgtggatgatgaggagatccgatctatgacggaggacggattggaggaagagcttggggaacaaggtatcgtagagaatctgatgcaggctgaggacatcgaacgggatgggaccgaaaaatcagaaagagaagctcaggaaggtacagaacatgaattgatttcctcaattgtttcacatcactcaaggtcccttggttgatccatccattatacccgggaggggaaactttcttgaaatactcccttcgtatttatacagctcaatacgcagactacatccgtttatcaggaggtgacaagacatcatcattatcctctggacagacagtaccctatccgactaactggccatccccacctcgagtcgacccaaatggccattcagatcctcccgcttctaccacctcctctggtgaccctctaggaccctaccctgtatcccagccttcttctggcacctctgtagccggaggtacgaatatgatcggaattgacggactcctcacagattcttcgtcgaacggaatccaggctagaaagccatcgtcagacaatctaataggaaatccatcgcccaatactccgcctggctctgcttttccttttgctttcgtacgttcaacgggatcccttatttcttggcattctacttgtctcttttggtcttagatggctgtggattcatggttgatccttttctttccttttctttccttactaatcatgcgcaatcgcgtcttttgtttgtaccggatgtgaaatcctccatccagctcttctccggtccaggtccagcgggatcgatactccctcaacacgagcttcaacaacaacaatcattcatacgctcattgagtaccgatggtggtctatcgtccgaaatgatatctcgagaacctggtcaagacatgcctgtagaaggtgaaggcgagtcgacaggggaaggcataggtgcaggagtggaacaagctgagggtgaggaagttagggatgagactcagggtgcaggaggagaagccgacggggtcagtacgaacgaagggtttctagtggagggacaaatgccgtccccagaatcagggcacatgcctcctccggagtcggtggatgttgaaccagttcgtcttactttcgtctgttgatccctgtgttcctgaatatacgcgacttgtcgtgtataatattgatagacctgacccggactttaattgcaatcttttcattcgtttgttaaacgcctgatcgcgttattgtttgacattctcttcttcttcagacatacgatcatcccgaataaaccagggatcaggaagattttttctttctttctttcttatctttttcttctttgggtttgtactagagacatgtacaatggcgacttttaacagaacaattaatatggcttgctcgtggttcttgtacaaacacgacgcttatcgatgaagagtggagtacaacacatgtattatgaagcctttcacaagtgacaaagctgggaaaaccagagtacaaaagaataaaattgcaggacagaaagatattacaacgagagatgctagcatgaaacaaagaaaaatgagcccaagaagtacaagaacgtctacaacgggtatcggaaaccggcttggatctgagcagccgttgggccgtgggttccagtgtcctctccgttttcgagcctgacgttttgtttagagagatagattcgagtggcaacagcgaacaagatggcgaccacagcggcggccaagttgacacagaaagcgctgaggtatcgtggaccggatgtgtagaggtaagaggtgaacacattaggagtattggaaacagtattgatcaaggcgaggacgagagctcgcttgatgcttggtccgttggtggaaccagagatccaagaaagagtaacgatactggaactgtagaatgaagcgggcatcatcatcatggccacatatcgggcagcggtgttgagggttgagacagcgatgatgttcgccaacatggtcaacatcagcgggcacacgatgtgaaggaatcgctcttgggtcttatcagagtgccatccgttgatcatgatgcagaccacacaaagcaggtagggaggagcggtcagacagtaggtgatgtttcgagagtatttgagggttgcgaccacactggggaagaaattggtgacagcggcggcgacataggtcgagaacaagatacccataagcaaccaggtcttggggtcggacacggtcatcttgaaagcctgaagggtggaaaattcttccgagttgtccttctgtcctcggtcgacctggagagtgtactcgaggaaatccttttcggtgtccgaataccatcgagcagatcgaatggtgtctgtttagtagcagcagaatgatcacaaaaagattcgagccgatcaaagcatgagaggatattgtcaataatttagtacacatattgtagaaggagtgatgaagaggatagccttactaggaaggatgagggcacagcaaagggcacatccgacggtcgccacaccctcaacgatgctgattgatttgaacaaacaccaactgttagtcagtatatttgcatcacacaaagcgaagatcgacaatagtcatagtgaaaatgagcgaaacatacaagagccattgccagccctcgattccgtgcttgccactcagtttgagaatagcaatgcacagcaaaccaccgaaagcgtttccaagttgagagccagagtacaggatggctgttcgcaaagccatctgcttcttggtgtagcagcaactgaggtagaagatagcaccggggaagaaggcagcttcggtgactccaaggaggactcggcaggcaagaagctggtcgtagctcttaactacaccagtgcatccagaaacgactccccaaagagcgcaagcaagacagatgtagttattggacgttgaaggcacaaatgtgtcaaccagagtaagagacagtcgacagattaaccggcaagaacagatagactcactaggcaggcttcttgattcgaccgatgaccatgttactgggaacctggaaagcgatatctatatgtatgttacagaaatttcgtgagctcaagatcgtgtttcttgacgaacgaaaagagaacgagcgtacatcctgcgaagagaacactgatgacggtcgagtattgttgtgccgagagctgtataaagttgtagggataaatcagattcagggttcatcagcgcaaaccgagatgatcggaaagaagcgggacctacatgaagatcggtgctaatcccagcgagtttcgcactagatcgggtaattttcaaacgaaattgatatcgtgagcagtcggcatgaatatgcatacgcgggaaacgaaccggagacctacctggccatgttttgacgatcaaggtagttaaggatgtatagcaagagcatgacctaaggatcgagcggagtagaattgtttgtcaaagtgctttcatcaagatagataccagaaaagacgggaaagggtacgaacaggcatgaccgaaaggtcgagcttcctggtcgccttcttctggagggcaatcaattcttcctcggacaagttctcgatacttgccggcttctggatcttgtgcgggtcgaaggcttcgtccttccagttctcggtgtgaacggcttcggccttcatgtcctcatcgaacgagtcgacgcgagctaagtcgtgtttggtgtccatgatggtagtgagtggtggtggtggtggatgttgggtataactgggcggaaacgagaactagttgttgggtattgatggagattcggtgtagaaggccagattggtgagggagaagaagaaacacagggacaggatgaagattgatctctctcgtccttttatgttgttgccttccatcggtctcaagacacctgcacacaaattaaggatcccgaaggtgaattttctggtgaggacgaccaacaccagacaggtgaagctcggccataccagaaccgcgaaatctaccggtcggcccgagttcagagatgttagtggctgaagtcagcgaaggcaaaagacggctatcggtctctcgacacaaacatactcggtggattgactgcgcagtaggttttaggcacgtgatcgatgcaccccaagctatagtagcccgctcatctatgcgtgccttgtttcccaatccgttggcctgccggctcatgcagggccgtcgggtggtaacattagacacttcttcaagctgtcattgccgtatttaattcgatcaaggctaacggcggctgtacaaggattgaggttggccctttggatgtaagtcccaagtgttccgaggatcgatgtccgcagataggctttgtcccaagacaaagagatcgccaacacatacgctgttttcctgagtgattattctgagggacccaaggaaaagaaaagatcagacaatacacgataaagtgcagtacgttgtatgcctgatttccaacttgaaaaagaagaaaagagagaaaaaaattacttccggccacctcggtgagatctttaggaccgacgagtcgtcgccgaccatatgtaatttatcaacgaaaccgtgtatcagatccatggccgaggcttgactagatgcatattaagtcgatcgactcgtcaacgtgttgcacagactccctagagacccggataagagagcttgataggtcaaccagacaagcaagtcggtaacgaacgttcaacagttttgtttcgggtccagctcatcgactggcgcacacaaagcagaaccgtctcagccggtgtccttatcaagataatcttctgcgcgcatcgattgtttgaccaggtgctatcaatctcaggtgaagactgagtaggcgaagctagccgatgacgacttcgatgacgacgaagaacggatcacccaaaatgaccaggaccacaggtcaggtctacttcgtagagaacgagtagtccaccataccacctttaagccgaggtagagccaaatacctgacatgtatcaatcaaatagtattgtcaaatagtagaagaatctctcttcgtcgttttggaaccatgtatcacaatagcatagtacactatcttgaatccaacgatcgattcagcatcgcggaagagaaacatgctatcaggagaaggtcaaacttggtcacaatattcacccacgacagaaacgagacacaagcttggggtaaagattggctccctgtcaactttccatctcatcagagacgtcgagcagatctcgagtcacaactttgagacaatgagaatttagcgcctttagagcaaggcaaaatcgatcctagacgacaataacaacgcaggagaaagttggggttggggtcaagaggcagcgacaaagtaccgagttagtatcatctctttgcacgatcgagtgtcggaagtaatttctcccaaccctggtctccactattctggccgacattgtgttacgcatggatccaagaataggcgtgcggattggaccatgttctcccactttgtcgaggtggaaaacacgtatagtatgccaatgggagcagctgtatatttcgtttcaagattcccaaccgtccaagaggacgctacataacctcgaatggaacaagatcaagtagacatacccgaaagaagctgttaacaggagtgtgaatagaccattccaaggatttggttgatagcaataggtggcatcaaattatgaagtacgtcagtgcgatgaacaagcgagatctacacgacgcagctgatcatgcagccaaagtgagtagaggactagatgacacctattaagaggttgaatagggtgtttcgtccttgcacacgccccgctcagtccagatgataggtaaccgtactttcaatgtcagcagtctgtcgggaacgatctcattcctgatcaacgatatttctcgccatctccatctggcctctgcagaccctctatttggtttgatttttatactttatatcccggataccgcgatggtttcaacaaaacggccactacgctctctccccccagattacttccttccccttcaagccggtttcttcgaaatacgttcggcgtatttacaaatctttctttacccgctcggcctcccgttgagccttctcatccatcaatcgctgctccctctcctcggtcttccgagcgtactcctgtccggcctgcataccgatggtaccgatgaggcactatcaacgttgagagcagagacgaaaacaaaagaggaaagaataaagttgtaagatgacatgaccgtgcatataggagtgacatgaatgacgcgcgtaggtgaagagaaaagacacagagtgggagtgaacatgcaatgtatatcgcgtcgtcctcggcagcttttgcggacaaagaagaacgcggcacgataaatgaggatatatacgcacgatagccaccaaagcgtttccagcggccaaaactcggacggcatcggctctatctccagcactaggaggaacctcgggaacgacagccggagggaggaatgaccacgttccggctggagcgggaggcgaaggggggacttagatcgcaagggatgcaaaaaagaaagggatgtcgttggtcgataaaagaagagaagatagaaggaagaaatcaagcgcaacgataagtaatcacggattgcaaataagtagattgatagctgtactcacggaaagttcgaagggaaggaatgtggactgtcaagtagaggataagggttgcgacttgtaggactagttggttgaatatgatcgcacgaaagagtgggtagtgtgagcaattggtcgaatcagaaacgctttgaatgttcacatacccaaggcacttccatcgaagaagatggcgctctccgtccaggcgttcaacttgagaattaacgccaacacaggcgagacggcgagaacatgtagaagtgctttgacaccaacaggggcatcccaccaggtctggtaatagacgtaagctttctcgatggaagcctcagtgagctgagaatagagcagatcataatcgacctttgaaaagagtgtgtatttgattggacgagcgataagatgtaagtctgacttttcatcactgggaaagttgagtaggagagaaaaggatggacgagtaactcacaatctggttgacaagaacaactccaaggaggaatgccgagcacgtgtagacgacggaagacagaaaggcgggcatgctgggtcgtgaggatgatggttggtgtccttttttcctcctttcccatgcaaacttttggcaagaatgggtcgaacaagcccaagaggttaaacaggttcatgaggcggctaaatatcacgtggcgttcagaagctgtgctcgcacatgtccgaagcaaccttgccttctctctgccatccgtcatcacaacaaacagtgaatagacatccatcctcgttcaattctctactatggatcgcgcgcaaaccactccattccctacacgacctcgtctcaacctgcctcttccatctgtgctttctcagcggacacctgatgagcttcgtcgactggaaggcgtctggcgagcattacgacagaccgagctatcggcgagacctacgactgtttggaaaggcaaacagaaagaattccgtccgtacgatgggccgaacgagtctgaatctgaggtaaacgcaaggactttgtatgaaggaaaagagaatgaatggaccccagacgtggtcagacaaggtgttcgattaacgaggagacagacttcttggcctgagaggaaggtctctaggtcaacgatcatgaccggttcctcgacttctctcgccggtcatagttccgtccaaggatctagagtggaccgcagtggtcaaaggtacccttctgcagcgtcaatcgtcagttcgtctcgtccatctcggcatgtgtcatatctggatgagtttcagtcgcgtccgccatcatcgctgtacccaatttcaagagtaccctcggtgtatccttcagggcctactgttgccagttctgaaagatacgcgtccgatcccactcgaaaatcatcccactcaagcagtcgatcaggaaaacaccagggctctccttctcttcctccgctgccatcgccagctctttctccttctacctcctcacctcggcagccctcttcatgtacaaaatcccacaatgccgaattaaaatcggatcagaagccaaagcttcaaaaccttccattacgacaaagaaataacgatcgatcaccaaatcgaagtcaattaaaaacacgatccgagtctgccgcacatctctttcaagcgcatcccatgaggactaaccgatacgatcgaccctgtccaaccacctcatcgacgatatcctccgagcttgacgtttcaattcaaccgatatacgaccagcatcctgctctcaatccattgagtacggttcatcttccggggaaagagcaagggctgaaacatggattcgtcagaatcgtccaagcgggtcggagcgaagccgagggagagagtagagtagaactctggctgagaggtgagatgtgggtgttgactggggatggacttcaggtgagttttctttcttgcagcaaatgtgtgtctttttgtgcgcgattttgctaagacattggctgagcggacatttatctagttgagcttttggagcgcatcctctctgattttgcccacctcggttgaagagtcagcccaagaagtccaataccttcctctccctgacgtcacgtgggatgctccgttcgagaagaaattggttcacgcccggccaggcgggtcgaccagtaaacatcgaaagcgactacggttcctcgagaaatggattaccgcggagagagaacgaacggtgtttgtacgtcctatcttccgatatgctggtgtggatgtgttgcgtgagcgtttgcgcgaatcgaatgaagggacaacctgctgaccgaacgatatttcatccgatgcacaactcggcatcaacgatgacgacgataaaacatgaagtctaagcttacactcccccctccagaatatccacctcacacatcactgactatctactcgaacccacctcacccatctctcaagctatacgttcgatttccatcttcttctcgccgttcatcgtaccgcactgaatcccgatcctctgcaggcgcatgcgccggaactaggattgaagaactttcgatccatcttgatttttcttcggaaacactatcgatcgaacgtcggtccaaaggactgtatgttcataaacgggtactcgtctccgaaacggaaacgaccggctcgttggtcggtcctgagattgaagggtgggagttgatgaggtctgtcgttcggcaaaagattggcgaggctgtttggaagggtgttttgaatcgatgagggaaggcaatctttggtcttatctttctcatttctcatcttgacaggaattgaaatttgtgagcatatggagggaggaaacagagatgatttgccaagagtgaaagaagtttttccttagtaaacataatctatagaatccacagaggtttggaaagatatcaagacctaaaagtgggaaggtacgaagaagaacgaaaaaacgaagtaacgaaaaaagcaatgaagaggaagaaataacgaaaaatagtccgtgcttttacaagagaaggagagagagatacgaaagaaacaatacacctttgttaagaaaaagactgcaacaaaaccacatagaccgttgacattaaggcaaggaaagagattgtccgttgaaagggctgaagagggaaaaatttgaagaatcgaatgaagattgagtaaggagaaacactcatcgcgcgataagccacacaatgaaccgaaataatattctttaaaaaaaagtaaggaaaaataacttgagaaaaccgtatcgatgtaaaaaaaactcttgaaagagagaagaggaaagctagaaaaaatagcctttaaaaacatgcaggttgcaaaaaaggagaaggttatggctaactcagatctggcaagtccgtttttggaggttgtgtcttttctggcgaacccttgatccggtgctccatcgagctcgtcagtccacccatcggtgtcttttcctccatgagaccaaactcccactcgccctctcgttccgcaccctttggggatagcccaaggccgctgagtgaccacggccacggccctgtgcccgttcctgatccgaggccctgtccgagggtggctcccgatccggcgctgatggggtacatggaagacattccgcccgagggtgtgaacggagggaatcctgttggtggaccaccccacagaccacccgatatggaatgaccataggccgagatgggggatggacctgggatatgcaagctcgtcgcgtcgttcgtctgtgagcggagagaagcgtgttccgtttgggatcgatccggatcggcgttgttggccgggatgagagggggaggggcaccgagaaatgacgtctgaaggtgaggtaggcttgtcagccgagctttcgacatggactgagtgtcagatagagtaggcgaggtcacctggacggtgagcttgtcgttgacagagtctgccgatggaggggggagaggaacgagaggtgtgtgccgaggggacaaagacgatacgtttggagaagaacgtccggtcgggtcagacattacgctagcgcgggaaatgcttgttcgagcgggcgagtatggaagccaaccatctgagtttctcttcgtcataggggctgaggctacgttggaagattcttgtccttctgctagtttctctgactgtggtctcagatggggagggaataggtgagtcgggacggatggtcggccagtggcaaagacatttggataagactctgcctgcgagtagaacgggggttgtgcttgatatggattgtatgggtagtgatagggagcggagttatacagagagtgagactggatgaagttagacgaaaaggaaaagagaatgtatacgtgtggatatagattggttagattgggtattttctttgtattcacaatggactaaactggcatactgacagacagatgagagcttccctggggattgaacggaatatgatttgggaacatttggttcaagaaagtagattcttggccaacccgagatcctggatggaagactttggacgggatgccctcttctgggacggtcgttgtcggttgaggttgctgagtggcggattccttcatgacccaacccgacgagacggctggtattgggactgatgacgaggctgatggatgggaatctagttgaacgtcagatgaagaccaaccggcagcgtggtcgcattctgattctgctgtggatgtcttggttgagtgtgagtcaggaggtgtattgagagtgccctgggtattcacaaaaacggtggccatgatggaacggagccggttgatctccccttcaagtagccggatcaccgtgcgttgctcgcgatcccgtctgagaagcacgagaaggcagatgagtagagcgagtaagagaatgaataagcagatgagcatagtaatcagagatggttaaccggagaaacaaaagaagaactggattacctctcggcttctctgatcattccttcgtaagcaactctctgagactctgaggcagcgagcagagcagagtttgtggagagttcgaactgaagctgggagaccagccgatcactaaagtctttctgtgccttcaggtcggtcagctcggacacctgagattctaacgtggacaagtggagtgcccgacgctctctaaagaaagagatgaaaggtcggttagagaaaaaaggtgggaggggaggaatcagagggaggacggggagagtaaaaggaggaagttgaagataccggtgagccctctgcttaagcctgtttctcgtcttgaggctgagtttccttttaggaaccccgctgtattctgtcaaatctatcccttccccgtccgatacagcgacgtctgggtcgtcatcttccaatccgccgtcgtcgtcgtcatctttcgaatccgtgctgttctttggacgtttcgagcctttggccttagtgggaggtgcggggtgtttcgaaagatgatgagcaggatgactaggatgggatgctgatggttgttgagagagtgagagtgagagctggaaggcagaaaatggaatgtcctggtcgacgtgttctggcttgacagccggcatggcgaccgacttgatgcctggaggaagtgatgaacgggatgaacctggcgaccagtttgaagaacaggaggaagaggaagaagacattgagccaggttgactccaccgaggatatgactggtcgtttgtcaggaccgaaggaaaattgttggccggaaaacgatctgcagtcgcggaccttgctggttcttctacttcttgctgctgtgtgattgccatccagggggatcgactgcaaaagatgaaagaagaaagccaataggattatagaaaggagacagaaggggagagagaagattagtcaagacgatgacaacgttgagagtttaagaagatattgttcgttctttctttctttttttttccttttgcttcttcctttagcggaccggcggcggatttgaggaaggacggacagagaaggatgcagagggttgaggggagagagacagagagaagcccgagcagagctgtagaatgtggcaggggaagtatagggtgaggatcagacggtcggtagagacacggaaagtatacagtagaaacagagagagagaagtagagatagaacacagcactcacacacacacaaacacacacgcacacgcaccgaaaatgaagaaggtaggaattccaacgggcacactctgaaggcgacacgacccgttaaacagaaccgaatgaaagggtgagaagatgactagagtacggatcgctctcggttcgggcatgaaagatattttggccggcaagagagcgggcggtgacaaacttcgggaggtcggcctcgcttgtagatggaaataaatgccaagagctcgagatgcggcgagaaaaggagagatagcgggttagagcgagaatcagggcaagacagaaatttgatcgctcttgatcaccacagacacaacccacgcggtcgaacggcgctctacgtcatctcggcctgatccatcccgggtcggagatcgactgccgagattccattacctcttgttcctgatttaccttgttcctaatcgggctgccctcgtcttcttcctcctcgtcctcgtctctttttccctcgtctctgtcatcctgaccgaccagactttgctccgccttccgaccgattctcagtccctctcttccacagcctttttaatcgtcttttttactcttgtttaacaatggcttggaaatgttcggccagttccaatgccgatgtaagtaatgagcgataaacagtcgattgcccgccgtctctttgttacacatattcgccctgaccgtacctggcatacacacatggaagctcgtggcgaatctgtggtcacatcgcttggtgcttaccccacaagtcgcaaaggcgatgaccgctgtggacagagcgtgttacatcccatttcggctagatccatatgaagattctcctcagtgagtatccgcgcatcaaccctcaccgatgcctatgttgtgctcttgctcaaacgcgttcgactagacctattgggttctctgctagtatgttcattgtatctcggctatctgatggccgtcaacgagagccagcttctcgctcacctgtctgcctattcacatgcagctatctctgctcctcatatgcaagtcttagccttttttttcgtctttttttttctttttttttctttttctatctttcaacagtttgtcaatagaaaccgttcacttaaatagggattttttcttcttctttccaattatcattattctcatctccgcttgacatttgcacccgtccttggtccatgttgcctcttccttctctctaggcatgtaagtctttctcaagactttcactatctaaacgttcagatctagcttgatctaacgctccgtcctatcgccccgcggacatgaaaggcgtatgcactcgaaaacacattccccttcatcaagccaaactcaaaaatactcgacgttggctctggatctggctacttatgcgccgtctttcatgagattcttctccaggcagcaggtggtgacaaacgacatccactctccaaagtcgtcggcgtagatcatctctcccgttggttttcctctatgattcatttctctctttcctaaagcccctttcttttcgtgttgtttcaaagtcatcttttcttgtttttcttggatcaactttttttttcttcttgttcttactcatgcctcccttctgctcaattgtcatcggtaagaactcgcgttactctcaaaagggaatctccaacgggacggttatgcgtctctcctcgaacaaggatctatacagattgaatgtgctgacggaagacagggtgagtgatgggctcacttgattgtttgtttgtttttcttgccaagtctcttcttttctatcggacgcgcatctcgtgtactgatcagtatgagtctgaaatctcaccgtcttctctcctcaggctggcctgcagaaggtgagcgtcagattcgagagcggaaacagagtcattaagaggaaaatcaaaacaaattctccttctggctgagattactcatttccccggatttgcaaaatctgattgaaccaaaatcaccctgacatgttgctcttccgcgccccttcttttgaaccatgttcgaagctcctttcgatgtgatccatgtcggagcagccgctgcctcaatgccacaagctctggtcgatcaagtaagttagttgaccccaaccctctaatcccaaaccttcaacccttgacctgttcgcttgcctaacgacccttgttttcgtcacgttttatttctgacaaataaccaatcgatcctgacggaaagctcgcttgtcctggtcgcatgttcattcctgtagggacgaccacccaacgtacgtctccctgcggtttttttccttgctgatcgctttctctctgcgcgatcaatgcgaattccgatctttcctgcttgctcctctttctttttctcttttctttttttttcttttcttttttaatatagaaatttatgaggtcacaaaatcagagactggacaagtaacgattaccaaactcagtcagttctcattctctttctttctgtccgttctttgcctgacctcttttgattttctcttctctttccttaacttactttcgccctttttctcctcttcccttaaaccttcttggactttccgccatgttacaatgacaaaaaaattatagtgggcgttcaagtaagttgtctctcgtgtaccgatcaaaacaccgatacaccccgtccggggctatcgcattcgtctttcagtctaaaaaagagggaaatcgtcaattgagatatttataaaccgatccacgaatttgtaaagtacatcccgctttgtgatgccaccgtccaatggaccgaagacgataatctttagggaatcgttctattcgtcgttttccttttcttttctttttttctctctctctcttttcctttggattctctagtccaccatatgcatttttagttctcctctctcggcaagcccactgatcacccagattcaatgtggcctgggttcaatcccgcaagtaacaaaagcataaccagatagagagattttctagatgttttcaatagcaaagaaagaggaaggaaagtaaggaaagtagaaacacggatgaccggagaccttgggaacccttaaagacaaaggaaaagatgatggaaaaagaaaagggaaaaaaaagagaaaacagaagagtgaacacctaggtctggtttcgtctctttcccctttctccttaacataagagagatatgaagaaaatgttcagagatttatataagagatttgggtggaatgagtgaatagagaaggggtgaactgtgaaaaagagtgctccctatacgcgcacacacacacacacacacacgcaaaaaacacaagcacaccaagagagaattctagtgatctttgatcagaccaagcactgaatttcatcagagttcacacacaacgacagacaagaaagagaaatccagggtcagaaacttgtactgctcgatgttcggattcaaatacttcatcttggaaagatcctcaccttaaggtctccgtcaagcatggcgagtcccgctcccaacgcccaaccgagctcgactcctctgagctgctttccaacgatgatatctcgatcggactcaatctcgtatccgagacccaacaacgcatgcatgaacgtcaaatccaagcagtactcgctcctttcctccaactctgccaacgctcccttgtttcctgcaaacttcttttgccagacggcctcggacgagcaagccgtctgggccagctgcttgacgtacccaagatcgaacgctttggtctcggcctcgtcgggggcgaagagcggtcggattcgatcatagaagtaggagagcgcgaggaaagaccccttggggaaggtgtcgagtagagaaggctggtacaccccgttgaaagagcatggcttgacctcacaaatcctattgttgtccgttcgtttgggtcagttgatggtgccaaaagccaaaggagatccgtgtctctcacggacatagaaaaaaacacttacgcgtcctttgccatgaccaactcaacgactcgcttgcaagattcataccctccagagccaccgaccatagtgacgttgactggcgacctgcccggaggatccaacgtaaccttcttgcttcttccggctcccaaacaagggctaacgatcttagtggattccgacatgtcctcccacaacgtatcctccttgccgaacgagtaggtgaaagcgacgaggttgtgcacgctccgtcgggctcgcatgagaccgtagccgaggtacgagtgctggtacagagtgaacgtttggccaccaaacatgagctcgtacttgtggtccccctcggcaaaggcagactcattcttgaacgttggttcaaacacaatctgggtggatgctccaccgaggtccatcaccgccagagtatccgtggcatctgatccctcgccgatcttcccgagcaagtaattcgcagtgatccaagcgtagacacctaaagaaaatgtgtttgaagttgagtcgattagtgggatgagaaagaaagagagtgggaaatgagaaaaccaaccttcatcttttccgtccatgatgacgaccggatcagttgggatcagcgggaatgggaagtctgacttgagatggtgctcaacctcggccaagatcgcgttgctctgcttcgctcccaataatcgaagtccagcagtcgccttgacggccaaaggcgaacatttttgcagactctccggcacaaccctgagagcttcgtcgatcaaagggttcaaactgccagctgcttcggttggagaatctttaaatgacgaaagtcctggttgaatagacttgaatgtctcgtactccaacatgggcgaagcgttgcagtagttgaacttgtatacgtggattcgggaaccagtcgagccagcgtcaatcatgagagcgtactggacgagcttcttgcctttgaaagcctttttgcaatacgtggtgcctaacggatccggatcggtctcgaatgaggtcgggcctttaggaacagcaacttcgtaagaggtagactcctttttgggagcatcaacctcgggcgtttccaccgttggctttgaaggtttcgtcggcttgttcgcgccagcctttggaggaatcaacggatgcttctcatgaacaccctcgccttccttctgagcggaaggttcgtcttcctcgtcttcaaagtcaatattgctaatcggcttggtggagctggaaccgcctttgaccggtttgtgtgggtaagacacatcctctttagaggcgggccaagaaccctctagctcgggtctagtgactgtaaaaggaggtttggaatgcgaagataagaaccggaaccaggaagatgaagaaaaaggataacttgtaggccctcgtgcagaagaaggcttgacgacaagaaaccttggacgaaccttcgtcatattgaagctcatccgaggtagatccggtcaatactcgtcctctgccactggcgacgaataacaacaatgcgatggcaacaccacccaacacggcatacttcttccaactagctccacccgccctccttcctcctgacccagatcgaggtccacctcgaccacccgtttcggcgtcgtaccggtttacgggtgtatatcgtctgttactgcctccgaacatgggactagcgactgccgaggatgatgcccttcggtgtttgatagagcttgaggaaagtggggatgaaggagaacgagtgtatgcttcagagtgagagagtgagacagagggaaggtctgtatggttgttttgggagaaaagagaaggaccaagaaaagaggcgagcccgacagatagataataaaaagagagagagatcccgagatgaattagcttccaaaagctaaaatatgaaataaacagatctatccatttccaagttacatacgctgagtatcaactgaaaatccgggccgtagggcagaaggcagattcgacagagacagtgtgggagaagacagcttgattatggctcaagaaagaagagaaggagacagagcccagaaggaaaaagaaacagaaagtgatagggtcgcttgaacaaaccgaaggaagtgtttgtcagaggaaggagtggcaaagaatgcaaacctggaaggcatgcacacttagataagccgggctgcgcgcacagaccgttcgggacgtttgaccttccatctctttccaagaattctttcaacactgtgtctggataaagcaagaaaccggtggaatgtacggctacaaaggcatattataatcggtgaacagattgaaaccccatcttgttttttttttctttcgattagaaggaaataaaggaaaccaaaagctatgcttgcgaagagtaacatcaagtaaagaacacacaacgaaagaatatagaaaggagagtacaaaatacgcggtctctctagacttggatcagatagaaaccggaggaatagatagacaactctggtgaaccaggttaagcgccttgatcgagtcacactggttgatgacacaactgatgttgatctcagaggctccctgagagatcatctcaatgttgattccaccctcggcgagtgtagtgaacattcgacccgagattcctaccatgttttgtagacgaccgacgagcgaaaggatggccatgtctcgctggacggtgatggaaccgatcttcttgagctccttgacaaccctgtcggtatctcgcttggtaagctctggaatagccatggagacatggacctcactcgtactgatgagatcgacaatgactccgaaccgatcgagcgttccaaagattctcgcaaggaacccgtgtgagatcgttttcctattcgagtgaatgttgatgatgacgatgctgtccttgatggtgaccgccgtgggaagatgttgcggccaccgtttgacaggaacggctggaaagactctttctgattcagagccgtcttgggcggctggagtatcagattgagggtagatcaccgaccctccacccgtcgggttctcaacgtttttgattcggataggaatagaggcccggatgacctgctccatggtaaagggatggataacttcggaaccgtagtatgtcaactcggccgcttcatctggggtaatgatggggatcaatcgggcggtcggcactttccgaggatcggcggaaaagataccatcgacctccttccaaacctgaagctcgcttgcattgagaccgacggcgcatagcgcagcacacagatcagtgtatcctcgaccaacctgcttgagaagagatccaggcacgcatccaaagtaacctgtgaggagtgtaaaggagggaatgaatgtttagaaaagttgtcaaaaataaaaaggataaggatgagggaaatagaagcaagagacttgccagtgacaacgggtactcgagtgccacactctttcagccgttcacccatctttttggcaagtttgttataaaagtcttgatcgaggctgaactcgccatcggcagcagcatccgagtcatcgatcttgtcgtcgtcgtcgtcagagtaggtggcctgaacgatgtgttcaaacgaaacaaactccgagtcgactccgttgtctctcaacgcagcagcaacgatcttgcaagataaacgctcgccaattccgatgatggaatctttggatcgatctgagatctcatcgatgatctgtataaagacgaaatccaatcagtctttcacgcaaaggaaaaacgttcggctcaaccacaagatctcggccagactcacctgagcagcgtaaaggaaagactttaggccatcgcagtctctttcgatctcctcgcagaggtctgcgaggagatcctggtctttgatagcctcactggcagccttcaaatgatcatccctgatctgatcaacagtggtctcgaatgtcgaagccgggggaggcggaggggcgtcgggtaagctcgacaccgaggaatcgagcgagttacaagaggacaggggctggaaaggactaggggagccagctctggacctggagccctgctgagattggcttcggagccttggtggaaccgcaccattcgggggaggcgtcgcagcagactcagatagagagagcgaattattggcgaaaaagccagatggatttcgggagagatcacctctgggggtcatggggaaaccggtgttgctggactgagctggtgcgcgagtctgagtggctgccttgatgagcaggttggtagtaccggtagactttgtggtgccggatcgggccgaacacacgacggccactctgtgctgagagagatatgagctgaaattatggggaaaaggtgtcggtaatggatatgggtaaatgtccataggaattggaagaacagtagtcaaacacatggcctcgttgtgttttcttcgaaaactgagaaaggaagtgacaagaggcagggataagaggatgaggacctacgggatgatagtttccgtgatgtcctgtagatttcagcaggacaaggtaatagaataacgaagatggattacaaggatcagacaacaggtctcagtcatgttttgatacggtatgaccatttgcaaccgagctttttttttctcgttggccatgctggaataaaaaaaaaagaaaagaaaagaaaagaaaagaaaagaaaaaaggcaacacgaccaagaaaaaggaggacctacacgtaaaaactttcctacgctcgttccaccatacttctgaacgacccaaccagcctcggccggattgccggcaagcgaaggtgctgaagaagatgatgaagaagaaacgtctgaagaggacatgaccgacaaaagagggacacgcggtaatcagagagcgagcttgaacgcaaatgagatcgtggttataatgagatgatgaccggatagaggagagaaggaaaagaaggtgatagatgaattccaaacacgacacgaaggagcgagaaagaaagcggatgaaaaaaaaaaaaaaaaaa

SEQ ID NO: 1595 - DNA, 8204 bp, Xanthophyllomyces dendrorhous
aaaaaaaaaaaaaaaaggcgacagaaagagatgactcgggcggggtcttcggatatatttgaataaatgttaaatcgcttatcagcggacagttcctgatagattgtgtcatcgtgtatgcaatgcaggctaagtattaactttgcaaagtctgttgaaatgctaccccgccatgctcgctaatgttctaccgagtcatgcactgtaatgaattctgtttccaacaggcaaacactcaacactcgaagactctcatctctcctcgctctcgctctcgctctccgtctctgtatccctgaacccctcgtgttatctcttgtgtcgtctctttctctcttttatcatttcgctattcgacaatgtcttcagagttcgatgatgtcctcctcaataatagtatagtaatcgataacgttggtttggtgtttctctctctacctgactcaaacagtgcctttcaattgcttacccttggctcttgctcgcttgtcccgccctttcaaccgcctgactcgaaccccttcacacatcacctcacagggcacaggcagcatcaaagctggttttgcaggtcaaagtcatcctaaatgtttctttccgacctggtatgaattccttctcttcaagcctcatcatccgttccaggtattgttgtaactgagatatcacccacaaccgtattcaaatataaagtgttggcagaccgaaacaccctagggtcatggcaggtgccatctctggagatacgttcatcggaaagaaaacacaagagctcagagggcttttgaaactaaactggccgatggagggcggggtcgtaagtgttatgtctctctgttttatgcatcaattccttagactctaaaatctgtcaacactggcaggctccaatcatcagacacacaaacttactgatccaattaaaacacaggtcaaggactgggaagatatggaacgtatttggaaatgggtgtattctgaggaactaggtactttatccgaggaggtatgtcatcgatacgcgtctacctatgatccttccccgatgatgacttgatgccaaccagagcgaaacctttgctttctccttatagcacccggtactattgacagaagctccgctcaatcctcgccaaaatcgagacattgctgctcagatctttttcgaaaccttcaatgtccctgctttattcacatctgttcaagctgtcctcgccttgtgagtcctttcgtttttctcatggtgtatccttccctttacttttacaagttcatcgtgcgcagaaaggatagacgttgactctgtttcaactctcatcttttccataaaccttggcgactttctcagatattcatcaggccgtacaacaggtatcgttttagattcaggtgatggagtcacacacgctgtgcccgtctacgaggggttctctatgccccatgctattagacggattgacatagccggaaggtattgttaccaatctttctctctctcgcattctatctttctggtctcggtgaaggatgctggcctgctgactctattgcttgttatctcatacagggatgtaacgaatcaacttcagcttcttctacgaaaatctggatcaaacctatctacctcggctgagctggagaccgtacggacgatcaaagagaaatgttgttatatcgcgctcaacccgtccaaggaggataaagagcttctattagctgctagctcagctggaggaaagagtggaaaggtgaatgatggaagaaaaaaagcaggggaggatttcatcttaccagatggaagaaagattcaagtgcgtccgctcatgattttcttcagccgtatacagagctatatttgccaaccaatcgtttgctgttgatcaaatagcttggatccgaacggttccgcgcaccggagattttgttcaacccagaactcgtcggtcaagaattcgttggagttcaccaactcttagtagactcgatcagtagaacagataccgacctgagacgaagtctgttctcaaacatcgtacttagcggaggaaccactctatgcagaggttcgtgtggcttcgtcaccctatctgtgagagacaagctcagaacacgaatagatgaactgatccgtatgggagccttgaactttatctcgtttgcggaatcaggattcggagacagattattaacagaagtcaaaaagatcgcgcttaaagacatcaagatcaagatttacgcacctcctgagcgaaaggtacggcttgttattgatgtactagcatacaggaatagcaaatcgtttgcgaagacggtcaagagatactgattgactcgttttcctgtttgactatccatggaacagtactcgacatggatcggaggatctatcttggccaacctcgcgacctttagaaaagtaagttgattggcgttcagtcctgccgtacgttttgctaatctgacagatcttgttctttctctcgctgtctttagatgtgggtgtcagcagaagagtaccaagaagatccggatatcattcacaagaaaaacttttaggcaatctttcccgtctacatccttctcttgatttcgccctgtcttcgccgttctcattcagagcattttgaacgcttccgtagatgtgtatctcctctctctctctgctcccgcatcccgctctttttccgtccatccctctcctggtttgaaacgtctccgtcaaccaggttgtttgcttacgcgctctgctcttctcaaaactcttgctcgtcatataccctcccttgctgctcgactccatgttatgtttcctttaaagacgatagatctgatagattacaacctatcatgtgtataaatacatatacgttccaaaatctggaagtgtttgatcgaaccgatcttggaaaattgggatagagggcaagatctctatcgctgaacaatggttgtatgcgacgcagaattagctacgctggatacggctcgaacaagatatacacaacagcgtacctcttgttggctctaggagggattttacccatctttcttgacaactgattacgtacccttggttctgatatgtttccggggaatagagaacgtgatatataatcgggaggagagagagagagggagccagcgcaggtttgagtctgatgttctcctttcttttttgtgctctattttctgaatctccgccagacttttccgaggggaaggataaatatgcgcgcaaatgatggactgagatagaaagatgctgcgatcctgacgggagcgagtgcctgtaattgtaaaatggtgagcttctctttgctcatactaaaccatcgaaggagcagagacgaaggacaaagcacgaaccttgacgacagcataagcagccacgccattgaccatatcaccagcaactccatccagtcctcctggcgtgctcgacttgggatctcgactatccagaatgctctgcgcaacgggagtcgtccgatctcgcttctcgaaccctaggataccatacctttcaccaactttgacaaccttggttcttccctgttcgatccactcatccactgtccctatatattcttccccagaagttgattcacccagtcggctcctcacgtcgtgctcaagatctctaagagatgaaacgacggcaggtcctcctccgaaagaccggaatgcatagaacaggccgacgacagggactaaagcggtgatctcgtgaagaaccccaaaagagatcaggagagaaggcaatggtatctgaggatggaggagatgtatctttttgagagcaggaaatcgatcgagcagcttggattgtagaggagaaccaggagtcgacatccttattggtcaacgagtcgaggaatgatagacagaagaagttgagttgaaagaacgacctcaaaagcatgctgatgtttcaatttaaccctaacatttggtgacgcgatcagcctgtggtcgatactctcgttcatcggtccaatcgatccatctgttcatcaccagccatgtctaacaacgattctcgtccattgccagagggtatgtccaaatacatttgctcggcattagactaagagaatagtgactgatcggtttgttaaactcccttcccttccaaataatccttatcaatcaaacccaggatgggtcgcccagtacgtatgatactcgctcttccgattcaagctgagagtcaagattgttctgagatatctggttcaacagatttgattccaactacaacgctccattctgggtcgacactcggaaggtttgtgaatgtttatgctcttattcttgtgaaatcagtttatataggctcattcttaagaaactgcttttctacagacgccacccgaggtgagactgctccccaagacgcttaactatatacatgaagccgttgtcatctaacctcttcctcatctcacctcttgaacaaaaacataacgtactagtcatcttgggctcagtaagttcttctccatttgaatgtcttgcccctagactataatcttattgagcattctccttaatagcccgctagatatcaatcctcctgcccagccatacgcaccaccggtcggaccgcctccatctcaatcttactcgtcgccacagtatcagtctgaaaagccaaaccagtatgattcgacccgaagcaactacccctctcaacagaatagctatcagcccaacggaggaggatacccagtctcccaacctggctatcaaatccagccgcctcctcagcaaccatactatcaggagcctcagaagaagaagggattctttagttcactaatgggaggtggatcaaggccacaacagcagccaatgatgtatggacagcaacagaatcaaccctattaccaacaatcgccttacggaaattctggtcggatgggaggaggaagaatgggtaagtccgctcttgtgtgtctgcttcatacgacgtatgcttccagaatggctcatgccttcatatctcaatcatttccctgatactatcaggtggaggaggtggaatgggaatgggaggtatggctttggcgtgagtgttcatcgctttatcttggcaagtcgggagctgccaagcgcatgactttgctaactgaccactgatgttttctaacatttaccctcacgtagtggaggagctggtcttatgggaggaatgctactggccgatgcaatcgacgaccgggaagatgtacgtttcttcttgcctctatactgttgcctataagtgtctatgtaactcatcatatcctgcactgtttttctttacaaccctctctccttcaggaggcctacgaccagggctacgatgacgggggaggaggtgatgacggaggtgatttctagacgcatatcactcgctcttccacaaagagcgttctcatttgctttctgatatactgtacgatgatgttcttgaagattttcttgcaaggtttctgggctcttgtttctttctacacatatattgtcatctcccattgcttggcataatcgccaagtatactgcaagatcaaaagctgtgttgcacgtgatccgttatcgtcctgattcattcaaaccgataaaccaaccattacgcgtacaatttcattcgatccagttcgattcagttcaattcattcaacactcgaccatgtttcgtgaatttctatcactccttgtcctcgcgatgttcgttggtgcgaccgagcaagacttcctgtcagcacaaaccatcaacttgggctgcccgtcgatgacgatccgatgcgtcaaggatggaaaatggccatccgggattgtaggtgatatcgggaagaaagaattttgtttctctggtttccgatgtaaccaatgcgagtaagtgatcctgcttggatgcttggcctgcgggaacgcttctcgcagaaccatgattgtaatcttgtttaatcaatcgtttggattgtgctggttcgaattcatagggaacaagcaaacacggacgaatgcaacttgacattcccgatcgagtgcgaggaggcctgccaggctttcgcgccaattcccttttgaatcatgacttgtcatttgtagcttctatctttccatctgaaatgccatccatataagaaaagaagaaggaaagagagcatttgctattgaagattaaccgaaactccaagttagacatcgagtgactaaccctatatgtcagaaatctcccgctcaacttgccagacaatattgtagattctcacatcatctacctgttcttcactttctcctctttcaagtcgatactacgatgctagccagaaagacaatccttaaccaactcgctcagcgatctgccgttcgattctacagctcggcacccacgtcagctatcagggatctcttgaaggatgaattcaagaaggctatgaaagccaaaaacatgaatgatatcaatatcgtcaaggtatgtcctttaaatctgacgtatcgctttcctcggaatgtgcttggaaaaagcagtccaagaagagactcgttcttatactgccttgcctagatacaactaacgaacgatttcgtattctcctctttccctctgcacatggctcacggcgtttttatcgactcggaaaccctacttttctttcaatgaaaccctgggatcaaaagagcatcatggctgacatcacgtaccacgagaaatccttctcgcctccaaagccggcggatgacgagtctgtgtatgccgtcattcaaaaagctatcaaccgacgagtccgttcccttttctcttcccaatcatttctccttccctctctttttcctggccttgtctgcgagaagggtcggcgaatctgatcctattcaatccctcctttgttatccggatgggatgaaacgggtgaacagaaagagtcagcagctcagttccaaagcggaaacaggactgatctagctgacaaggagacgctcgaggcagagtttatccagaagttcttgcctgcggccctctcgaacgatgaggtattgtcttttctctttaatcctactccttgggctttgtcgcgtactgttgacacttaataagcgaataaggttcactgacggtttttttcgatgggcaaaaacaaatgaaacccgtatcaacagatcaaggtcattctcgaacgacttcttaaagaactagcagtaccccaaggagacatcaaatccgtcggaaagctcttgaaagcgttctggtcagagatcgctcggtcgaaagcggatggaacattggttgccaagatcgcgaaggaactcttgggtacaaagtaaaacaaattggcaagagagaaaagaagtagaagtagaataagaaggaaaagaagaaaaggatatacatgtcttggttatatagtaccctaaagagaaatcgcctcaagtacaccaaagtgtcatcccttgtcttatcttgtcatctctttgctaggcaggcggatagaaccctgcccagagaacgatagagactgggatccaaaagaccaaccaaccgagatagaccctcccacccattcccatttcaaagtccttcccatcctggtttctatcacgcctaccaatcgagcgctgtcggcccgagacgagcgctgccgctccccaccagaccacagggtttgtctgtgctagacgaagaatgatctggacgtgagatgtgaagaatagaatggcagaccagacgattgaatgaatcacatatggcatgatccaacgttcttggattattgagcttggccgattgagcgcgagaaacacacttctaggcatgaaaggtatgggaaggactaatgaagggaggctcgagaagtgggtatagacaaggagtatataaatcggggctgaaaggagaaagttgggaatctgagggagtgtaaagtagcggaggaagcctacattcctgtttgttgcccgtattcatgataagctgatcaatcacaacaaagatctaagagggtagatgaagagagtgagcggcaacagagggacaaacgaaccagtacttctcctgaacataggtgtacaccacgggcattcggcgggcacaccactccggggttaaattgagagaagggacgtccaaacagaattgttggtatagttgaatctgggaaaaaacaaaaggagcaaagaccgctggtgcagagagcgcaaacagacatgctaagag

SEQ ID NO: 1596 - DNA, 26636 bp, Xanthophyllomyces dendrorhous
gacatgctaagaggaatctctggaaatcaacgaagtaacgttgcgacggcacaagaaaaagaaacagatatgagcataaccggatgcaaggatcaatagagaaaataaagaaaagaacacaccttcctccacgttactggctgtatatagagagggcggacgatgagctcccagccgaggtagccaacattcatgacacctaacggtctaacagcggtagcgcccgcgaaacaacctacggcaaccaatcctttcacggcttccttccaacgtatactgtctactgctgctctttgcatggccagagaagcgtgggaaggagcgagaaggagcataccggagaaggagaggagagcatacatgggctcggtatagggtgagatagacggaccaggggaaggcgagaggatgtataacatccaagttaatttagcgaactgcctagaggccgtcagacgaagcgtcaacctattgagcgcatgagcagaaagagaaagacaatggaagaaaggtcaacaaatcgagaggaagtagcaaagatacggacgaggaatagacccacaggtaaagaacgagaccggctaaaatcccggccgtccatgaacagatgacgccggctgtgacgacatgatgaatctcaacttggccttgtagaggttttgttcctgagagccaaccaagaagtttcccaccaacacgcatgacccatatccagccccatccaaaagcagtctcctgctcgacggcataataacctcgacgagcgacgggaatgaaccagaggacatcccacctaagaaaggagtgcagattggaggatgccgagagtaagagatcgggcgatcgatcaaagagtggaagacagcatgaagatatatagaggagggcaagggtggcgagccggaaagctaacgagcacgcaaggaacggagcgacatcatcaaggcgtgtggacatgaggctcgactcatggagagtgagcgactgaagatgaaggatgaaagatgaaaaaagctgaaggcgcccaaaaagattagatattctggtatcagccaaggtctcgctactgaccataaactggatgactgataactctttcaaattctgtaacaatttagttgtgcatgtgttttcgttttcttctttcgattttctttctcgttttctctctctaattattgcaattggacgtccagatgcgaagacagaagaatcgaggaaaacctcatggatagagaatcgagacaggaaacaaaaaaatgtttactacagagaaaaacggaaaggaatgaagaacaaaggtcaatttggaacgactcagaaaaaacgaagcgaccgaggcaaacttaccctggcgacgataccgtcgaatcgggacttgaaccaggagataacgtcctcaggcttgaccttgtgctgggcaccgattcgggccttctgctgctttcgctcggcgactcgcataccgggtcggcccatgacgacgtagaagtccattccgaaaataccgattccgggatcgtacttgataccgagatcgatgtgctcctggataccgaaaccgaagtttccggtggcggagaagttcctcttcctcaactcgtactccttgaccttgagtcctcgctcgaggatctcctcggccttagggcctcggatggtgacgtggcaagcgatcttttcgtttcgtcggataccgaaggttcggacggtgtatcgagccttggaggtgacgggggtctgaccagtcaactgctcgagaaccttggaggctcgggtaagtcgatcaccagactctccgacggagatgtctatagtgattatacaaatgtaaccgattagtctggcgcacgagaagaaaacaacctaagaaatacctactgagaacgagcttctggatcttgagctccttcatggagttggtagcggtcttggtctcggcctgaggcgaagagagcataggatggggaggaccaatcagtatgaccgaactgaccaaggctctaagtccttgtcgcctttttttgctattctagaaatgcggatgtttccatccacattgtttattactacacaccattttgctggaaagaaagaagaaagtaggaacaagcagacgttagtctacatatacgttgtaaatcatccagacaaagctaacacttgtacgtacagaggattcctaggagttcttgaagggaagggactggagaaaagagaaaaaaaaagaaacgagcagagaaaaacttgacgacgagcttgaccaggcgaacagagcacaagcgtgacgagtaatatttaaactccgggcacgtgatttacttgctgggtaactcgccgcttcttctccggtgatttatcgagcgcataatctccatctgctgaacttgtgtcctatggggtctatctgcgttgctcattctcttcctcacagagtaaatgaggtaaaagtacaactggtctagatccgaatcaagagtgcgctctcaaacaagccagatgccagggatctaactgggtggctaacattttatgctagtgtatacaaccctgattgtatgtgttccttacctttccgctttcgatatctgtatgcactcgtttcgtcttacttccatgttcgagcgaaaagaagatacgagtgctttatcgcttccagtttttccatagttcattttttccctcctctctcttttctctcgagttttgattctgtcatcttcgttcaaagcacccttcgtcctatgtacaatcatgcctatgcatatatcagtagcatttccatagtcagtcgagagcctgagcctatgaaattatcctaacaacttgacaaccggagtcaaccaaaccaaacacaaggatgcttaatctccgtttcagtccaaacatagtggttgccgtgcccttctgcccttacactaggcaaaagggtgatttccagcgatcgtaaccaagtcgtcgtaaccattggaacgtagctcatatttctgaccctgattagataagctaacggatgtaaaagaatctaggccctagctatgacgtgccaagaaacatttaacgggagccgagaaagagaaagagaaagaaacaaagagccggatgaaggatgatggacgggtgttgatgaggagaagagccaaatgctgtagatgatgttggtcctgaagaaaagaacatgccaggtcaacagagagataacagagagcgcattgaaaggaaggcccatgagggaatggtaggtgagagggaacggcgaaagagcgaaagattaagccatcctcactttatttcagcgcagtatacaacttgtacccaagagaaagcggagccatcaagccaaccaagaccaacgaggttttctccttctatccacatcccgaacatccttcgctcttcgttctctcttgtcttgatatacacagatacattcacatactcacacacccgcactcgtacttactcacccgttcgctcagtccccctttgaccagctgtctgcctcggctgactactcggtagcccgtccattcgcccgttcgctcgcttgtttgattccttcttttttccgccttgacgatgcgccatccaatctattctctacttgctctcggctcgatctctgtggtctcggcgatcgatcctctgtctgatactgtcctagacagagttatctctctcgccatttctagtagtatctacaggtctgtcccgatttctttcttgttcccgatttttctctctcggtttcttctacctgggctgaatgtttattcgtcattctttcttcgcctcattcgttattgttgccatgtgcgaccagctgggaaaatggtacactcgccagggcacttacagagtactatgttccgtccatatcgccctttactgaaaacttcctcacaaacgatcccaatccgtccaactcgactattacctcccaacttatcctcatcgcccagtccacattagcccataagcaagcctcgttcggacagtcttccacctctggtaactggactctctctgctggtaaatctttgagtcttctggacgacgattcggcagccgatccggccagcctaggagaggtcgtctcttggtacaatcaaactcagtctgacacccaagcctatggggtcgcccttgaacaagaggcacgtttcctctctctcgcacatttagacttcacctatcctccctctcactctcttctcgcttgactgactagatccattcgttctttcctctctgtatctcaggtagcgtacctgttgcaagtcgttcccagatccagtacgggcgcaatcagtcaccgcgccgatcagtttcaatattggagcgatttcgcttacatggtccctccttttgtatgctttccttgtttcctatctctctcttctgcttgtctcttcaatacctcttgacaacctttctttttctcttatctcccagttggcatacatgggcgcactcgagaataaccagaccctcgtaacggaggcttataaccagctcggtttgtacagaggcgtgtgtccgatgctttgtgtttgaatcgtttaatcctttttttcttctacctctcttcttactgaattgccataatcttacttcacaggccctcaagcaatcaaacggactctggaaacgtacgtctcgagcgctatcagaaagatacagcgccttttttgctcatcttaacaccccaacggtttcttccgcttcctctttcttttctcgatcggtagatattcagcaggggtcaggatcaatcgacaacggcgcatggacaaccggtaatggttgggcggccgctggtatgctcagagtcatagctagtgagttgactgttttgctcttctcaatctcttctactcgaaaaccatcagaaattgtcgctcaacggtggatattgggcggtcccttggttgaaatcagtcatccagaacagtgggatggcaaattcgttcactaatcagatcgcagatctaaaatcatggatcagtgagattcttacgggagcttatgcccacgaggttcgtctgttcttcttacactcctctcttttcctccttgatacgcttccctcggatgattgaacaccgccactctccatctatcctcaacatctacagctcacaactggtctgttacataactatgctgacaactcgagtacattcatcgactccaccggagcgatcatcctcgcatccgtggcgtaccgtttatctgccatgggaatcacctccgtctgggttccgttcgccgagcggacgtatgcaaacgtatccgctggggtggccagttccgatggctgggttgcgccggtagtgaattcgttggactggagtaaacagggacaaacttcgccggaagcacagagcttcgtcatcttgatggagacaggaaggagagcctgggtgagcgcaggaagtacgaacgcatcaggtagtgctggaacaggggaaaatcccaaccagtcaacggcgacaagggggatgttcgttcctgcgctctctgtatcacggggactactatttgggttgatctttgtcatcctttcggctatctagggctttacgtacaatacgatggatcggatctcggaagtttatctatagactatctcatctctacattgaatgattgcgcatcaagatatttatcttttctttctggtatcttcttctctctgcttctatcggtatatgcacttgacgtacgcttctgcctcctggtcctttcttgcttgagaccgtacaggtctacttttcaataaattcacgaccaatcttgtcataacctgctcattttgttatagcgcatactctctctctcttgaagaggggttcagcctccgtatttactcaaacggctttgtttgtactcgtttctgttcatcttatgacggtcttgttctcttgttcatccggatgatatattagatcgctcttatcgtctatactcagcttctattcgtttttttttctttctaccatgaggttttgttttactgtcttgacacggtgatgcgcttcctttcttctcttatcagatcgagaaagatctcgaatctgcttatttgtttcaatatctttctttcttgtgcgagccaagaccagacaagacgatgcagttgaaaggtgtaaagacatgtgaatccgggtcaagagtgctcgtgatgtgcgtaagaaaaaggaaagaaggttaagctacataggacgcctttaaatttgaatgagaaaaagaaagtctagtttttatttgagaaaaagaaggaagaatcataaaagacccggaaagtagtatcgatgaattatttcgtatttaactagagttggcgttcgaggtaagctcggcctgtgtgaggagagctcggggggcgtcatctcggggcatcatgacctcgatcaagttcaagacgtttcctgactggaactccttgttgttcaacaaggcatcgagctcatctcgagtggcgaccttgtggaacttgtgcttgagagcctgtccctccttgggaggtccagcgaagaggtcgaggatgagcgagtggttgtagggctggatgtcgttgtagacagccttgacaccgtggatctgtcgctcaatttcgtatccgtcgttgttgaggacaaagatgtagggagaaagtcctcgtcggagcatggtaccaatctcctggatcgtcaactgaagggatccatctccaacgaagaggatcgttcgtcggtcaggctgggccgactctcgagcggcagcggcggctcccaaggtggctccaacagaccatccgatagctccccaaaggacctgggcgagggcgacggcgttcttagggtagggaatatcaagaacaccgaaggcagaggtaccggtctcagcgatcacgacatcgtactcctggaggaactttccgagtcggggccagaggtgcttctgggtgatggtagtcttgccaaacctcttgtcgtcctcgctatcgtcggtggtgttgggcacctcgacggcctccttcctctgctcagcagcctcaccctcagccttgttggcagcgtcagatcccttcttggcagggaactgtccaagcttctcgatcaagtgtgggagcacgtctcggaaagagattccagggtaggtagcgtatccgatcttgacgtggtcagagtgaagctcgacgactcggctggagtccaaagagtaggagaacgatccggtgttgaagtcactgagcaaagcacccatggagaggacgagatcggccttctcgacgagctgtcgaacggagggaagggagttggctccgatgtagcatcctccgtagttagggtgggtctcatccatagtggccttacccatgggagtctcgtagaaggtcatgtcggtcttctcaacaagctcctgaacggcgcgctccattccgaatcgggaagcacaggcgtcgacgaggacgatgggatcgacactgtccttgtacatctggacgaccttgttgaggacatcctcgacagccggggtggtcttgatcgtgtccagaggggggcagacgaagggagcggagagaggagtgggctgtgaaggcaatgtcatatttgattagtttgaaatcgtcgcgattacatgtagacagtgagcaaaggtttgacttacgagctcagtgttgagagccgcggaggagatcttgacgtggaagagatcggtggggaaggtcaagtaaacaggtcggcactctcgaagggcaaccttgatgagatcgtcgatgatctgaccggcgttctcggctcgagtaagcttgccggtgtgagcagagatcttggcgctcatgtcctcgaactcgttgaatcctccgtcaccaagggtgtctattcaaagagaagtttaagatgtgagatagaattcgatcgggtaacatgttagagatgaaacgtacggtgaagaagagccttctgggactggagcttgttgttgggaactccgacaatatggagaaggggaagtcgctcggacatcctgtgaatggaagaagaggtcagtcaactgttgacaatagcgcgatgtggcaagagggaacgcacattccggcgactccacagagagcactgagctctccgacaccgaaggtggtgacgaggacggcaagtcccttggagactcgagcgtaaccatcggcggcgtaagaggcgttcaactcattggcgtttccggcctgtatgaggagacatatgaagagaaaaccccatatggtaagcaaagagatgcaggaaaaaagaaagagggtaagggaaagagagaactcacccaggtgaaatcgggggaagcctcgatgtagtcgaggaactcgaggttgaaatctccggggacaccgaagatggtcttgaccttgagctggttgagtctggttgtcggcaaaagatgggaagcaagggaacagagcaagagagaaaaggggaaaggaacaccgatgagctttaaggcacaaggaacgaatgagaggaacgatgacgtaccgggcgagcaagtactcggagatggagatctgatcagggtaggcggcaggcatatctgaacgaggaagctaaagcggttagagtggtagagatgagttggtggatgatagagtagaagtgattgtcgtctgtttgtatgagatgaaggagaggaagggaaagtggatgatgttagcagacttgggtgtcttatatatctctttttttctatcttctttttcttgccgccccgatgggagaaggatattcttccgattgggagaagaacttgaaacttcagacgctgcagagcggaaacaatcagaaggcccgggaaagagtgcggccgtggggagatcttgttctgtctgccactcacagacagcgcacggtgacgtggtatggtccgttcgggtttccgcacccacccggccaaatggggcctccactcggcagcggacggcgcacagcagatcaggcactatggtacgcggagagtcggggaccgaacgtcacgtgattagcacacgaagcttcaggaacaaacttccgacgatcatcttccatttaaccctacggtggcgaatattccggaagaagaccgaccatctcttgcattcagcctatttcttttttccctttcttctctgtttcttcctttcgccagttctctttgcctaattgcgatgctcaatatcgagtttatttcttgtgcgcataaccctacatactattcttatcactcgaacaaaagaccgttcatatgtcataatatacaaatcatccgaccgagaaggacaacttagtcgaaagcaaaacccaagagaaaatgctgatgtatgccaaaaacgaaacacgttaacaacctggagatacgttggcctcggaaggctgtctctaaagcagacaaggcatggaaacaggagaagagacttgccttgtacaacgacattatcttggccacgctgtcgattggaggaagatgaggaccaagagaggaagtttcgttaatgcaacagtcaaggaagatcgatcctgtctctcgtctagtcgatacatatgaagaaatacacttgcaatgcctcaagatgatagatttttttgctccctgcacgcattcgaagctcctgagagagagagaagggttcccgagagaacaagtgaattattcgacacgcactcaatcagtcttgttgtcctttcaaacctcgctttgaagaagacacacttacataaaacgcagcccagtgaatgatctcgggctttagactctcatccactctctcgaccatccgttcagtcatcgtctttaaagcaaaaataaaataaaatgagagaagggatacatgttaatcagagtgaccagatgagtatcacgcaagcagccaaacagacagaggaaacgtgccttcagaacgagcacaggcggaatgcagtgactcaaaagctcatacaacctggatcgaacctcgagcaaccgttccggatcttgtttctccaatatggagtccgccacctttgcacagtacacctcccaatccggtttggccgtctctagagacggtgaacttagatcaggcctgtccatcatgaaaatttcactccaaaaatggttagcatttcttggtgagttctgtctcatgcaaagagagagagagagaaagaagtaaatacacgcacgactgcatctttaaagcttcaaacacaagaatcgccttcctcaagtttccgtcactctcatcgataattttctgagcaaccgacgaaggtaaatgaaacttttccttctttgccacatgattcaacactgtcgtcatctgttcgtacaagcagttaggccactgttcatcactcatgtacgccacgcatccagatcagcgaaaagaggagaaagaagaaaccaacctcttcctcagaaggtgctcccacacgaacgagcagacatctactacggattggaccgatgatctgactggtcgattccgcgcatagaattattcttaggttgcccatgtacttttccatcgtccgacgaagtgccgcctgtgcatccctgctcagcgaatcggcagagttgatgatgaccactgtagtcaaagagccagaatttgaatactagagttttgtcgacgaagagcaagaacaaaaaagatactgccgtacccttaaacttctgttttgcattcagatctacctgctgagtctgagcgatctccttaagaatatcagagatcaccacccggtcgtactgtccaacatctctgcgaagttcgttcgttcgttagttcattttcagtttagaatcgagagtgaaaagaaagacgtcgttggacagaaacatagaagataacataatgaatatcaaaaggagacacaagaaagacctacgacggagtcaactcgatatgatagttggattgaacgacattgacgtctagttttctcttcgaaggcgtgatgaacactcgctgatcgatcttcaactgtgatccctcagcacataatgagtttaggagaaccatcagagagtaggtcgaaagtaagttgagggttcagacaaagtacacttctcactgtcacccgacagagggcaaaacaatggttaaagaaaaaaaaggaacgaaatggaaagaaagcaagaaaacgatgacttgctttttcgacacccgatccaaacagctctctaagaacacacataattcgggtttttttccctgctccggaaggcccatagaacagtatgtgcggaaagtcactcgatccagccagggaagacagccgatcagacagagcagaatgatagtgaagatcggccagctgccgtggtcggtatttatccacccagagactcattgatgattaagaatatagatctatttgaacaagtgagctattgaaagagtgatgagctggatagaacgggtgtgagcgggctggggagactagttctgttaagatggttgtcgtttttcgagtgaaaaggaagttgattgaccatccgagctcgtttgttcgctcatttacgatgacgcgtcaagaacgcgacgcgtctttactcttcactaacacacacacacagaggcgagatatataaaggacattctaaaaaacgagttcaaggtataaacatatataaccactcgatgtatgatcaagcagcagcaacagtggctgtagggactgtcatcgttgagaccggtaatgccaatgacgcgttacccgacatcgccttttcctcctccataaagctttttagatcgtcaggatctagtcgacttctcctaccatcgtctggttttctaaaccctccaaagaagccttcgatcgttacaggttcttcctctctctgttgttcccgccgctgtccgctgcgctcccctttgtcgtcattgccaatgtcgacatcgtctctgagacccttttcttcttctccttcttccccctcactctcagctaccaaatctcttaggaagccctccagcccaacgtctcctaagctcgctcttaatcttcctcggtcgttcactaattcacccgtcaaaagatcaatctcatcgtcctcttccatcggaatccctttgtacttgttgacaatttcctcccagctgtcaagtaaacggagtgaagcgttgtaccgtttcgaagccagatcctcgtccgtcaacgcctgctcacgaggtgtatttgatgaagaaggatcagatccaagagaagaatcaccccatcgcgatcgtcgacgtttgtaaggccggcgaaccaggggaggaggctggaaggcaacttgaggtttaaggaatcgagctaacgtagaaggtgtcggcggttgagagtcttcaggtgggaactcggatagtggatcgtactcttcttcctcttctctgtcatctccttccttttcatcatcatcatcatcatcatcatcctcctccacaccatccacatttaagctttcgctcgtgtctgcatcgccttcctcctgatcagaggaactgggcggagcttcagacacaagtctagtgaacaatctcttaaacataggctctatccgaatcagtctcctcggatgatctcgataagtcgaagtaaatgcagaaatgacagaagctggaatgggcgaaggtatggtctgtgatgatgtacgctcatagaacgtacggctcctccgaggcgtaagctctccttgaccatctaccgacagatcagctgtctcgtccagcatcctctctacttcgtctgtcgcccgtgcagccggcgacgatgaaaaaatcccaatcgatgaacgtctagacattctggacgtgcaaggcgtagaaggtccatcacgggtcggaaaggaaagcaaagttctagtcgatccttcgatagttcggccatatcttggccttgttgtcggagataccggttcacgccggaacgataatgacttagaggtgccagccagatccgacaaaggtttgtgccgcgcatatctcggttcggatagttcatagcggcatcggccagggagcgagatcgatgaatcgacagaggggatagggggacttgaacatgtgtcaagaagagaggactgatagctaggctttctcgatgatacaggcaaggttgtggaaggaataataattattgatgacgatgatgatgatggcgaagaagagctcgaaacacgctttcgtttgaaagcagctggcgatttagatggggacacagaaggcacaggagagcgacatggaagaggcgacgattcacccggagaggaagatgaagaggagtcgatgacgatgggagatcttcgacttgtcggtctcactggaaccagagcgcgtctcttaccctttgcaattgtagaaagctgcacgatctcgctctcggtttcgctcgtactcgagcttgcagtatctgaacaatcttcgtcccggaggtccgaagaaatatctgagataacgcgggattgatagcgcggtcgagcgagccgattggcagtaacccgggagctaatcgtatgttgaggactgaaggcgtaacgaggactggtggcatatcgtggtctggatggggatgagtaacgtggggttgaaccgagggaaatggctgtggttgtgcggtcccgggcatataatggatacggacatgaatgcagcggatacgacatggtggcggacgaagaagggtacaatatcgaatgggataaatctgtacaacagcaaggtaaggcaaggtgagtatagctcaaagtttatttagatgaacaattccaacctttaggtgagaaatgttgaggaatgtcggaccatgagcgtaccgggaaagaagcactcaagcttggcgaatctacctaacgattcaaccaaaatgggttgagaaaagcacaaacatgaacttgttgaccacaggaagaagagtccctacttttgggtaacccaacagatggatgatggtaggtaggtgatgctagaatatgcctcaacaatttaattgcgcttacaaaacacgcccaaagccgaaaaactggagttcgtttacgtctatatatctgactgtctcttcttcactcttagaatcatactggttgtgcattgtctattcggccttttgtctaattgcggtcatagaaattctctatatgacctcctactcaccatcactacatgtgccgataaagatcgacgatgaccacgagtggttgaagatggacaagagacacacataccgccagtctcaaatttctgacgcgcgggcgagcgattgcaggtggtcaacatcctcttgaatctctcgctcactccgtcttcgatcaatctgagaaatctcattctgcattgccttgttcaaactttatacttgaacacctatctgttgaccgcatggacgttgataatgacatagcatcgactacgctctcaagctcgacgcccgctgcagtcgttaccggggctcccatcacgcagaaaacaaaatctcaactcagacatgagaaggagaagagagctttggccagagaactaagtggaagaagaaaagacggagaagagctcgaagtatgctcagtcggctggtatggcatttttagtcattttgtacatgccgtactaacacctctttgtcatgttctcccttgccctcctggatttgtgcaaattgattctggataaaccaatagacccgtgagaatgtagacatcgccccagaaattgttccgaatgaggagcgggaagtttcccaactaagggtatgttctctttaaaccctaaagttcttggttatcgatctctgttctcatcgtctagtcatttcgtctagatcaatcccgttcgaaacttcaatcgagtccgatattctagatatcaaatcgatactggcttcttctcaccttatcctctgtcgacagccgaagaatcagctctttcgagcggtccgtctccttctacatcatcgtcgacaggaaagttacgtgagatttcaaacgtagcagcagctgttgctgttcaaccacaatcgaacacgtccagaacggtagatactgaagtgccttctatatctagcgagtcaaggaccaccctgagagcccatgggcgtacgtcagatctcatttgggctggggggacaggatctttaaggccaggtggaagaggagatttgtttgtatgtgatgtgagtactaacctgctttccaaatttaccctgtctccatatatcgatatacactgctcactcacaaacggatggaaaccacgattcttttctctctagggatgtttcaaatactgccttgattttgatgcctatgatattcatcatgtccgtcattcctcaaaacctagcgaattgactttgaagagagagcgcagagcattgacctatcggctcactttttcaacccattgacaaaatagagatcatgtacaaggatgcatcctcctggaataaaagtttacacaagagggaaccaatcaatatgggaagtagatggggagaaagaaacggtgcggtcatagtccctcctcttcttctcttcgcatcagccaaaaattaagagagaaggttgctctgttcttctctacccatgtgcttgtgacatcgcagctgtattgccagttcttgagtcttttcggaaaactgttcatagattctaaaggagtcttctatagcgttagtcttgtgtcacgtctaatccaatcgtgccgatctatttgagtatcttctgatcttctttgagtatatttcgcggatatacaagacaggtcggtgagtgtgtttgagccagactgctgtcaaggtatatcgtagtactaacagcgattttggtctgaatatcgatttggcgatatagatacctttatgttctatgtcctgacagatactgaccggaagaaggactctgtcataggcttcttctcaaaagtatggtatcttacttggctcgatctgaccgatttgatttgcgattggcctgctcatgccctcttctctccggatctatcatcaaattaaaggaaaaacactcactagaagacttcaatgtcgcttgtataatcgtcttgcctccatggcaaagcttagggtacggccgtctgatgatcgagttcagtgcgtatcgatctcaacttaccccatcctcattcccggttgatgattcgtcttttcgtattacatcttctgactctggcttgtgggtcaataatgtcaggttatgagttgactcggtcgtctcctacgcccgggacgccagagcgcccgttatctgcactaggattaagagggtatatctcttattgggcctcggagattgctagggtttattctgataggttgacagaaatggaaaattcaaaaggtactgtcttcaccccttctacttatgagacttgagtaaacttaagcacgctaaagtggagagattgggaggtgtcggaaggaaaggtgcccaacagatattaacacatcggttttttttgctctagatccgacatcgttgtctactatgtcgattcaagagctagcagttgctgctcatatccgtttggaagaccttgtgcttgctctacaagaatgcgcgtttgatcattacgttagacgaccaataagaggagcaaaagaggaatacatcataatatctcgagagattcttgacgaggcaagtctagagcttctttccctttcatacgatccagtactctttaccatactttcgtaaacttaccaggtcgaataaaatcataacttttgtgaaaacttctttttctcttgccaacaaatagtttgtgattgctcgtcgtgtacgccctcgaatattgagcagagaccccgcgcacctcctcctgccgtgagacgagaatcgttgtatattagaacgaattatatggcttggttcggtgattaaatagaaagaatattttcgagatgacaagacaagacagaccagaaaagatagcggccacataacgttttttttctttgtcgagagtgcgaaagagccaaaagaactagtgcaagagattagacaatctgtttgttatttacgaggatgtttacaagaacactagcgatagggatgaaagaagatttatacaggattgacacgtccgtcaggcaaaagtgtgtatatatgtgcatacgtgtagagaccaaagaactagatggatatactggtaatggagagtgagacatatgaataaaacaaatggcaaaagacaaaagagacaccaacaaacatcctaccagaggtatctaggaggagcttcagcttcctcttcaataacatccctgctcctcgttcctcgatttgttctcgagtttccttcggcctctttcgagatgctttgttggcctttctcctgttgttccggaatccatgacgatgattctgaacctgggcgcatgaggtgtttgaccgaagatgaggaagatggaggccctgcatgagttgacgtccaattcggatggctggttgtcggggtggtgttagaaagatactcgatttggctgttcgtcgagcttatactgtattgggatgactgccgtcggtcgaacagaggaggggactgagggaagtaagattgtagtgactggtgggattgttgagagtgaaaagagtggctagaatgaagagaacgaggagatgaaggagattgaggcgaatgaagagaacgagaagaatagtaggatttcggtgaaagaggagcgaccaaaggaactggtgcattgtaggccgaggtctcacgcaaatctataggtcaagacaacaacaagacccagcgagtgtgtcaattaagcgcaacaagtaggaagggttagaagataagactaacaaagatttgccggactgttctggaaattatcttcatccactctaggaagataccctgatagacgtctgcccgtttgattgtcttcgacatgtccctcccgatcagctctagctccaactccaccactgtgactactagctgcacttgcggtgctctcagtatgccacactgcggcctcgtcggaaaaatcaaaactgagcgcagtcggaccagcgtcacctgaagcagcatcgataactgatgacgagtctttttcgctgtggtgaccaggctggaagatgtctttacccgagaacacttggctcgagagcttttgcttgcgacggaggagcaacaaaagagctatagcggccagtgcgacgacctaaacaaaggatgaatctaccatcagatggttgtatcggagataatcagggaagcagatgaaaaaaaaaaacgaacgactattccaccaacaaccccacctgctattgcggcggtattactcgcaggtccaaccgctacagctgtctgcgaactatactgttgctaaatgatccaagtagtttgataacagttatcagtttcgaagattgttcagatcaaatcaagtcttgaggaaatattgctaccacaagacaagaaagagataaggaaagtgcaacgtactgcactttcaactccgttatttgtcactgtacttgtaaaatagacggtccgataactcgtactctgatgagcatttgtgtttgagccattgacaacattctgaacctctgtcgctgcaatgttgacgccagaggtagtcgttcgcatggacgatctcggtaaggttgaggaagaagatgatgacaaggatgtcggttgaacgattaagctggagaaggaagaggaggtcgttcgaactgatacaaagctgctggtaatggatgaggatgctgcaatggaggatgaagaggtcggtatcgaagggcaggaagtagagaccaaagtagtgtacgccagagacctaagttccgaggtaaataaaaattagaataaaaaaataaaaaaggacgacagagggtgagcaagaattgtgaaaagcagagccaggtttcagccgtgcggtttgacgaatcatcgggtcggaaattctgatgacttgccttgtttctgtcactggcaaacttgatgtaacgaccaccggaacatttgtcgtctgtacaatcggcgtggttcgagtgatctgatcgactaaggttgatccgttcactatggtagaatcgatttcaactgatatggatagcgaggtcgcataaattgaagaagccgtggtgaccaaagtgggaacaacggatgttccgataaccgtggaaaatagagtcgcggtggggatgacggactaatcaaatgattttcaagaacgggtgcgcgattgaagggaacatacagggaaagagaagaaagcaagatgagaaagagcattgaatcaaaatatcagaaacccatctgatgatacttctcctcttcccttcttagtgcaggacgaagggaagctggtagacgtgcgatcataagagagaagcaagaggacactcacacatgccgcctcgttcgccatgatcaatttgacagcctagaacaagctgaaggaatgataaagataggaaggaaaagaaggagagagagaaaaaagaaagaagtgcggtcgattgaacaacggaagtgaagcgactgaaggagttttgacccggtatggttcagagagtcgttcggttattcgatctgcgtatgagtgtggattaaccaatcaataaagcaagcgatgtatatgaaggtacgaatctcggtgtcagttggactgtttatcaggagcatgagagtgcggacccacagaaagatagagtgtgggggcggatgtgttgcatggtgatcggcatggttatacatacccttttgaagcgcagcaggcacatctcgagtgcatgcacttgttcgcgactgccggctgccgatgaagccaggcgttcttgcttcgctcgggttcggtcgggcgtggctggccgatcgctttttttaaattacttagaattcattcaatttcaaaggtagacagtgccaacgctcggccaaaatgctgatggatcattcaacggtagtcaaaaaatacaggtgaagaaatagacacagcaaacccagcatgtcgtccccgcatgaagacatacacacagtcaggtatacaaaccaatatatatttatctatctatccgcctatctttatttcttttcgaacgcagtttcaagccatggtgcgacctttcgagcaatgatctctccgtgcgctgaatgaatatcggatccaaatcggacgaccagcagtaagcacgtttcattcaccgccacgttcattgacttgttctctcaacttcaaaatgcaaaaagcatgtctccacctgaactgggcagtttataagtcagaaggacaaacctagacaaaacgcatgtggaatagactctacaccatgccagatctatagagtgcaagatttcaataaaataaaatataaataagataaaacatgcattattagaaacatcaagatcgttcatggcaggtcatctgtcgcatgctgtatgcaaggaaaggagccaagaacagacgcagacaaaccttctgatcgagtgtctcttgtggctctacttgcacctcagtgatcgtttgttccagcacatctcgaatctcatttccgtgaccaactccgacccaaccatcggattctccccagtagccccatattctatgcctattggcttttagaaacgctagatcaggttcttgaacaagatccatctcggatcgacccaatattaacgctgcacggatcacgtggaaactttggacgagagcgattgtaggcgccggaagaacatagctcagaagtccacgcgggataagcttcgtcaaaagagatgctcgtggcagaatatatatcaaaggagagcgaaaaataggctggttggacagaaggatgcacattcaatgacactggctagtgttagacgtgtttctttgcctttaactcgagctggaacagaaggaggcgcacctgaagttgctttccattaggagattgggcgatgtgagaaagtgtaggaaacaagagcatcgcagatgagatctgaggtctctgttcgagaatctgatggatcaaaagttcaagaagaatcattgtcaagaggtctggccaaaattgatcttatgagaccgggaacaccaacttgtatactcatccaggaccctaccgaatggccagagattcctacgtttacgtcttttccgagaatcctccagacttcatccaagatctcgagcttggcttcgacctgacccggtagctcgaccggattcatgccggagggtataggtgggaggtggggagcatgaccggcttggccgatggctagaatgccaatatgagatgggatgagtgtgtagagcgtttggaggaaagagtcataatattctaagaggcctggattgcctagtgatgttttgtaaataatgtattgatcgaaccgttagtcacgtcgactcaacgcaaagagacatggaagggcaagatatacctggtaggtagacccagagagctcggggttgtgtgtcaaggtttcttggaggaaagtagtagagatctgatcgatgatgggatgcaagaggacaagaatgttgaaaggttgatcgatgaaaaagcttatcagtatttgccagtctgacacgaagaagatctgctagaggcgtagttgacattttgtgtagatgcaatatgccagacaagagacagaacgaaactgtggtggatcataaatcagagaagtcaagatgaatgacgatagtcacgtgacgagcggtaaacgctcacttttcgattacacttgaatgttttctgtggctgattggtcgaccagatggtggttacacacccggcacaaaggtaccaatttgcccgctcgaacacaagccacacaacgtcatcgtcattgacaaacttaaacagaaaatattaaactggtgagtgctctcttggtgcgcctgtcctgttccttattgggaaagcaaaagaaataaaggtgcgtaatggcattgggacaagagggttagttttagtcagtgcaagtacatctcgtcaccgataattattcaatctccaactatcaccatcaataccacgtccgatcatacacttactaatccaatcaatccatctcgcatgtccccagactctaaaccgcatccagtgttgcctcacgacgactacgagaaggcgtgtaaaggtcagttttgcccataatgaaagattctcattttgaacggtcttcttttttgtcctgtcaacactttctatctgttggagtggcagtcttgaatacgagcctgcgatctttaagttgccgcatcgcctcgtcctctcacatctttttcattcttgtgaaagaaaaaaaaaactgattcgtcttatgtctctccttcctttctttttctctttgtcctactctatcaacttgttcccttatatttgtcgttgataattgcccatcctaaattcatacctctcttcttcaaaaatcaacttggttttgttcaaccttggtcttgttctatccaggtggacccactagacgcttctcgcagttcgtcttttctgattcttgtccaatatctggccttcatctctggctacatgtctctgtcaggttctgtagctatcagctatcgttctaacattttctttcatttcttatcgtcattcagagacggccagcaagtgaccaacccaatagacaccaaatctcctcttccgatggaaactcctgcttcccaaaatccaccgtcctccataggaaaggctgattacctcaagccagataacagtccgaacgccaagagtcaagacatcaccgttgctgatggatctgatactggtggagtacgttggctttcacagagcattgtccaagattaatgctcttcttttatccttccatctagtactgatgagacatgttttccctctcaggcactgaaccgccacccccagccggctgcctcggcgctcctctctaccatccctgcagctccgacatcagcctcgaacgatcccatctctgcgctccctacattccgagttggagtgtccgaagaccgtaacaagcgatgcagaaggagcatggaagatgcccattctttcatctatgattttggaggagttgaaggtcaaggatactttgctgtgtttgagtgcgtaaatttgatcgcaaccgttgcaccccataatgtcattttcttttctgctgacgatccaaatcgtttctcagtggacacgcgggaaaacatgctgcagaatggtgtggggctcattttcacgaggtacgctcctttgctccgtacttatggtgccaaacgttcgaacataatctttgaacaatattcattttctcttcatgtacagtgtttacttgaaaaactttcttccgatgggtcctccctttctgtacccgacatactcaaccaaactttccttgcggttgactctgaactctctaaactcgcccaagaagaaaagacacattcgggttgtactgctgtagtggccttcctaagggtggatgaacctgccgccgagtcggatggaacgatcactgaatctctgggagctatctcgcctgagcccgtcaattcgactgaaaacagcacggatccggaagaagagaagagcagattgactcgcatgaaaggggttttcggaaagatcacgggtgggtctggaaacgggggcggcctgttctcttccaaaaaaggtgatagttctggtttggcatctggagcacctgtgatcaggaagagtggagcaaagaggacgcttttcactgccaacgtcggcgacgccagagctgtgatatcgttcgtctcatcttcgcgcttggtctatcatctgcacttcatttgactttgtttctgtcgtgggtattctcgttcatggccggctacagccgacgaggcaaagccgtccgcctgacatatgaccataagggctcggacgaacaagaagccaagcgaattaccgatgctggtggatttgtaatgaacaatcgagttaatggtcagtatcctttgatgatgtatcctatttattcgagtagttctactgtctgactacgacaataaacccaggcgtgcttgctgtgactcgagcgctcggagatgcttcggtcaaggagtttgtcgtcggcaatccgtatacaacagagacccggctggacgaaggggacgaattccttattgttgcttgcgatggagtgagtagtttgtttctaccaagagtttcctttggcgatgtttgtactcatcttccatcgtttgaattgtttttcctattcgtagctttgggatgtgactgaggatcagcaggcggtggatttgattgccaacgtagaggatcctcaggaggcttctaagatcttgctggatcatgcattggagagctatactaccgacaacctgagtggtaagcgttctgtgaacattcatgagatcatcatggatcacatactgacatatgtacatcataccggggtttcttctcattcagttcttgttattcggctgaacccgaccaatgtttgagcacaaaaagtccctttttcttttactacatcagacgccctgcctcagcctattcttccttctgtatttcccttcttgcgagaatgtttctttgtgcaagcaaattttcttgtaaacttagtatgctttgatttatctactcgacatcgatgactagctgagctgtgaactgtgctcagtcgcttccttctcgagtctcgagcaggcatagcatcgtgctatctgttgtcccgaaaacctggtcaacgttactttgtacctctctcgcacgctctgctgatttttgccacacaacatcatgattgaaaccaagagaactacagccaccttggtctctgttgctagaccaaaccgagcgacgggaagcgatcgatgagtcacgagagtcgtcacagggaacctgcaggtcgcggcccagttggcgtgtcaggcgttgagtgaggtacaaccttagattgaagtggttactctagcctgtggccgaggtgcgatgacggatacagttgttgcggatacagtctggttcgtggatgggatgggatagaacaaggtagaaccatgtggaaagatccatcttgatggagtaatatgtagacagtcgataagctcggcagtcagcatccggccagtcgcggcccagtcggcgcttgatactgccacactctgagccggatgcccgaagagattgaattactttataagacggctctccatccttcttgatctttgccacatccctctcattctctttccagttcgccaccttactgtcaatttgccaccttcaagactctcttcctcgcatccctgatcaaacgtactccaaagatatacagatagactagtcacaccatgtctacaccaacttttaacgagccaaggcggttcaaagtcacccatcctgctgaacaggtacgtccatcttctgttgttctcttctatccttttgtcatactatgctttcattctgacaagcatggtcctttcatatttatctccacgtttcagcttgcccggcggttccggtttcctaatccccccacctacgcagctcttgtagagaagattctgtcctactggtcgtcgacctcgctcaacccaaagaccatctcattctcttacatcgacgctcagggggatagatgtgtgcttagctcggaagaggaacttcaggacctctatgaagaactcaatgatgttggcacagctcaggaagtcttaaagatgaaggtcgtcatccttggagggcctgtggggattgatggtgaggctgatgtagaattagaggttgagggcttgatttccgaggttagtcgctttctttcttttcatttccttattcctcttttctgacacaatgtgactaactatgtatttggttcgatgctctcgctcgtgcttgcctgaattatacagatttcccagacggacttggccgacgatgccgagactgagatgggcgacagatccaccttttctactgccactccctctgttgaagacgctacctctgtttacggtgatgctcatcagaacagctcggttccttctgttgagtctcaggagaataccgcggaccccgaggaggtcttcccaccccaggttgagcctgttgccaaccctctttcgctcctttcggatcttgccacccttctctctagcatttctgccaacccggccttgtctacaatcttgtctcgagcagctcaaggtgcttacactcctgagttggctgctcatgtaggaactcaaagagacagagttgagactgagcttaataaagccaaggatgaagtcaacaaagggtttggtcaggccgcgcagggttggaaggacttggagaccgtcttggctggttttggcaagagtgctgccgaaggattaaaggaagcggaagagattagatctcgacgaatgcacgagaagcggtcccgtgaacaccacgacgggttccaccgaggtcctggcttccaccatcgacaccatcctcgacacccctcgccttcttcttttgaaactcgggataaccgacctgactctcctcctcctcctggtccttcgtcgccaggccgtgaacgatcgagacatggcagtcctcctggatctttccgccaccatcctttccacggctctcaacgctcccatcctcaccaccgccgccgtggaaagtcggccgagaggggtgttcctggagag

SEQ ID NO: 1597 - DNA, 6352 bp, Xanthophyllomyces dendrorhous
gtcctcctcctccgtttggagattcatttgaccgagacgactctgtcggagatcgtccagatcactttcatcgacgagggtggggcaatcatcatggtgggccccgaggacatacctaccgacacgaaggacacgggtacccgcatggtgacttctttggcagattccctttcttcgtccatccctcggctctcgaccattccgaggcccatcggggctggtggcagatgatgaatgacggcccttccgagatgaaggttgatggagtgccttacgaccctcagactggagagcccacctcgcagaacgagaagcctgaagagaagtcaaaggaataggctctatattgtggcctgttgcgctcccttgctattcgacatctgttgaatacattgttcctctgtctatagtttattttcctctcttacgtctccgatgacctttatatacacgaccttgatgattatgaccaattgtacattttgtggaggaaatctgtttatgtttgtgaaatggagacccaacggtcctgtttcgccctgtcgctctttcttgaatcaggaaagcacctagcggggatagaccaagatgctcaaagacgatggccgtagatgaagaacgatgcagaagtgtcaatgaccctctatggtaagtgcttctcacgtcaacctctcaagctgccttgccgatcacaaagattgagatttacccgaggaccgatacgcgtggcggtgtgttagggttagcaaatgaagtgcaccagagaacatgagatttcttattaaaccatctacctccttgtttctttttcatccctttacccgacgaataacgacaactatcatcaggttcattgacagagctgtggtcgtcatcttaacttgatctgatctccggaagacagccaagacagccttggagttgtttcttttcgaaataagacgaaaaacgaacaaacgacaaatataacaagaataaaataaagctcttcagtctgagctcttggcaatcatataccaatcaccagttgtatcgatataatcgaccttttctcctttatctacccataattctgagattttgatcggccgaacaactgcctaccacatacaccaatggacacgaaacactctctttcttttacatctcatcctcgtcgaagttcgtttcttagcccttcgtcttcaaatggcttacacaccactggatctcatccgggtcgaatgcagcctcgtcgaagatcatacctgtcctttctggtgcctcggtccaagatccgttgtctctttgtgctcataacgctttttaccaccgttgtggtggtcggtctatctttctcgattttcacgttcgacattcctccgttgaatgaatacgatgtcgaacagacaccaagagtcaatatctcacggtccttcgaggaacccgatttcgctcttctctccggtgcccagccgcatacaatcggttgtcctcagaaagattcatcgagtgcaccgttgctgttgcttggaatcttttctgctccagatgatcctgcaggggaggacacaaaaagattgaacagacgaaatctgatcagaaggaaggttatgcctgattggcctgctcaggtcgaacttcggtttattcttggaagacccaagacggcagcaatcaggaggatgctttcggcagaacaagagttgtttggggatattgctatcgttgatggagtcgaagatgttgatttcggaaagacccatgcgttctttaaatgggtcgcacagaagagggtaggagaaaacccaaagtttgtaatgtacgctctcgttccttccttcaactcgtacggtgcccaagtttgagctcacagacgcacgggcatctacgtgccaagagacgcgtagaattcatttactgacaacatatgtggaatgtggttccaatctgtcttgacaggaaaatcgatgacgatgtaagcattcatgttattatctacaactctgttctctccccctgcttcccccctatctctttctgttgtgaaaatttatctcgactagtccatgttcattaaataacgagtgcaatctgataaacagacgttcctggtcatgccaaatgcgatcgctagcttcgaagcgcttgattgctcgaaaaacatctattggggaacctcggcaggaatgagttaccactttggattctacctgcgaggtcttgggtatgctgttagctggccattggttcgtgataccttactaccagatgagatcatcttactttctcgttcagaaagtttgttataaacaaaacctatcgagaaatttgctaactagtgttgggtacttgtaggcttcttggataggttcggcagatatgtacgtgtgcaatatgaggtctattctgagatgaccaatccaaagtagcacccgtaaatatattgatcttctctgagaataacaccgagttcttttgtgcttgttttgacctatcagttcgaccgcgcatatctgcaaatacgaagatgcacgaacaggacagtggcttcgaaacctggatcctgtgactgatccaattcatgttgtggacaacggttggacaatgggagactacaaccagctagacgttggcgtggagagtgtagctttacgtacgttccgtttctcaacccatttcttaacctatcgcgtattcctggaaaggaaaagtgtaggaattatgatcaagcgagccaagaacgaagctgactggtttgtttcatgatgatttcatgtcattcagactggctcaagtttgacggttggtacgaggagcaggtcgaccgtgtcaaggagatctggagtaaagcaggccgtcagtgggcggctgatggtggagtcgacccgaagcagtcgatagattttggaaagaagttgcccagtgccgctcaggcagaaaaagatcgtcagaaatcgttaggctgggatgtatgaatctgagttcgatccagttgaatcacggacattctgagcatgtttacaacgtctgcgatccgaacaagtaaaagtctgtgactgaaaacgaaagagaaacaaaagaagggcgaacgagaagggttgtcagcttgatcgtgtgtttttgtttgctccggccatcctggctgtgtaaactgatcgcgttcggttaccgtttttttcccttccctttcgtcttctcgacgacgacgacgacaactaatagcattgcagatcctctcccaatatcccactccatcttcatctcatttctcctccatcctatctcttgttctttgattagattggtattcagcctatttttccaacctcaacccactagcttggatggatcgacggcctttaggtcctagggatcatcgaggggaaccccctagcagagaccaagcattcactgagatctttggccgacgcaatacccatcatgcccatacccaacctcaacttggcgggcctcgatacccaaaccaacagggaacttcctacgcacccgttcacccagcccgtcatttttcgccttcacagcaggtgtaccagtcatctgttggagtcggtagaccgaccccatccgggccagggacctacgatggatacgccggatcccttggtattgggcctccgcctaccggtccagatgggtcttatccaacctacagttaccctgtaagtcatgtctatagcttgcctccagctatctccatcgctagtgtctgtatcctctctctagtatccatccatcttgcttgttcttctcggcctcctcggccggccactccttggcgggtccggcatctctccatgctccttcatcatctccttgttgtttcttcttcttctttcttctccgattattataaccttctatctctcaggactcagtttaatgttgtttcgctattcacgaggcaagtgctcctttcgttgaccctgttcattcttttgtactttcctctgtggcccagtacaagccatcggttcctaacggaccaagtgctcagttcgaccggcgatcttcattcaacccttctgttcattcgaatcatgtatcctctgctcagtcgacctactcacaagtaactcatccggtctccggaccaccagtcccggcaaattcggtgtactatttagttccgaatcaacaaagtacatcctctatcaatctgccgacatcaaatcctggtctgcaacaatatcggactcaaggcagccaacgctcttctgtgcaagcactataccaaggcgttcaggctgcatacccttacccagcggggggatatgctagtgatcctactgttctacctgaacagaacggtagaacaggtggtttgaccccagcccaagcctaccaagctcaagtaggaggtgatggcttggcggatttaaaagcgaacacgagcgatcaaccgtctactgaggtttatccatcatcgatcccttttccaacctctcctgccccccagtccaatacgcattcatacagtcatccggcctctcatgggtcttccctatccacgggtccctcgacccaaacaactcagtccgccggaccccggggacctcgattagctccacctcggttgccggacctctcatccatcatgggaaatggtggacttgggttgaatgctatatctctggaaccctggaatgaagtagcactaggagcgaccacaccacgaccgccaacggctgacgagactgagctcggatacctttctactggactctcacctggcgaggcctcaggttcgcacaatgtgttcttattttgttccactcatctatcctcactactctatgcggagccttggactgacagattgctcactttatatatggatatctgaatgaactgcctccatctataacaggcgcatcttctgtatactcaccgtcatctagccgacctggatccgttaactcgaaacatgtcagaacgccttccgagtcatcgaagcgctctcttggtctgtttgaccagaaccgccctacatttgctcgttagtcgaaacagttttaatgcattcaactatgctgtttatcaagaactgatcttctgacattgcactatgtgtgcaaacgcccaccgtgatttgaatgtagctctcacccgaattgatactactcccaatcttcgccagacaatctctcgacctctttcatctcctacttctacatttgaacaagacgcatttcgtcgtcaacctagtgctcgggatagtgtagagagctttcgtagcgtgcctgcaccgtcatctcctaaccttcccgagactcatgacggccgatccatgagcttctccagcgcttcatctgtcaccagagcagaagttgtatcctccttacggcacaccccctccagatcctccacccatggtcaatacccttctggccctgtgtcgctgtatcctctatcatcttcatcttcgtctgtaggaggcatcaagagaccagcgacgggatcgattacccagatgactcgaaagtatacgaaagtgtaccctgctctgctttctcgagtagcagaggtcttccaagccaatatctttctttctgagcgggtaaaggatgggctggcgtacaatgacgcgttcaccggtcgagaggctgtggatcttatctgcgagattattcaaacaacagatcgaaatcttgcccttcttctcggtcgatcgctggattcccagaagttcttccacgatgtcacatacgatcatcggctcagggacaacgccaacgaactctatcagttcaagcagaaagcccttccgagctcgacttcctttccctcgacagccttccacccagaatctgaaaatcctcttgatgacgaagcttcggtcatcacacaggacggtccctggccatctcatcatgccaaacagttgacttcgctcacttcttcgtcaactatcattgagtcgtcatctggtctccattcgcctcacagccccaatttccgccgttcgatatcaacctcacaaagcaacgggttaccaccgtcacctaattctcatcctgttcccgaagaaaacaatttgcccacgggagtgcttgtgattcttttggactgctactctcccacctgcagcgataactccttatgctactcgagcatgtgtccacgtcgaacagaacaggctcaagcactcaatctaaagaatcagccggggttgcctgtcttgaagaagcaacccagtgtggaaagtttgaaggacgctgaaggatccggaggcgaattatgggctacatcggtgtcccaggccgtcttggactccgttagcgaaactgagagaaaacgacaagaggcgatcaacgagctcatcgctacagaacgacactttgtcaaagat

SEQ ID NO: 1598 - DNA, 3300 bp, Xanthophyllomyces dendrorhous
ttgtcaaagatctagaatacttgcgtgatgttagtgacttctgtgctattcgcctcatcccaggcaacatgctaacttctccttgattactaccttcgcctcaagttttggataaagcctcttagggtgtcagaggtcatccgaccagcggaaagaagagacccgttcgtcactcaggtgttctggaatatttccgccatccaaaacaacaacgccgctctctcagacgcattaacgaagcgacaacgagcgcagcctgtcatcgaaactattggtgacattcttcttcaacacattcctctgtttcaaccatttgttgagtacggtactcaccaggcttatggaaagctcgagttcgaacgggagaaagccgaaaatgctcagttcgtgaagtttgtagatgaggttgaacggaagccagaatcaagaaagatcgagttgaatgggttcttgacgaagcctactacgagattaggtcgttacccacttctcctcaaagccattctgaaggtcacggatgagaagaacccagaccaaaagtggatacctgaatcaatcactttgctggaaggctggttgaagagggttaacgctggagctgggaaaacgcagaatcgattggatctcgcccatctcgagcaacaactacgtggtgacaaagatctacctgtatgtacaagatataattggttgttctgtcggttcaaatatctgtctaggtatcagatgctcacgaagataccgttatcattttaaacagaaactccggttgttagatgaaaaccgagagttgattcataaaggtcaactaaagcgtcgtggcggagcccaaaatgagacggcagacttggatgtttaccttctggacaatatgatccttctcaccagaactaagtattcgaacaaagtggagaaaaccggtatctatcgaaaggttcgttagaacggtagcattttccttagtcaagcatatctgatattcttttttgttcaattatagccaataccacttcagctgcttgtgttggcaacccctgatgaacaatacaatctttcgaaacacggtatccgacccaaatctctactatctcgaacttccacaagcaaatccaccacatcgtcaacaagtgcaaaaccagagaaggagggaaaatatggttattcgatcactctcaccagtctaggaaaagacgcatattccgtcacgttgtggtcagagtcacatatccaacgcaaaaactggctggagaagattgatcaacaacagacgcttattcgggatcgacatcgcaaactagacactcaagttctggaaactgtgtttactggtcagctaaaggtcaactgtgctgccccctacggtacgctattttttcctcctcaacaatctttcgaataaatttctaaactgcttccacggacgggttgtttattgtaccagacgcggggcgtcggatgatctatggcacagataacggtgtttatttttcgaacttgacggaaccagaccgccccccagtgatggtccttcaactgatggatgtgacccaggttgatgtgctagaacaattccaactcctcatcgtactttcgggtaggtgccgttgtatagcaattatctgctcttagtttatccactaacttttcatgtaaatcttgtcatttgaagagcgatccgttcaaacctttcctctggattcactcgaccctaaagatccaacggctgctcttaagcgcggcaaacgaatatcatctcataccacattcttcaaagccggaatctgtgttgggaagatgcttgtctgcatcgtcaagtcgagtcctctctcaaccaccatcaaaattatggacccaattgaaactcctatacgtaaaaagcaacagggtgcggcgttcagcaagcttattcccagccggcacgatacgcttaaggtcttcaaagttagtacccgcttataccgttcgacttttcacccaattgttgactctttttacttttttctacaattctaataggagttctatattcccaccgagtcaagctccatccactttcttaaaaccaaactctgtgtgggatgcacaaaaggattcgagattgtcgatctggaaactcttgacacacagggcctcctggatccggatgacccgaatttggctcttgttcaccgagccttcaataatgctgcccggattccgaagcctattgccatctatcggatcgaaagcgacttcctgctttgctatgatggtaagcttcctgacgcagtctgatgctgattattctcttcgctgcaaatgatgtactcacaaagctactattgcttgttcgaatgaaatcttcttaattgctcggctgggtagattttgcgttctacgtaaataagaatggctggcgggttggacctccgagaaacaaatcggacagggaatggcgaatggactggcaaggatctccgacaaactttggtgagccaactgaaagtagttgaaaatatgtttgataacactcgaaggatgaataattgatttgctctcgaatttatgtgcgattttaaagctcttcactatccttatatcctcgcgttcgatccttcgttcgtcgaaattctggatgtgaacaccggtgctttccttcaagtcattcaaggaagtcatattcgtctcctattcacggatactcctccttcgacagtccactcagctgcccagcttcatcaacttcagctgcagcaacaacaacgtttggcttatggccgaggcggtacgccttataattcctctgatcatgcatccggctggcgacctcccccgcctcggttgcctcctcctcctcctgtcaatcctagaaacaagatcgtcttcaccattgatgacaaggtggtcgagattcaaccaatctctctccgatgaccaagacgatcttagtgtttcttttgttcttcatcgtttcactccaactctcctctatctgggaattaagcattattcattgtacacattgtcatgttgtttcaatatactattctaccaatcaagcctatgccttaggcatggtgacagtaatctcaaccgatggcagtcgatacatggcccttctggacttgagtgccctcagaccgcaaaccatcaagatatcaggaatgcgaccgaagtgttatatgcatgacacacatttctaagcttgtgttactaccgcaaactgtgcttcccttctgttttttgttgttgggattctggcagtcttaacatggtttagctgtattgcgctgtttcctccttgaggcaacatctttagat

SEQ ID NO: 1599 - DNA, 13381 bp, Xanthophyllomyces dendrorhous
tctttagatcttgcgcgagttctcgaatctttctcagagtcacaaaacctgctagctcttctccgttgtccctctttctcgatccatcccactgtggcgcctggatggtgagcatatgacgtctggaaagccagtggagactcggtcgggaacaggcgccagaataaaaagtccgttttcacctttgtgaagattattactgaaataaaagggtgaaaatggacttttcgctctggcacttgttcccaatcaagtcctcactggtttcctaaaccatatacacactacccaggtgtttcagtaaaatggattgagaaaccaggaaaacaggagggaacccgctagaaaatttatagctcttcggaaagagaggcttgggactccgcgcagaaggaggtcggaagatgatgtctcaagagttaataacaaaaaacagatgaaattgtgtcaagattgctaaagtcccaacaccttgtcaatcaaaacgattgttataagtgtgtttgaacggtttaacatcaacggtgaagtggccgagtggtctaaggcgctgtgttcaggttgaataacctagtttcgcagtcattcgtggcgcgagttcgaatctcgtcttcatcatgatatttttattttttgaagctgatacctatacttcatcttctctgattggcagtgaaggtgctagagtgcacaccatctaggtggttcaggagactgattaaagaaccagagaagagagatcagacagaaaacctcatatgttcaaacgcttttaatgattgattattccataagacggccaatctattacagctgagattatgtctcaactacttaatcccattttgatttggagctgctgagactagacccgagaattactaggatgacggacggacgggtgggtgttttaagttctcacaaactacctctctgattgaaatcatcgaagatctctctacttttttttcgatctgtttatcaatttccatacttttcacacttgagaacaaatgtgatggttgagcagaaaatgcacgcacctcaaccctgtctgaagcggatatctcttgacctacttcatcagatctcccacccacaagcactttcttgctccctcttgagtctcctccttacactcatctctctattcttgacatgtctgatgtaatgtcttggtctccttgatacacccatcttctacatgttgccgcgagaatcatagattctaggttgtagaccacttggactcataatatctcaaacaacagggcagaaaaaacatgcataaaataacatctaaagtaaagcagacgaggacactatttacacagtttaggagctgtcatcaagatagcagtagtcggcgtagttgacaggattaagcgcccagttgggcatggcgacggtggtaccgtttccagcaccgaataaagcgaacgtcgtaataaacacgaatacctgcattccagcatcgagagcggcagacatgatgtagttgtacctacagcaaattgagattacatcgaataacgggttaagcgggttctattctcgagaatgtcatttattctcaaggttataggatgaacgtactttcgaaaccaggtcggtcggtaaattcgtaaatatccttgagtaaggagggcctgaaaaagaaaatcactcggaggattaggctaaagctcgaagcataattcaactgtcaactcataaggactaacagtaacgacactcataaagatggtagagttgataccagctgctaagtaaccgagagtgtaacagaatagcggagtgatgaacaggtccattcggagcttaggatagtatcgatggatgatccacgggatgatcggcacaccaaagccaacgaggaccgacaacggaatcatatcgtatgttgatcctgggctgtacatgtcctgcaggaagcacaaaaacgcaagcagacagacaggcacatacagttagacgtttgaaacaatcaaagtagcaaaacagccagcgagggataagattggcggttcgattttaataggcaacgaaccttagcgagcgcaccccaagttacggcctgagagttaaatgactggacgttttgaccagacctacacaagagaaggaaaaaaataattcagtcgagttcctgattgacggcaactacttaagaaaagatgaagcgagcgattaagactgaccagatgttgtttcctgcggggtcaagaaggatatctcggtgggagccaatgatctgcttcgagataacgatctgcaatattcctcccagaacggtacctaaagactgaacccaaagcgtagttcggggaggaagctttgtgtattgggcaatcttgagatcggacgcgaaagcaattccctgagtagccgcatttgatccgtacaaaccaaagtacttgattcatcaagagtaaaaggtggcaacgaccagcagggtacgttaacggacaactagaaatgaacaggtctatagtgaacaacaatctcggaaggcttaccatattggcttgcgcattacctggaacgacagcggagccaagcatgagcaccaaggtctgaatactgacttgccaaccggtgatagccgggactagggttcaaatgtatcacgattatcgatcataactaaatgtgagtcaattgcaaactggagcataaacagtccaaataatttaaacgcacagattgagacgaagggaaagaggacgattgcaatgatgaaggcgacgatgactccgtaccaaggcaaatgtgagtgaccggtatctgtttcctcagaggttgccatgtcaaagtgatgaagaacagatgagaaagtgttaaaaaccatcgaagagatgacatggaagaaagttacgtacaacaagtggccatggccatcgcaaaggatgagactacgatagcaccgtacgcccacattggcacctccttgtactcaagcatcttcctgtagtgtgcatcatcggtcgatcgagaacggaaagcagtggcagcctccttaacgggttcccagtaccagagcaagcagtgagtgattgtggctccaattgacagattcaagccgagatagtatatagctgttatgactcgagactcaatcagtatctttcagtctaaccaagtgagaacatggtatgaacaacgtacccatcgaggtggcaaaccatggaagaccttgctcttcgagtaatgttcggttgagcgagtagtctgcgttgaggatcaaagactggtcgtatgaagaacctgaacagcacgtgaatgcacccatcattgtcaacacacgattcacaaataaaaattcggagggccagagaacataccattctcgtaaaacaagtcttgagccatgaaggggaagttctgagcctgccagacattacctgcgtatgcggtgagtagaagggtcgccgagacagcgactctgagttgccaaggggacaaaagtttcaacgaatggatagtgaattcagcgagtgacgagcagaaaataagacaggggaagaatacatgcagagattagacttaccctgcgtacaaactcatctgagtagccaaaggtgtgtatagcgaactagccccggaaagataagctgttttggagataatcatgtcagtttaaggaacgcattggtatacgactgagagcaagaatccttaccccagtcctattgttcgtcaaagcgaaccaagtcaataataataaaataaatagcgacagtatgtaccgatacgatgatctagaattaacttacaagacagacggagaacaacgccatgccttcgttgggataacttccgccaaagatccgagtcacccagacgctgtcacgcttagccagacagaagatcgatactcccgtcaaagtaggtgcgatgaattctgaagtagatttgaccatatacatgtcagactgagcaagtgaggaccgaagaagcccaatggtgaaaactaacctgggaaccattcccaaataaagattccgagggcaacgagcaagaagaacttcattcgctttcgctgaccagcaatatccttatcgttgtgtaacagttggaagagctgcacagtggggatagtggctggccagacggcatatgacgggtaaacctgattgagagaagcatcgcaacagatcactcggaatttagcagtgaaagaacagatcatagatgattgagacaccgatttacggtgcggagttgagaaaccggacttaccactactgctcgcatgagtccggcctgcaagaaacaaaacgtcagcgttcgtattgaacatcctgagaacaaacgtgaatggataaaacttacgataccatatcccaggaactgagaagcaatcagcgtaaagatcgagatcccgtagttggggttaagatcgtagtagactgcagagaaagaacaattttatgtttggtcgaaggtgaacgcgcatgatctacaattaaatcaactcacgctcatcagcagcgaacacagagattgcctgagcactgctaaaagcagttgtactcatgataagagtgctgagaaagtcggaaggtttgtgtagctttagtagggcgcacacgtgaagaacaagacgtaagaagagtgtgcgtacgcggtgtgctccttcaagttgaattcgcacgggtttatgaacgtccaaatcggtcgtcggtactcggtagggaaaaacctttgtgtaagacgctcgagcgcgttaaataacatataccatagtcgtccgagcatgtcggcaatgacaacgataaagagcgaggagacggtcaaagatgaaggcctaattgtgacgcaggaaatacaactattagtttcataggtacgttcactttggaacgcaagctgaaccctacctgaagtagaagatctgtccgaggaccgcggcgaaggaggtgagaccgagtcctaatgaagcatgtgatagaaaatactgagttccggccggttgatggacagatatgaagagacattgttgtgaacataccaagcacatacatccgtaacgtatggattggcatgttaacatcgtcgacggtagcaataagtcgagtactaaaatcgacggccgtcttcagaaagagagtaattgattcagctcggagtttcgtcagctactgtgtcttctttcttcttttcccttcagaaacatggggcttacttcgatgggcctctcctgaccgttactgagcagattggcaggatcaagctcatcaactcctagcgctgaaggatcgatggccttcctctcgtggtagtgagcgtcgttgttcctctccaatggaaccttcttgtccagtcccactccagagagttcatgctcctcttcttcctcgtcatctttgcttccgggtgaattctttaatgaaggggtcgtatcgattggggcatgaatagaatcctgtctcttgaagggctttctcagttgagacaacattttggcataaattttcaggcagtcaatctggccctgattagtgatgagtgggtgatcaagaaaggcgtgaagaggaagaagaaaggagcagagaaaaattaaccatggtctttcaagggtttcgacgactcatctctcatcatcaatttggacgaaaaaatatcgggtgtcagataaatcggccaatcagataaatcgataggccgagcgcgcggtcaataaatttcaatcaaaccgcacaaaccttatgaacggcgtcccgccgtaatgtgctgggtttatacactccctttcaagggcttgcgtgtttttttttttgtttacttccccgaaccggacaaattgaaagggttgttctgatatctgagtatgccgattaaggctgaggatcgacacctcattaacaaagcctcagcaaccttccataaagtcgagaagatgaccatccaggaatagaaaagaagaggagaccacaaattatccgtcctcgaatcggaagagaaaaaaatctgatggtctactgaagttcggctcggccccatacgcgtcccttcgttcttccggctcagtcaggaggagcattggtttactgatgagacattgtggtgctctgaaactccatcttctgctccacttaaggtggtgttcgcccccagaagcaattttgattggctgtgaaggactcgttaccgagcatctttgactatcgatatatatgaaccatcggagatagtatcatcctataggtgtgtggtatggatgtcacaaatgattgctcgtcagtcataacgaaggtcttcagtgtatcctatctggataccatagtgatcgtactactctcactctttctcattcctttgagccaacacttttcttgttttactcttcttgtggtaactacaagagtagttatcgtccatgcgacatgagatttatgtggttacgtttatcacgcaccgcgtgacacgtgattgagctcacatatcgtgcgattaactgtgaacgatctagtttgctatccacacttacacctccagttcaaagaaacacttgtctgtttttcttgaatccttcccttctctgaagtctcttctatacagacagaaggactagcacatgctgtggaaagcaaggcagtcaagggtcttgcctacattctccctccgtatgtgtctatctgccttgggggtttgttatttgtctggctttcattcacctgaatgttctgctctcgaccgtgtctcgttctcatagccatatcaaagcaacccttttctatcactgtctgtcgtcctgctatttctcggagcgagccttgggtattgtcccgtccatcaaatctatctcttcgtctcgagtgttcgtcgatctatatctccaactcagcctgaacttatttctcatattctcgatcatgtgtctaatctcatactctcctctcacaatccaccattcataacgaccatatagcattggtattcacccgcccatccttcaatcgctgtagactgagcaggtccgcttcttcctcgccctcttttcatataccagtttcggaacaacttccagtcaatactggacgtgtctatggacaggccctcttgtccggtgatcgtgcgtatgtttctcagttatcggtggcccaagaaggacatcacttgatatgtttaggcacataaagaattgtccttctgtttgctaatgtattttttgggcaacacttcagcggccgctccttttcgtaagaacccagttggaatccaattgctgagtgcctacacgcggcggcaagtctgcccgaatccttccctgcccgacgtcaacccagaaaatattaatattgcccgaggtaacttgacgaaaaaaggtctccttagtaaactgcctgagccccaagaacccattaacatcgatttacccaagctacaagggcaaaacattgccgagcacttccataatttgggtgtagaggtcagtgcagatcaataggtgaagcgttagtcgcagtgtcaggctagctttctaactgttgttctgatccttttggattgtcattaactggaatacagcaatcagaaccgtttctttctctcgccgaaacgctctctcaatcaactgtacttgccgttccatcgcattttccagtcgtttcaggatggtccaagtacgatgcagagaaaaacacttggtcgcaagtctcgtatccagagggagagcatatgctggtgtttgatgtggaggttctctataagatacacccttaccctgttttggccaccgctgtatctcccaccgcatggtactcatggatctcgccatggcttcttcaggagtctgagaagaaggagcatcttatctctctcggtccgcacacaacgccaagggtgatagttggccacaacatcagttatgatcgggcaaggatattggaggagtatcaactccgaggtagccagaaccgatttctcgacactatgagtcttcattgtgcctctcaaggtgtatcggccccgcaacgtggtctctggaagcagcatcagtccagggtggccaccgagaacaccgctcggaaggagagaagagagtggttggtcaaaacgatcaaagaaactgaggaaagaatcgcaaacggggagatagtaggcgtagttgagcacgaaccagcgttggaaggagctgagcagtttttggcaactcctgtagaaggaacagtcaaggaaaccctaaatctgccacagttcctggctgagcttcggttcgaactcgatgatgctcctatccccgctagtacatctaccggacagaggctctctccagaggctctcggcgattcatctgaggaggacggttctctctcgcatggctggcaggatgtaacctcgatgaacgcgcttgaccaagtgttcaaacttcactttcccgacgagtctatggacaaagaccaaagagcagctttctcttcgactgatcctcaaacgatccgagacaatcttcaggccctgattcgctactgtgctacagatgtgcacgcgactcaacgaatctttaacatcgctttccctcgattcagacggctctgtccatcgcctgtgtccttcgctggccagctcatcatgggcagctccttccttcctatcaataagacatggtcaagctatatcataaactctgatgccaaatggtccgagttggacatgaaagtcaaattccagcttgctgctttggcagaggagtctagggaacaatggatcgagccacctgaagattggactcctggattactgaccctggagactgcccgcgctctttcttgtccgaaagaatttcagaatgacccggatctatcgcaactagattggactcctcgccctgctaagcacatccggtggagagccctcgctctaaaacaagctcttcttgaggatgagaagataaatggcgaatatctaggcgagctgggtgaagactctatcagcgttgccacgacaatcgaatcaccacctggtgttcaaaagcgcacaaggaagagaatcatagacgggcggaccatgcctgatggcgtcgatagccttcgccgaagcaaatttattcccagactgctcggtttgacttatcacaacaaaccgattcattactcggaagagcatgggtttgtgtacgaaattgaagagaccaaagacaccaacaccgaatccactgaaatagattccagtgagccacttatcttcaaccatcccaacaaggatgtctatttttccaaaagagtctctcaaggggcagtcttccgacagatgccaagctcaggaaaaaaagcgactagtattctagggattacgtcaatgcggtcttcggcgatgtctagcgcgcttcatggaaccgatggggcggagaaggtcctagaggccctagacagtaaagccagatgggaaaccgtaaggaagaccttgatagcagcgttggattcgagaggagtagacgtcgtcgactatgatcgtatgtatctcctctctctatacctccagttcactactcatatactcatatcagcgcaatatgacctgcttgttctcttctttgtttaatgaagccatggtcaaccttccggagtttgatcccgctcaagcgatttacgatgttgaaagtacgttatgctcttttccttaatacaatactagattagttgagcatgcgttctaacgtttgtaaccggggaatatcatttataacctcctttgatattctctttcaattttaatagccggggctaaacagcgagaacaagcattcaaagcggaagaggaggatggtgatgaagaagttgtcgtcaccaacgaagatctccatatcccaccttcggcttccgctcttaacgccaactggtggccagcttggtactggaaactctttgttccaaaacaaggaaagccgtcgaacaatatgaacatcaccgtccgtagtcaaatcgcctcgcatatgcttcgacttagttggaagaagcatgcactatatcggtcaaaggagcacggatgggtctatcgagtccctaacgatggaactattccggaagatgatccgatgagaggtcgtgcattgtatttctccgctggcgagtcagcctactaccagcaaagagcggacgaagaggcccggattgccgagaacagaccgtacaagacgacggccgtcatcaacccagacgtcgctctgtacgaaattactcgagcgaccaaagaccttttcttcaaagttccccatcctcaaggagaaacccatcgacttggccgattaatcactaaaggctcggctaagtttttcgaggatgagacgctgacgagtgaccttgcattggcgaaggaggccattcagatggacatggcttgtagttattggatcagcgtgagagagcgagtgaaagaacaactagcgatcaaggagtcggacgacgtaccgatggggttcccactggagacgaaggacaacccagatgagctaggaatgattataccacagatggtagtgatgggaactgtgacgcgacgagcagtagagaagacatggctggtgagtgagcttgtgactatatatagagcttgtcgccgagattgatttctgatgtctttacttgctcctatcttagactgcttctaatgccaagaaaaataggattggttctgagctcaaggctatggtccaagctcctcccggctactcaatagtcggagccgatgttgattccgaagagctttggatagcaagtttgctaggagacgctcaactcggtttgcacggtgggtcccccattggatggatgactcttgaaggtaccaaatcgcagggcacggacgtccactcaaaaaccgcgttcattgtcaacgttacccgagatggagcgaaagtatttaactattcccgaatctatggtgctgggatcaagcatgcaactcgtttgctcatggaaggtcaagccgttcaggacgaagaagccgcaacgaaagcggccgaagctttatacgcatccaccaaagggttacgggttgcgtttaataacgccgactttcaccgattctggtttggtggaacggagagctacttattcaactcaattgaaagtgttgctcgaagtaagctccctcaaactccggctctcaagtgtggtatcactgccgctctgcgtggagcgtttttggaaaaaccgtcagatcacatgacatcccgaatcaattgggtggttcaatcttctggagtcgattatcttcacttgctcattgtcgctgtcaaccatatctgtgctcattacaacatcgatgctcgctttctaatttctgtgcatgatgaaattcgatacttggtgaaggacgaagataaataccgagcgacttatgccctccaggttgccaacctgtggacgagaatgctttttgccttccagtgtggaatggaggatcttccccaaggttgcgcctttttctcagcggtcgatgttgacaaggtcctgcgcaaggaggtcgacatgccctgcgttaccccttcaaatcctatacctataccttcaggagaggcactccatatcactaagactttggagcttacaaatgggagtcttcatgcagatggacagcctatgtcgatatggccctccccgccgtcgtctcttccgagccctgtgcctattcctgacaggccatacgttcaacctgtctctagagttaagaatcaggattctatctggaaatcattctatgttaacagtcaggcctgtgagagcgaagaagaagtctacgatctctggcagcgaatgggctcgccgatcgatcctgtcaaagtccaactagaacgcgctttccggacgacacggaacacggccggcccaaaaaactcagatagttctgattggaatcgtagaacggcgttctcaaagagctccaaaggaaatttctctaattggaagcggaacgctccgtctttctcgggatcgaagcctgccacgccaagtccccctttgcggctggtccgcgagactcgttcggagcaggatatcttgatggaaggatatgactactggatctctacccagaagagctatgccaatccttcagcttcgccactgccactatcatcctcagagtcgtcatcggcatcagcgacactcaaaccccctctgatgtcttttgccaatcgacagcgaaaaccatcatctgccgagtatgcggcggcaaattcgaaacgatcatgtagccaacgaaacgggggttggaaagaataatcctctgtctttcacggcctggttaagtgaaaagaaaaagaccctgatcttgctcacatgggatatatctgatagcatcttgcctcatgctcttctccatctttctttacaattttttatctttgccatgctccgcgtttcgctatcaaaagtatataggtatcattgtcggctccgttgtttacataagtattctttgatcattaacgatagggggttttggattttgactgtttatgtttgacccattcattgtatatgtattagcttttccttctttcttgatcttacaggatgtctgaccctcataggtctctatatatggaatttcaatgccaattctttaatcgttctttacgagagtgtcctgcctgatagttgtttgcttatcgataggaatttccattgacggagaaacccgaaggagaactatgggattgttcgtttatataactcatctatttccatgtattcagcccacccgattgtctctataactcttgtttctctccgccttcctcaagcgacgatcacgcacgcatatatctacctacataatgacttctactacaaagcaaccgctggagattctactagttggcttcggagcggtaggcgtagtgtacgcttacatgtttgaaaaggtatggcaatcatccatcttttcttttcttttcttaccgattttctttttcttcgtttcgttgaatgctgacaacagtagcttatcctgatctatggctcgttctcgtcttttagagtgctcaagctaaggtcacagctgtagctcggtcaaactttgagttgattaaccagaaaggaatccatatcgagtcaccgtcgaaatttggatcaatccctggctggaaaccttctcgatgtatgttttatcaaacatcttcgcatatccagcatcactggagaagctttaaaacaatctgcttggtctttaaatagtggtccattcggtagaagatgcgttggacagagagtatgattacgtagtagtcactacaaagtctttacccgatgtctatccggtcgaacggatattggaaccgatcatcaaggcccgaaaaacgaagacgtttgtgttgatccaggtgagtagttcccttagtatacaaacaaaatttgatgtttctgatgacttc

SEQ ID NO: 1600 - DNA, 15933 bp, Xanthophyllomyces dendrorhous
tcatatcttgccttgtcgagaaagaacggactgggtatcgaggaagggctctatgctgcttctagagagatcgatgcgaccatccttacctcagtttgctacatttcgacaaagtgagaagcaaaccctgcatctgctctttctgaatacccgccatgaatcatattttcatcttcctactaaatcttcgttctctgcctttttccttcttaccctacatcagtcttcacaataatcgagacgaagttttatttgagaacacagagcgtttggagattggagtctaccacccaccttcgatcgaccggccgtcggccgagtcgtacaaagcgccatcgtcgaccgagtctcagctcgcggatctgaacagatttgtggagatgcttaaatcaggcgaaggaaatgtcaagatcgaggacgatatggagctcatccggttcaagaaggtcaggtcgtttgtctcctgcaggtgttggaccgatcttcgattccttaaattctgattctggttggctttcttgtctgatttgatttaaaataaaaaaaaataaaaaataaaaacagaacgtatggaactgttgctgggcaagtttagcttgtttggcccgtgctcctcttatggatttcattggggagaacgagatcgacttgatcggaccttctgtgctagaatttgtcagttctttcttttcctatcacatgtttcttccttttatttctcggtaactttgtgttgattacgcaaatctacatttatacgaattctgagtagtgtaacgaagtcgccgctatcggatacaaggcaaggttgcctctgccagaaaactttggacagttcatctacgatggcacggtatcgttccgtcgagagaagggaggaaagcacaagccttcggcgcttgtcgatctagagaccggccgacctctcgaaattgaggtcaccgtaggaaacgtgttgaaaatggctcgacgattgaacatcaaagatgaggagatcaagattctcagattagtttatggtctgggcagagttttgcagaagaaagctctagagaattagctagttttcacaggaatgctagggaagatgtagaatgaagtgcaatttgatgtttttctccctatctgatattttggatttaagctcttgtgcaattctatatgacccactccagatagaatatacctggctgtggaaaatgactggaggcgagaaaacaaaagtgaatatgataaaaagaaaacgaagtagacaggattcgaacctgcgcgcccatagggcacttcctggacttgctaatatagcagggaagcatcgtaaccacttgattactactcctttgatgtttatctagcctcgggcagccataaaatctcgctggcatctgtctctcgtcgaggacactgaccatacagtaaagccgacgggcgagaacggcaccctttcgttctggcgcttgttcccggcccagtccccactggcttgccaaaccatatgcgcaccaaccaggtgtcacagtgagatggatcgagaaagaagaagaaccgggaggagctagcaggtctggtgactgcacggagagaaatgcttggggtctggcgcaagatctgagggtgttgcctcgaagaagaacatggcagatcacaaccgaagccatgtcaagacggccaaaatgatgatgtcttcacccggccatcaatcaagtcagggagtcctttgtgctggtcaatctggaaggttcacttggactcaattctaatcctctcaatgtcgagttctttcaacaactgattcctgaatcctctaatttatccaaacgagtatacacaccaacaaaagatgtagatgagatgttcgagagaaccagaaagggatacatggaaaccctagctactgtttgaaagagatcacaaaagatgacaaggcaagagaaaagaatagaaaagatagaccagtttcgtccttagtcacctagactgttacatctgagacctttcctcgctttcttttcttcttccaaatactacaagtctccctccgacttctagttttgcctttaatctcatctctcgctatctctacaactcacagggcttctcaagctatcctttctctcgcctgttacgcttgtctccgttccgctttaaatttcaagacctcccctcgataattttctgtctttctcatatcttttcgggtttgttttctcacaccggagcggtgtctcatcattcggactcataaataatctgaacgtctcatgtttctctcagagcagagctcctatctcaacgtcagtaatcatccgcaggttcgagttccgacgacgcgaacactcatctcttggaccttttctcagaggagaatgaaatcaaactgctacctatggcttatgttgtttattctgggatcacaaacagttgtatgtacatcagacaagatgattataggcatgaatacccacaaaggagagcagttaccccaaggtagagtggtcacgtcatctgaggaagcagcgtctcacggtttgcgagcgttgtacctctacgagtccggaatggtattgatatcgataaaagacaaactggcttattctatatggcccgatggccacaaaagggacaacggcgcggtggcgtggcatcattcgggatctctgtctgcaggacgaatcaacgggatgttcgagagcgagaacgacgtgaacactgtacgaaccacaagcgcgccaaaacatgatggtaaatctcagcatgacaacgcgcaaagcccaaagcgacgtcacaaatggcttgcaggcaaaactgttggtgcgggaccttctataaaggtagtaccgacgtgtagcgtcgattgtgacgcgctgagtatacaggggacgagcgtgggtgcgcacgactatatacgaacaagcacaatgtccataacagctcgttctcaagccatggacgatgaagggctgtgtaccgtagaattgtgtcaacagcaggagtcgctgacgatgtcgctaggcatgatccatgatgattccgcagaccatacacatacggccggagagtcttcgagcactgctggagataactatccactctacggcgcggtaagctcgacaaacaagatgaacagcttcattataagagtcatataaaggcagcacaggtagatgtcagggatgtaatttgagttacacatgatctataagtcctccacttgtataactttctcgctctgatatttcaacgcgctatacttacagcgcattcaatcggtattcgtagggtctgagaatcataaataagccggacgttctcgataacttgcagatgaaacgccaaagcctggattctttgttaccttctacttctttccttcctcgttctcctatccttgtttcctagcgattctataaatcttgtttctctattacaaaagccttctcttcctcatgaaaacctaagactccttatcccatgacctaagaggtttgggtggtttgtggtctgaaaacgcgccggttgaaaagagtcacgtatcaatcgtcatcggtagcagccaaagccatacaatctctgattctagtcaagtacccaaagcggacagaatcgctgcctgctacagacatttgttgctctctgaacgttcactgttctcccatgaggaccatcaggcttctactgatctgttcaacagccgttttgacgcgcgctcgctcctgaggtttgtctgggacgcgcgcaagaaatctggtgaacttgtctgggtgatacctgtatcaagaaatcatcggactcaacaagccaggattggttcaaatctctagaacgagagatgaagaaagataggagaagatctagaatttgatacggaccgacgaatcccttccctcaaaatgtctttcctctttctttttcgctcgtcctccgtcaggcccttccagccgacctggccgcccaacagaaattctcgcacagattcttcaatccagccttcatcatctcccccgatgcctaagtttttcccactcttgagatgaaacatcggccacgggatctccttgaatctaagtgggggagcatctgtccctatggaatctgggctactctcgagcaacatcttcttccaccgatcgtcatattgcgcccgttgagtctcttttaacacggccgcctcttcgtcgcgaacgtatctccatttttcgaattctttgattcgcgctcgttccaaccgatcgttctccacccgggttcgttccagtcgagcagccgtcgcggctgcttctcttgcgagagcttcctgacgctgccatgcgcccgaacgctcggcttgtcgacgagagattcctgatcggatgctggatccagtttccgtatatgtaagtagtggatatcagtggctcttccgatgcagtagggttacactttaaccccatgtaagacacacctttcaacccactcttcttcgcccatcaactctgtcacaagatcgccttgatcccacaagttgtcgctctctctaccttgccacctctttgggattcttgtttgaccaccgaaagcctcgtccccccatccaagacctgttccatatcctccgcctatctcccagtcccagagagatgaagctggtccctcgtcctgagcttctaaatcacgcagatgagcatcgaacgtttcttgaaatgcatcgggaccagaattagaggtatgatacgacgaggaagaaggagatgaacccgatcggtgtggtctagaacttctactctggcgaggaggagatgttgagtcgggtcggtatggacgaggaggagatgctggatagggatgggagggatcaagtgttggcgaaggcttctgttttcgagctcttctgagagcctttctatatgccttttcttctcgcttggctctctctttagctgaatctttccttgaagtacattaagacaatatgttagatgaagagacgattgtaaacatcaaacgcatacttacagattaagctttgttgcgtaggctgcagagctcgacgatgacatgctgatggtagtgaggatgacgatgatggtgggcacgtgattcatggtgatttggtggttcgtggtttgagagcgcccaagccaaaaaggatcacgtcgtggttgctttcgagtaaccaaagccatacaatctttgtttgtagtatagattcttaacctacactcacatctgattcgatggccgcagatagacagtcgtccgacgagttctctcaaggtcctccttcgaacctcacgagaaggcctcaatcatgcgcaaagtgtcgacaagaaggtcgaccgcctattctcagagcagattgtagggttcacaaaaggcaattgaagaaggaacacatgaatcatactttggctggacctggaggagcgggaagacgaccgggtttaagattcttaggtatgttcttgatcaagaatccttcgtagatagtctttatttcgcacgagttcggctgttacacctatcattctgagtatctgcttttgatcttacagagaacacaacatacacaaccttaatggcacccgccaactctgcctcatcctcgacccaatcagtgatccatccgctattatctactcaaaccggcggtccctcaactgaccgatcatcatcaagcttttatcttcatgatcccaggaatatgccgatggagtcgctcgaacgtacacccatgggcgccgagtcagccgaaggggcaaacgtcgatgatggcctcgtcagacgcgcatacactgaacagaacgacctctcccttggttcagatggccattctactcagagggacgatctcgagatggatgacggagggatgatggacggatccggcgatgagaagggcccaggaggaaaacgcctttcattaacgcaggccagaggttcgtttgagaattggcctctctgtgatcccgcgcgttacgtattgacatgtgtcttcgactgtatatgctcgacgcgtcgggcgtgtgaatagccaaggcttggagtactcctctagcagctgaggaatcccgtgctaagatgttcagcagccgttggagtcgagtggaaaattctgttcgtatattcctttctctatgattatgccgacctggtcttgatggatcttattcttgtttctgcgtatgggctttgcaggccatcgcccttgggcagtcgaccggtgcctacgttgctctgctcgcctggaggtgagtttcttcttctggtttctattttcattcgtggtccaagtgaatccaatgcttcgggaagcttctagtactagtcgctgaaagcgcttccaaccattctcttatcctctcaaatgaatagagacgacagggtccaaagcaatactcctacagcgacacacaagacgtttttgccaaaatcccacttcagtcaatcccttcaatcacttcctgacggaacgtccgcccgaatctatgatcactttgtgaacctcgtccgggagactcatccaaggttcatcgaggcccaacttgaatccgtccgtcgggaggcggaggagaaggtcttccagatggaagagagagcgagaatggagagagaggagcaggataggaaggtgaaagagttggaaagacgattggaggagtatcaaaaagcaggcacggtcgttgcttcgtcagcggcgacaggatcaagtaggcaggctgctgcttcagatacagtaacagccacgggcatcgtcgatgacaaggagaccgtcttaatctcagatgattcatgagtgttctctcttcctcttttttttgtcgcttgtacctcattgcgatagtcattatttattcgctctatacgatgtactgtcgttttttcaagacattgactaagtccccggaaaaaatctatacatgtttctgtaccatactgatgaaaacgtgtccaatcgactaataaataagatcaacttttcgaaggacaatcaatacaaaatcgaattcatctaaagatcaagccaaggtgttcttagaggatttctcctttttctctttcttcgctttcttctcttttttttccttctttctcagcaaaatgaaaccatctcccaagtcatctccggaagctgccacagtctctttaagcactggctcctccttctcctcaaccgccgactttggctttttccttggaatttcctccgacgaggtcgagatggaccctagcacagaagatgatgatggctctggaacacctgcgaatagccgatcgatctcgtccatctcttccggccgagtcgctttatctcgtttgcgtttcttgtcctttttgtccgccgagagagaggaggaagcaggaacgaccggcgtcgaggttgacgcaacgggagcgatgggttgaacaactggaacaatgggtttcacagaggctgcaagattagtagcggcgggcgtaggtcgaggagcagccgtctgttgggcgagccattcgtcctctcgtcgcttgaagaaaccaatattgacttttcgagcaaagaatcgaccatattgagaggaagacaaggtaatctcaaacggaacaagggttcgagcaattttggtctttaggaagccatcgcagtgcgcccaaagtttttctcctacacgagagccaacgcggtcatctacgagtccgtagaaattaccgaggaatgcaagaatcaccttccgtgagctcttgaagggaacagtgggtgaatcaacaatgacgtccaggaggcgagatgagatcggactgtgcgctattttgagtaaataatcgattggttgagctaaaagactattcaaatccaggcaaggaagcaagaaaatcaacgtcgaggttacgaaagacaaagacaaaaaacacttacctagagataacggtctcgttctcttgactaggcaatcgaagcaaactctgcaagatcagcgacccctgaatattcggtcccagcggatcagccgtctccgctacttttttcaaatgccctagccgcctcttagcctgtagagcctcttcttctgtcatctcaggctcagcctctagcctaggctcgggttctttccatcgatcttcctcttcctcctcctcgacttcatcagcttcttctccttcgggtgcagggattccagcggcttttcggtagcgcttcaaaggcttaagagtcaggacgcagggaacgaggaaactctcatctcgcggtcgctgtatctcgaacgattgacaaaccgtgtcgagcaccttgtctccaaggacttggagatcggcagcccggtcaatgaccgctttgatcacgcccgttctcgctcgcatgacagctcgtctccagtctcctttgacctcgtccaatagacttgctagctcttgttctcccaatctcgtcaccgccttagcaacgacaaagttggcaaccggatgaacacccaactttcccattctgccgacgaaataagtgctccagatagaggaaaatactggatcaggtgcaacgcgaaggagaagctcgaacagatgagaacccgtggcgtctcgaagcaggagctcgaggtaatcggatcgagaaggtgcttctgatgattcgtctgttgaatagatcgggaaaagctgtaagcaaaagggtcgaaactagaacagtaaaaacggcacgtacgcagtgttgtgatcaatccggacagagcagtgtccatcaaagagcctttctcattcgatgcgcccccctgagcttcaagttcaatcaacatctgaattaccgggccagcaacctggccaactcctagcgccctgatttcaacctcgccaacttttcctcggatagcaccccagaactctgtaatcaaactgttgaaactatcagggaccgctcgaagggttccttctggtgcgtcggcaccggtctcttcatcgttctgaacgaacgctttgaagttagcgttagactttgcgaatttggtggatcgtttggaacggatcgcggaggattgggaggagggaccgccagcggtatgagctgaggggataggtcggcctgtaagtagcagaaggagtactctgatggggtgagaagagaagggtgattggatcaaagtcgggagtaaaggaagaagctcttgagcgatgtcgtgaatctgagaagacattctgggaagaacgccttcggacgggtcggcggtttgttcttgagaagggaagacgttacgacactgcagatgattcaagttgaacaagaaaaattagttcatactgattggctttgtaaaagaatatatgtacggatacagaactccgtacctctcggtcgatcgtcaatgctcctaaggtaaacagcgtctgaacaacatgacttccaaatctatgttggatcaacttggcgtagctaaaaccatcattggaaatcaaattcaaattagagaaacgatactcgtaagtgaaggtttcgcgggaggtttgaataaaagcaaaagcactcactttcccatcagactatcggcaaacacccttcgaccaaagtcacccatgttccagatcattcgctcgagaacgagagcacaatctgtatcagtagcgagttgaagctcccttgatcgaagctcagacaatgcagcggtaaggagcaaatggcgatctaagatttaggtaagaacagaaagattttggttcagttgatcgaatcggtcggccaggctgattcaactatactcaccctcattctcttcgtcggcgtcttctccttgaggaagcccaaggtcttcaaacactttgagcttatcatctactgtcttgaagtatgatttaacctgtttacgacggtgaccaatcatgcgcaaatgttcccaaaccaagcgaattgtcaggctacatggattgacaaggaatattcaaagagaaagataggacatacctctggatcaacaaatccccagggggcgtccccttcgattcgctctcggatagatcccagccctccatcagagggtgtaacccaatcggcttctccaccgaacatgtttcctattcgtcggccagagggagcattgtcttgggagatctggttagattcctcggtgggctgctcaacatcttgttgctctagcggaacgaacgatggggcaggcgtaggctcaaacgccttcggaatcacatcatccgtcgtgttcttagcctttctctttcctctctttctaacgagctcctttggcatggcagattgttcttgtggaagtgttgaatgagtgtgagcgaggattggagaaaaacaggagtcaagcgataatagaggaaatctcaaatttcctgaatcgaaagctgtgcaaatcattagacgcgtctctattatatttcgttggaaatctctctaatatagtaggagtaaactgtattgtgtgttctgtattgaattcctatcagcgttccgtacgttcatttgatcatctccttcctcgtccagacaggtccatctcttcgttgatctgatcgactcacctccatccacagattgcatctttacctctcatggcattcctaaccgctcaacaacaaaatatggcgtctcaagcaactaccccgctcagtacccacccacctcaaacatcctactttcttccgcatatcacaacctcagcttcggcctcagccgcacaggtggcgggattgcagcatccgctcgcgttcaaggaatctgaagtgatcacgatcgattggaaactgacaaacttgaaggctttgtttgagacaagcagaggtgatagtaaatctagggtagtcaagagtgtccttttcggaggagctaggtggcagcttttgtacgtcctgcccatatattgtctcaaatcgccgtatgccagctgactcgcgaccctacaccagattttacccaaatgttggtcaccttcaatcatattcacaaagcaattgagatcgcctctgtaattcaatgcttttatctttcgtattaggctggtggaggttctcaagactggtgctctctgtatctctcttgtgaacctactcttgacggtcagttctgttcaactcttgctgtcaactttgatgttctcgcaactcacctttttgcaaaatccaaaccttagagtatgacgaaggcccacctccaccaacggcatccacttttggacagacacataccagtgcgcaatcaaatggcgcaggaaagtcttggtctcgaaaaggagtttaccaattcaagttcgcgatctgttctgacgaaggaaaggtaatatgtgtcagggaggcaggtgcatatagcttttctactctttgaccgtcgacaaagccataagatggcatgcgcgctgaaacgttcaagccgcttgcctttttacaaaacaacaaaattaagctgcggaacacgtaaggttactctgtatcatctcaaaaaatctatgtttgactgctttgttgaacccaaccctatgacttaaatgaatattctcattttcatcccaaatatagacgttctcaagcaagaccgctagtaagtcaagacttcaagtctgcatgaccacttcagagtgggtagcgctgaccaactttcactgttttgactctctcaagactggggggtttgttttatcctctcactacgtcccttcgctactttctcattgattcagagaacctgatgtggtatatgtgtctttcggaaacagtgggctcaatatgctaagcgtgatgtcgtatactatagtacgcacacgtcttaatgaacaggttcttcgaggtgtcattcacttcactgacaagatcagttgtctttgtactgccactataatagatcaacctcaagtaaaatctgcagatacgttcctgatcacctgtagcatatccaccgttcctgcgcctcccaaaccaccaagtactattccgaaacgaaatgttcctcaaagtcttttgctggttcgtttttagagtctttcgttcaggatctgcttaaacaagaattctcttgttcttgttgttaatcatgaacaaaccggtcttcttgctattctcccttcgcttcgatagtcggtgggacgaatgttaaatgatccgatctacagtgatgtcagtcatcacatgtcaatttatcttttgatttgaatggtgcatctctgattgtatcctttccgatcctttgaactatatacaggtcgagtttattcttccttcgagagatagatattcaggactcaaagagaagcgaaaggtgatctatgccaatcggacactattgaatagatcagatgtacgtttctacaccacttctcgttcgcaagccgagttcacccgtgaatcatctatgacattcaagctgacagcccaagagttgtatcaaacagtactttgaaacgatgctctcttcaggcttcatggaagggttcaatcaagaagaagaagaatcgtccgtgcatgggagtcagactgaaaccgaatcacatgtgaacactttttgcctgctccttcttgcccctgttgccagggctaactctgtgttttcgggtctttgttcaatatattacgacagtctgaattcttagatccaccatttctggaggattctgattcatcagatttgtcgtctgatgaagaagaggagctggagaatgagcctcatggatttacccaagaactctctgcagtggcatcaccgtcctcttccccttttgctttctcaactatcgcggcgcgcatgacgagcgactcggatcagccagcgcatgctgataggtcggttccagagggtgaagggctcgaagaagctgcaaagttgaacccgcatctagatggattagtcgaaggagagggcttatcaaagaaggaaggtctggtagattcaacgaacaaaagcactcatacgaagaagcgtgagcgatcgaaggataaggaaagggcggggcatattcttcctgggcctcggaagcgtagagtaatcgttcgagttgagttctgttccttttgcacgtacatacgaggtgttcaaacgttttatctgacgcgctgtttgtgtaatgcatctgaccattcgaaattactgcatgctaggacgcatcctacccgactttctatgctctcttatactatctgtacactgatagtatcgcattcgcccctttgacctcctcattcattcctttatcagctgtaaccaatcatgttgacacgtcaggagctaccgtgggttctgcctcatccgaatctcatccaagtaagctaagacgtctgtggatagaagattggtcgaagatgaacccagagagaccagagccagtgagcccgaaaagtatgtatgtcctggcagacaagattgggctggaagaactcaaaagtttaagcttcgaacgtaagttgccacctagttgatttcaccttagacaaatgtgttctgaataatgacaaaatatttcttcttccctgctactctctcgttcatgtgccaaccatagacataatcttgaatctcacggtccagaacatcccgcacgagtgcttctccgccttttcagcctcattcgacgatgtgcgaaagacacaagtggctttcttcctgaaggtccgtatatatccatatcggttttcaaaaaattgtctactatgttcattctttcttcaaatcaaattccgaaatgtcactcgcctgatcagaactgggctgaaatcaagcgaacgaatgggatgaaaattgtttgggattcattacggtctgggaaacatctagggttcgaagaaggtctgtacaagaggcttgaagatttgccttttatgattctcttctcaagacgctgtctaattttttttgtaatctgcttttcacctttacagtctggcccttgatcgtctctcagttggagtatgtgccattggctctccaggaccctgctggccaggctgctgtatgaacgaattcattgcctaggactctgttgattaaatgacatttcttgaagagtaatcgatctgccatatgcttgtagaggcttctcgatcttctgtgttctgagcagccggttactccgttcgatgatgagactcatttaaatgagaacgacgcgtttcatgagacgcgtcattcacgtgtttgcttttctcagtgttcagtctcctgttctcatgttctttactttgatctctcctgcttccttagatcaatcatacctcgccacccctcttgttactctctatctagatggctcttcctcgctcacatcaaattagcttgacgcctcatgagatagaatttattgcggaagagactgaaattgagatcgtgcctctgttcggaatggatcccatccgactcctttccgtaagtccgatcgtccagatatcatatctctgcgagttagatcttgttggctcgtcttttgccctataattatattgaaccgagatgttgagaaaaacgaaatacaggggatatatggtccttttagaccgccacaacggacaaaaataccattctggctagctatcaacttgaaagggaaacgaaaatgccatatcctacccccagagtggctgagcgttggtaagtctgttccctctacagtataagaagcttggaagagaactatccaatctagaaaagtcaaacatatactgatcttgtgtggtttgctctgtattctatttctctctatatgattaaaatgggtttgacattgggtggtacagattccctccaggcgttgcttgctcacgaatcctctttgacgagctcatttgctcggttaccctccagacaattttccgaaatttctaaaatgcttttagatgcgtaagtgaagtctcaaccgctataaccttgctctcttcttcttacctcaagcccttcctcaatttaaaactaattgcggaacacataatccgttctgattgtccttcatcgatcggatgaacaaataattacagagcttctgataatttggtaaacccgtcacagatcaggtcacttctaaaggatattagagaggtccggcaagcaaaattgaggactggtataaaacctacgataggcgaggatggaacaggtcttaacggagaatatcttcaggtatgtccaaaactatttctgtctggattgatttgttctatcgattactgacgtgcacttctatccttgttcattgatttttttgctcttctttccactctgctgctgacagttgacaaatcttacccctttagagatcaacgagttgaggccgttctttgtgagagcaatgggtgtgatgacaaaacttagaccgccggaaccggaagcacctgatgaccaggcagacggtcctggagaagaggatgaggatgaggatggagatctttcatactagagatgcccttgatcgaagaagcaaggggcaagcctgagaacttttgttgtactttataagaaatgaatgagcgtcgctatttgagaatagtcgtttttgttgtagtcggacattacaaaattcctctattaaactggaaagaagactatggtacttttcccctatcggcccgcttcgtcctcccttcctcctgtccatcactcaagatcttcttttttaccatctgctcgtctgcctttccccgtggtgtgaaactcaatccagcaaccgtacatcatatattatcatcatggtcttagccgatctaggtcgtcgcctcaatacggctatcaactcgctctcctcagccaatgtggtggacgagaaggtgtgtcaatcagagtgtcgggagctgttctatcttggttaaaagcactaagttgacctacccttcaccttgtcggatcgctcgatcatccaatttaggctctcgatgctgtactcaaggaagtctgtgctgctcttcttgaatctgatgtgaacgtcaaactagtggccgctcttcgaacgaaagttcgctccgaagtacgttgacagcattcctcgtcgtcacagatcatagtct

SEQ ID NO: 1601 - DNA, 2072 bp, Xanthophyllomyces dendrorhous
acagatcatagtctatagcgaaacgagagtctgccgactctgaccttcattttactgaccgactccctccctcgctttctcctattttcttcttctttccttttcctttcctttcgaaaaactaggtcagaccgctgctaaacccaccagcacctcaaccagctccttcgccatccaaagcatttcaaattgttcaaaaggcaatcttcgatcagttggtgttgctagttgaccctaataggaaggaaggcgaagaagaaaaggaagaggacaagggtggattccagtggcttcctaagaagggaaagagcaatgtgttgatggctgttggtattcagggagcaggaaagacgacaacgtgtactaaggtacgtgagcgataagatcgcgtctcgttcaatcggatgtatcttcagctgacgactttcctctctcgtcttcatctcggtatgcttcgcccttagctggctgctcattattctcgaagaggtttcaaaacctccttggtttgcgcagatacgttccgagcgggagctttcgatcagctaaagcagaacgctaccaaggccaaaatcccttattttggaagctatactgaaactgacccggtagaaatcgctaggcaaggagttgttaagtttaagaagggtacgtgttctcttacaacaactctataccttgcctcacgcgctcgagaactcatttgctcagtcgtcgttatgatacttcagaacgttttgatgtgattattgtcgacaccagtggaagacatcgacaagaagcagagttgtttgaagagatggtcgccattggggatgccgttaaacctgttcgtttcttatctgtcttgttttatactcgtcattggcccttcatactcgaaggctgacttgtacgtcggttgtctggatgttggcaatgataggatttgaccatcatggtgctcgacgcctcaataggccaagctgccgagtctcaatcaaaggctttcaaagaatcagccggatttggagctattatcgttactaagctagatggacacgccaaagggggaggagctatctcagcgtgtgtccttacatatttcgaggacgctcaagatgttgtttgctgatgctggctaaactaccctgctcttgtctacgtcgacatcttccttcttcttttatagagttgccgcaacgaagacgccgatcatcttcttgggaacaggagagcacttgcaggatttggaaaggtttagtccacgaccatttgtgagcaaactgcttggaatgggtgatatgcagggtttgttagagcacatgttcgtacatttatcccactcagccaatcgctcctctcgtaggtcatttctgatgtttacatcttactccgacgcgttttttcttcccataaaacgtgtgtcttgcttctttgaatcgtttattgtggaattaaacgataattagtcaggatatccaaacgatcaacccggagaagcagaaggatttggctacaaaatttcgatccgggaagttgtccatcaaagactggagagagcagatgcaaacggtgatgggaatgtacgttcttgtttcggtgtttttttttttcatcttatgttaagttaggtcgaatactatattgtctaatttctaatctgattctgcatccgaacctctaggggttcattgagtaagattgcttccatgattcctggattaccggctggtcttctagatggaaacgaggaagaggccggtaacaagctcaagaagcttgtgtttgtgacggatgcgatgactgctcgagagttggattctgacggaagttgcttcgtatgtattctcttgctacgtcacttgtctttgttcagtcacgtttaatcagaacaaaggtgactgacacgaatctgttgtcgggggaacagatcaggaaggataaggatgggaaccccattgggtttactaagcgagttgtaaagattgctcaaggaagtggtacgagcgtgagagaggttgaagagtgagtataacgtttgactgagatcaagtcatttgtctatcactcctgactaccattatttattt

SEQ ID NO: 1602 - DNA, 14379 bp, Xanthophyllomyces dendrorhous
tgactaccattatttattttattttattttttgttgtaatgacaatccttcagtgtgttaatgcaacaccatatgatgtcgtcaatagctaagcaggcaggaggagcggctaaagccaatccgttagttttcggcctctctttctcttgtttcttccatcaacaggcagagtgatatttcttcagttctagagtgtcaaactgatgaaatgaacgacttgttccgatgattaataggaatgcagctttagcggcaaaattgacggctgctatgggtggacctccgttaggacctggtggacagcctagtcagcaacagatgcaggccattcaagtttgtcttttctttttccctttcttttcctgttccttcttttggatctactaagtgtgtccgctgattgttttgttcttacttggctttgcgttaatcggggggaaatagagagctatgcctcccgagctgctccgcaagatgcgagccgctggtccggctggtgctcaaaagtatgtgatcgtccttacgtggccgtttctgctgacgatagaaactgacttcgtcttgatgttcgaatctccagaatgatgaacgaaatcatgaatggcggaccgcctgctcctggagctggaccgcccggtggaggcatgcctggtttcggagatttgatgaaaacgatgggtgggatgttcggtggtggaggcgccggcggtggagggttacctggaatgggagccggagggatgccaagcatggcagatatgcagagtacgttcttgcctgtctctctctctctcttctttccttacaattcgatcgtcctctagatagctaatgatgtttttttcaaaccttattattgttcttgtcgatgttacttttcgtttgttccttcccttgtagaggccatgcagatgatgggtggaggagccggtggaggaggaatgcccggtacgatacgtttttccttcttctctttgaccttaagcaaccacatgtcatcagccctcttttttttccaaagaaagaaactcacgcttcgttgctttttatcattggaatttttatcattggaatcagatatgagtgcactcatgaagatgatgggtggcatgggaggggcaaagtaagaggagacgaacatgaagaggaacacgttgtctttacttgtatcacgttctttcgaaaaggggaagagaggtctatattcattcggtcttgaggacccttcctcgtcttttccgtttaatcattttcgttgaacgttttctttccgcctctatgagcttatttttcttgtaggaataatcaaaacattaaatgcctcttcgcaagattattcaagcttctgcaaacattatagcccggttgctttctcaacaaggtttaaaccaaataaatcaagggaaagctagcatttataaatctaattagaatatgtgagggaaaagaggagcttgataaaaacgagtatacgcagtgatagtattcaagagaggctgaaggatattgaagaaactcatatcaaaagggaagaaagtttcggaaattaataattccaagaccagagcaaaagacaagaagacatgaccataaaaaaagagagaaatcattccaacttggcctttctcttgggtcgagatcgaagccacatgaagaggtagaccaggataaagaagaagacaacatagatgacagtgattccaatatcccgacctccatcggttgagttgctcaagttaacattcgccaaatagtcgttaccactcgagtaggcgcaaacctcgcaactggtagtcgatgtcggatcttttatgtaaccaggggcagattcgaagaaggttgcgagatagttttcacaggtctgaccgcttggaggcgagaagacggcgtactctgaatccttgcatacgacagggatatttcgcatggcaaagaaagtttgagcgccgagaatataggtccaagggttgaggtagtacaaccagtatcgccagaaagcagtgatttgagcgtagggcaccaagactcccgagaacgaggcaaagattcccaaaaagatcgggttgaccagagctgcttgttcggcgttggccacgctagcggcaacggcatatgcgaatccaatcgaccagaattggtagagaatcaagatggcgtacatcggaccggcgtgctgagcatcggtagagattcctacggggaacacgacgaagtaccaaagcacgtagaacaaggtggaactgacaatcacccaagggatctcggcaatgatctgggcgacgacgaaaggctgccacgagtaaatcttggaaggcttttctcgagcctcgaagagcatccgagcgtcaataaaccgaggctgaacctgctggaatactccgggagcctagagccgtggaagagacaggtagatagttggttgaaaaggtcagcaacagacatcaaaaaagggtgaagttcgttgggacgtacaacaaacatggcctggaagacagagaaaagtctgttctggagcgaaatgaccgagttgtcaagctgcaagaacgagagcgagtttagtagggcggatccgacgtgaagcatgattttagatatgacatagtctggggatctccacatggcgacggtagctcgatgaattagggtcttgtactggaaggaggcgctggcagcgtattcccttccgtcctcctcgaacgatggaggcttgctagcacattcctgcttaaggtcggcaacttccttcgagacgttcttgtattcgtcagactcgagccaaaccttgccccaatctcgtccttttgaaagagagccagagacaacgtcgatcatgaactcggcaggattggcatcctcctatatgaggaaaagtatatccataacaatgagaacaaaagattgaaaaacgagacgaaaggtatgcaggacgtacagggcactcgattccttgtcgggcaaagtacgccttcatttcggaagcgttgtcaccaaggtctccgaagtagacggtgtctgtaaagaagagacaaaacgactgtgagcacatatcaagccataacaaaataggatcttagtactcacgtccacctcgggcaagaagtagtaatcgatcaaactggtcaaagagcaaggcactgggctgatggatggtgactagcatggattgtccagcgtcggcaagttttcgcaagaatcgcaaaatgttgaaacttgactgtccatctaaacctgaagtaggctcatccaagaagagcaaaaccggcttggcaacaagttcgacaccaatcgttaatcgctttcgttgttcgacgccgagtccgacattgttgtttccgataatggcatgttcaatgtcggtcaactcgagtagatccaagaccttgtcgacatacgctaacttctcctcccgagacacactggccggctgtctgagcaaagcagagaactcgagagcttctcggacggtctgcgtaggctcgtggatatcgacctgggaaacgtatccggtagttcgctggaaggaagctccaagaggtcgaccatcaacattaatatgtccctcgacaacaccctcctcttttcgaagagctagcacgtcaagcaaagttgtttttccagcaccggatgctcccatgagcgcagtgagcgttcctggtttggtgtaaccctggactccggaaagaagctgcctgtggccacctggaacaggcacggtgtagtttagttcgtcccaagtgagcacggtagtcgtcttggttatcgtgtcttcggccgttccgttacctctggtggtcttgccatcttcgatggccccggcaggacccttctcctcatcgacagcagcagcctttcgagcaatgggatcgtcctttttgttcttctgtcgctctgttacgagaaaaagggacagtctacatgtcagagaaagcggtatgaatgtaagaaaagaaggctagacactcactgtagagcaggtacgatcgttcagagccttgagccttgagcctttcgactccccatgcggtgatagcgacaaagaaaacccaaagaccaatacttcaaaaaatggataggtaaattcaaatgtcagactcaatctccttcaacaactcaagagagaatatttcgagaattacaaagaaaaaggacatacacgattccgacatttcgccacaagtggctatatctgtagttcaagccggcctgcaggtaggcatccccagtaacaaagtcctctccagtctgacttccctggacagtacacgcaaagtgcccatcgactccgtagaaaggcacaagtgtggtaccaacacaatcgaattgagtatcgtggaactcgttgaccatggcagattcgaacccgtagtacaaagggttgatccatcggacccaactcaaccaaggcttcatcgatgtctgagggatcaagtaaccggtgtagataatgagcaaaccaacagccagaccagacacctgtgaggcaccatcgaatgttgagaagttgaaaccgatagctcggaagaagccgagcaaggcaagagtagtaacgtaagtaatgatccagagcgtgaagaaggccgaagcgctctgcctgagctggcacatgaagtagactttacgccacagacggatgagttcataattagtacaatgtgccagatgtggaatcacaagcttccttgtgaacaaacgggaggggtagacttactaggcaataagaaggccgagacctgagcgataagaatagggaagtctgccaagacctgggcgagaacgacggctgagggcctgtacatggcgaaactcttgtgctttgcgaggatagttcgaccggtgaaggaggtcgtaacctctgtcattcctagcaacgcgttgaacagtaaaatgaagaagagggatcctcctcgagtgaacaatccggcagtggtctgaggaaggttgtagaacaaagaaccaagaatgatcgattggatgatacacgatccttgcttaatagcgatcgagcccttgtcgttccacatcagctggtactgtcgaatagtacacgccttgacttgggtccaaagtccggttgagtagagcgagttcttgccagcgctggcagatttctcctcttgaacggccaacttgaattcctcagtcataccattcagtcgctcggtatctcggaggtggtcttcgagctccttctcgctctgcttgtaaatgtccgaggccaggtaggcggcaacaaagtcgtctaccgtctggggcacgtctcgtcggtccttgtcaaacagcattcgctcagtcttgacggtgactccggtcaaatagtcggccacattctgtccttgcgggcacttgaaaccgaggttctcgaagtagggcttggcggccgctcgaggtccccagtagatgcattgtccggcggcgatgaccatgaccttgtcgaacagttcgtaaatctggttaccggcctggtagagtgaaatgaaggaggtggagccgagcaagtcggtgattgttcggatggaccgggtgtactctaacgcggtggaagcgtccagtcctcgagatgagttatcccaggcgacaactgaggctcggtttaccaagacctcagcgatcgacactcgcttccgttctcctccagaaacacctcggacaaactcatttccaaccagggtgtcgtgggtgtgttcaattccgagagtcttgagcaaggctgaaagaagctcttgttcgtactgctctcgggtttggccctccggtcggttcgtgggagtcttcatcttgagcccaaatttaagcgtctgaccgacggtcaaagtagggtagtgcgtatcactggaagacgaagagtagaacgtgtcagaagagagccgaacgagattgatacaggaaacaaacggcacatactcttcggcattgaagacaatgtttccggagtacttctcggcctccttgtggtccatcgatccgacaaggacgtctccgtcgactccggcatatccgtttcggatgttggtcaccgctttgaggaacgttgtgcatccacttccaggtcgaccgatgacaaatgccatctctccggatttcagtactccgttaaagtttctgatcaagactgttcgtcagaaggaagacaaatcagcggatcatttctttgaacggcaaagagaaaacaacaatagagacgaacacttttcattcgtcttgagagtagagggagcgttctccaaattttcattagactggttggctgcttcagctgcctttgcctgcttcttgtcttgaatcttaagcatagggttgaacatgctggaacgaagaagcacaagaaaacatgggtcaacacatcgatcaacagagagcgcccgagaggtaatgatgagtagcaaatgaggaaaagaggggtaaaactaacctgcccatggtctcggcgtacacagcagaagccccgactcctcgaaccgccaagttcttccaagcgacatcaagtttcttctgctttatgccatcgtcccgtctggaggcgagcgctccttcgaggtgcttcgcaagggaccaaggctcctcgctgtgtcgagaaccagtaagcgacctttgaagctcatggaaggccggatcgttcttgtccatcggctgtccgacatggatgctgaaaagtcggaaaaaagaaacatgaacgaccattggttaatttggatcgagagtagagacctagacagagaactgaaggcggacgtactcttctccccagcaggatggggttcgggtgagctccggctttgtaccggcctcaatatcgtgtgataatgactggtcggtcgacgtaggcgcagggttcacggcggtctgtgcctctgactgtgaggaagctctgctagtggaaacgttggaagactgggaatttggttcaatcgcgatgttgtgttcgcccacatccggcgttggtggctgtgcggccaacggcggagcgaacccggtttcgttgacggaatacgacatgaagaaagtattaggacctagggtggagtgagacgggaagagatacgggagaagatattctctgagcgaggggagcggcaaggaacgctgtaagatcacaaccaagaggaacaaggaaagaaagaaggttaggaacgacagtgacagcaaaaagaaagtcaagatctcgatctcaagctcggccaacaagtattccgagggatatggaacagagtactggtacaagagagaaattcccgatccggcaagccaagagtatctttctgttttcttgcttctcctcttcttcttctacttcttctcatccttgatcaagaaggaatggggaagagagcacgaacctagaagcacgttcaggagagagagagataatatctacaaggatatctgtcttgaaagaaacaagggaaggaagagtgggtgactgaaggtgggaagtgagaagaggatcgaataagaatttcgttgattgctttaaaacaacgatgtttttcctggcgcggctccggtgatcgtacgtgttttcttttaatgacttgactaaaaggaatgcggcacgaagccccactgcccgggcatccggtcataagcccatagtagtcagctctcccaatcccatagttctgtagttctatgggcccataacggtgtattgaactcaacgtcggccatcctcttccctactcaactcatttcatccttctttgatttctctggcgcttacgatgcttttgcgatgagctgtgacattctagtgttgactcggaaagcgatcgatgtctcgttttcttggcatacatacactttgtcatctatctgcgctatcatctcattctgggccgtgttttgttctttcggctgtgtcgaaatcattcgatgacatgataccaagtatacatccattcgcatacaccgcatatatcaaatacacacttgtcgcaaaggtagtagtttctacaaagaaccctagacagaaacgaccagatgaactcctatcctcagaaaactgtatgattgtctgattgtccagagaacgtcgccacatatgttgtctgttgtctttcgttccatgctcagaagacaatcgggaaggccatcaatctgccatagcccgtatctgtagggtctagccatggacttatgaattacctcctcgatgtgctgtcatccgaccacacgagcatgacagtgtggttcggccaggctccgagcaggcgaagcgaagcgctcggagtttgaaactttccccgagtgcccagaagattatgtcatcacttcttacgctccaggtgttttcatcttcatcatccatgcgtccaaatactctttatgacgcgtcacttgttataagctccggccggctttattctcttctcatcaagagaggtctgtggctgttttaaattcagtacaagattgagttacagcagacaaacaagaactgatggtcgtcgagagaagaaacaccacagcgatcacgacgacagcgacaaacattgacaacattgataacgaagatattgaccgggaacggaaagcaaaacaatagtctagctagtcatccttgtgtacaaaaaaccactttgtttcttcatccagctacaaacgcctcggctggcgtcgatcggcctttcggattgccaagttcttcccaaaagatttcgttcatccgttcagggttgtctaaatacacatggtgccctgcgtaagagcaaaaaattctcgatcagaagtcttcttctttctacgttcatctcttgccgagacaaataaggaaggggcgaaacaaactgtacctgcgcgttccacaacctcagtggacgtctgtctgttgccacgtgattgcattcgtctgcaagcctcaacaccccctttgaagtccatccacttttcgttgtatgataaacacagagtcggaaggttttacagttcagtttcgatatggaattgacggtttagagaaaattgtcagacatacgtctttatgtccataaacaaatttcacaggactgctcataattgacataagacaacaggtgcaataggtcagtattacgcacacacgcacacgaatacgaatacagagacaagaccgacatcttgatatcatccatccgttctactagcggttttcgagcaaacgctccaggagcaagtagatggtgaatacagtattctcccttttgataggatttttcgatatcaggaagtcaaaagtatttctctcaagtgtcagttcggcttttctttcctaaaaatcgtcgaaacccgagtctcaacggaaagacttacactccctttagcggtggtggtggcatagatgtaagcactaggaagattaacacgaaaagtctaatgagcaaacgacgatcttcgaaaaacgaaagtgcttgagaaccacagctattaaggaaaacaattaacgaaactgcatatcccgaatatcctcttgggagagtccttcgaatcgcctggaagagtacgctccaataagcttcggagccaacgggccgagagctttgagaatagagcagacaactgttagcttgagaaagcatagacaaaaacgaagatttacaagcttacatcgaactacagaaaatggagaccatcccttctcccatctgtaaaatcagaataccagatcagaatcatcgttcgcttcaaaaggcatcgaaactctgctcaagtagagacagcatgtacgcacgcccatccgaaaacactcctagcagccgattggctctgtggaactttctcgcccttctggtcgtttttttgaggcgccttcatttccttcctgccctcactcaattcagattcgatcgccccggcagccgcatcgacatctgataccgttggcgtaccctgagtactgatcttggagggtgttaagggcgcatttgggttgatcggaattccagcaggcgagatcagaatcaacttttcgactcgagacggatacttcaacgtatatgctatattcgatatcgatcaacgttcttttcggtcagcgcccccatatgaattcgattgaacaagatcatagatcgcgccttcctcgcccccagacttaattagagacgaaactcaccagcggagagatagcctcccaacgaatgtccacaaagtaccatcttatcccatccgcctcgctttcgccattcttccaaactttccacgaaaaagtcctctgcattcttcactcgttctgccactctaccttcgtcattctcgtcgaccgatcctgatgccgatgaaggcaagttgaatgccttcggtgacggccgggaggagagacccatcccaagccagtcgagcgcaaatgcccgtcggttggcagacgcagaagcttcaccgaacgctgtcaaacagatcgatataaaaccaatcaggacaaacatcggtaatgacaaatatctctgcaaagattacttgccttgaagatttaagaagaagaacccaagcgcagctccatagccatgaagcagcctggccgaaagaacgtaaagattaacgaaccttggtcaactaatgaaaattccagtacactcacacattaactacgcctcctttttgcgctttggttcccccgtcgccaacggtataaaacttcagaccgtgtaagtacttttccgctggcggcttcgttttgtaaagcgggagcttccacgaagaagatgacaagttcgcttgggttgataaaggaaattgctctaatcttgccactaatgggttggacaatagtgctgtaggtgtcggatcgggtaggtctggtgaatggatgaacgaagggagtctcctgtgaagtacataagtagataatatcagttgaagaaaacgatacgaatcggagcgaagaaaggaagaaaatgcgtgccaaccgaagaagcctctcctccgctagactcatttccttttctctagagaaagaccaccaggcagccagactctgaccgtacgtcgttggcactggcctacttggagtaacaggagaatgatcgggcaacgaagctgtcgacgagttagcagtggacgttgtattggaggataggtgaggcgatcgctcatcaggcagatccggcagatcgttggtcggcagggcagacatatcggttatgctttagggaaaattcactctgttgatccgctgttgctgccgtggttggttgtaagaaggatgacaatcggataaattggggaagagaagaaagtggaaggtacataagctgatggggagtgcgacaaaggtgacgtgttctcggcttcaccctacgtgttgtaaccctaacattcccggtcatcggtcatcggctcttcaattatagaacaaagcaaaggtttgaacttttaaataacaaccgattggtaacaatagggacgaacctacacgcagtcaagagaggaaggggtataagagaacattgatcgatgctgtgtcttttagttggaatgtgcagaagaaagtatgaaaaaacagaaagaaaaaactctgaatgcaattaaaacatatgtggcatgaacaattgtatatatggggctgaagaagaaaacacaacaagttagatggaacgaaaaacagtaaacagtgaataaaacgagttgatcggctctctaggagtaagagatcgaggcgaatactcaaattgcaggtatatgtcaatgaatacgcgagatgatagcaagcgaaatgaaggtagaaggaacgaaaacaaggcgaggaagagaggaaacgggaagattaataacccttcaagatcaagaaccaacatgtgaaggtatagaaagatagaataggcagaagcttcgggagctctggattttctcaaagtgtaccttcgtgtgctttgaatgctcgtttcagaggcgagctcactcgagctgccaagtcagatgcacccaatcagagcaaataagtatcagtcatccatctatcgattataagtcgagcacggtcctcgagcaaggattaaccatatactcacgagcaaactgcatactcttcttcctcgccttttcgagtgaaattgaaaacggattggacgtcgtagtcgaagggtgagagagaagatgtttgggctgaaagaagaaggcaatggattagtatatttctcacaacatgctgtctgacatatcgaaaagacgtccttggacgtacttccatcgatttgcgccgctgataagaacaggataaggaaatagaacacaagttagaaatcacaaatagaacaaatattgagagatacaatgaacgaaccttagtaaactcatcttgatcttccggtaagatcttatactcttcctcctcaacccacctcttctcctctctgcaccggatcacccatccaatccccattaagcaaacaagttttttcactcttgacccagtaccctcggccagcgacaaatttcttgagccgtcaacagatgcaacagatgcaacagacgtgtctctctcagacgcgtctaggacagaagaggaagtagaattttccggaatggtcgtcggaagagggacagaccgtcggtagaacgtcagggtagatgtctttccggctttgtagataatgtgagtcacagagtctgagggcgctttcaacacctgaaccagatcgtaatatttaatgatgatggtcagaatctgagacattgaaggacttaaaacaatgagatcgtagcaaacctttgctcccagttctttcaacatttctacaaacaccccacctgcatcatctccttctgccgtcctgacatccacaaaagcgacaacgcccgccaaagccttactagtaccgtgccctctgatcgaagcgattgaactcttgcactttgacaatgtgagagatacattcgactcagtcgagttccctgatgccgtggattcagtcgaacgtgatggcagggttgtcaacgaccggttggagggctcagttgtcgagttgagtctactgtcacggagcgaggatgtgagaggaggtgggataggtggaagccttcttgatgaagaagacacaaaagagccagaacctcgtttggctccaactccgggcttgttttcagagttcggatctttttctactcgtccaccgtcagtatctccatttggatgtccagcccgctctaaagatttttttcggttggccttcattattgccaaactctgcgctaaaccagccattgccgattgtccttcacatgacaacccactcttgctaagcccagctagcccctccttcgctatcccaagtaagccgtccgcgccggaagatgggaccttgggaagaggcttggccttaggaatttcattcacgactgtgctgagaacctgctttggcttgctgggcccgagaatagacggcgcaccgttcgcagaactaggtgccgccgaatcagagcttgacatagtcgatgacgctgacgacatgtaggtcaacggcaatgaagcagctgatggagctttctctgaaaccgagtccgaggcgacactcgtctgttcgttcgtcctgtttccagaattcatctttgagggccctgacgtcttccttgttcctgatcttcctgttaggttggtcgaaaagataggtaacttgccgaccgtccccacgaccccagttccattggaagatcttgtcgagattgaagaagctcccgaagaagtaggtaatcgggggccattgacgatcgaagtcttcgcaaaggacaacttggacgctcctaaggggagtgccgaacctgattcggaggaagaagtggataacaaagaagatgtggctgatggatgcttaggagtaggcccacttgggactcgtgaatttgttatcggtcgggcatgaacaccaggtaaggttggatgagcaggaatcggtccagttctcggacgcgaagcagaaggagtagatgggaatggaagaagagatagcgtcgactgagctaatgaggcagatgaggcagatgaggcagatgaggcagatggagcgttctggacggactcggattgagaggagggagaaggatcaaatgatgcaaattgaaaagatacgaccgatgagtcgagaggtggcttagttgatatagaggctgtcgtaggttgaagagatgaggttggaagagacagtggaagcggtcgctcctccttgatctctggagtctctgccagtgccagctccgacacatccgagattagctctaacgacccttctagatctatcttctggtccttattttcctcctcctccatttccttttcctctgcgcgatgagtctcagtccctccatttacactatgtaacacgaatggtatcggtttctcagctccctcaactctctttattatcgccctccctccatctcttccaggctcaaatccaccctcatcatcgtccaaac

SEQ ID NO: 1603 - DNA, 19861 bp, Xanthophyllomyces dendrorhous
ctcatcatcgtccaaactcttggggaagacccgcttcctgggggacctcaattgcttttttctcatctttttaagatccatgagaggaggaaacccttctatccccagaccgcctcgattagcatcagcagtagcggcgataacagcacattgacgacttgggggagacgatagaggtgatcggccttcaattcttgttccagatgaagtcaaaccagtaggcgagacaggcatcggcctgtttgtccgtcctttatcttcttggaatgaaggagaaaacctgacccgtttcgatttactcgatccacttgatccaacgcttccaattaaattgaacggatcctgatcttcgggagaagaaattggcgaagacgatggagaggacgagagtaggcaactcttgagtttccgactgttcggccctgaggagagtggagaaggtcgggcagaactaagttctgcgaggtcatcccttgatctctttttgtgattcgatgctggagataatgtggacgaagatgaagtggacgaaggggtattggcaaggaatcctctgagatcgcttaaaggcgtcaaaggagaactggggcgtgattcattgggagaggtattcgtctgggaatctttcgttatgaattgactcaaaggagtagagtgaggatgcaccacagagcaggaggaagagggaataacaggggtggaagcagatatggtttttgtggcggcaggaacaaaagcagaagagcaaggagtagagggagaagatgaggaaggaggagtaggtgcaggcgtaggtatgggtgtacgaacataaaatgggttagatgcgctttcatctacgataggcatcattggaggaggagacggagtgaccctggtcaagctgcttgatccagacggagatggcacacgaggaagcacagatcgagggatgaccttagcaggggatcggctgaaagcacccgcgcgacttctttttgttccttgggcaacgagaggagtcagtctgttgatatgtccgctcaaaatggaagagcgagagggagataaaagagagggaggaagcctagtcggagaggtgggtaaaagtgtcataacggacttcttctttggagaggggtgcaaccgcatgtcgtcgtcgtcttccccatcatcgtagacactatcacggctaagtctgtttggtgatatgagaggggcaactgtcttgggaggtgacaccttagaaccaattgaaggactcgatttaggcttcagtgagccagatgaaagacggagagattgagagcgggtgatccgagcgcgcttgacaggggatgcccgtgtacgggcggatgagcggacagatggacgagaaacggtggccggagaacaactaggggcgacgatagtagagaaaacggtttggttctttttgggaaacttttttgggcgggactggagatcttcatcatcttccatctgaacaggtaccggagcatcccgacctttccctttctcttcggcggtaaactttggttcaatccggccagcctcctctgacagagaaggcgggagtggtggttgagcaaccacagatagatcaagaggatcatcggctttgatatcccggaccgtatgagtactccccagatctattgattcaaccctatcacccgcctttccctctctcacaggcacgcatcttgcccttgtcttctttggtgaattgttcgctgcttgaaccgctcgacgcgctgattgatcggacgatagatctcctcggacaatcattgacctagcagctctagttctggtgtaaacatggggagagaaagaagcagaagaggtggctcgaatagatcgtttcccctcacgacgggcagtcgtctttgaccctgggggcatttaactgttaatagagtagaataagagtaggaaccggaagagacagagacagaagttaagtaacagattacaaggaaggttgatatatcgaaatgcacgcatgacctacgcaggagaggaacaagaggaggaatatgcaatgagaaagaatggggtatatgctatccgggtcagaagagaagggtatcgccaaaagatgtagttaagttgatggaaagcacattgaacatagtccaaccaacgaccaacgaagttcactcaggcgctattaatttttcatctatcattcaaataacgcgtcttgttttccagctaaggccgcgtaactggtagacgcgccgatgcttccacaaagtaagtcgttttccatctgtacacactttgaaagggagactatcatctataatccacccacagagttcagaattcgagggagaaagaaaggactttcttggactagacagttagaccaacctcaacgagcccggcaacttccatccagccaccgacaagatgcagactacctgttaccaacacatcgacctcattctctgttgactgctctttggtctctgaacaaaccagctcaaacgcttcttggatggaggacgtgattcggatcgcgtccgggggaaacgacggttctatttctcggaacgcggaagcaagagactcttgaatttctagtgtctgatcttccacggacgattgaagatctagatgtgatatgttaaagcgttagtgcaagcatatacaaaaatgaatgaatattacaaaacaatgcacggacctcctttggattggccagatgcgtaggtcgtattggttgagaagatgaccttatcgaacagcggcacggaagaggaggtaccagacaggcgcctcgcttgagagaggagggcggtaagaagagaactagctgatcgaccatttgtacagttgaagaccaatactcgtctccgaccgccttccgttcgctctttcacttcctcccagaaccagttcccgcatccttctaagctctctgtcgtgtgggctccatccaagaacgtcctgatctgaccggcctggagaatttggcatctccctggccagcttgtattctctaatccttcttttgtcggctggtcaagaggaccttcaagcgatggagagcttacaccatacagtggggatgacggcgaaagtgagggagatttaaggagggaatcaacgagagaaagagagagcgttgcgtttgttcgttggtggatacccgctagacctgaagaagaggatagtggagacaacagggtgagatctggaacgagaaaacaaaaacaaatagcaacaagtttctttcttacctagcttgattagcgctaactctggtctgttgggtaggacaacaaaggaggatgcctatgtatacgagatcgtacgaaatcaaattcattttagtctaaactccgcactcctatgttcattcatgagagaagtggctagacaacagagtgaacagtgtatactgcaagaacgaacgtgtgcttcatcagctctagctcgaagaacttcctcgccattctctggttgctgtaccgagaacgcaggaactccttgctaccgatgttgatgacggacgaagatatgaaacaaagaaataagaaagataatttagtcacgcttacgtcctcatgtatgacaggctgttgacagaacagaccttgtagattccgcccttgttccaagctactttcccaatcgtatctcccaataaatgagtgtgatccaacccgagcgaggtcactccagcaacgactggttgaggaataatgtttgtcgaatcgaacgcaccgccgatccctacctcaaatattgaggtgtctacctagtaaagttcacccccataattttcattgaaggggaaaaattcgtcatccaatctgaaagtgctatgatgtcgagcgagtggtaaaacttcaaggcataccttttcagagaggaacgcgtggaaggctaacagagtaagatatcggaagtagaccggcttgacaggtgtcagcggattggcgatctgttgtgtgaatcagccaaaggtggagcaatataagggaagtcagacatgcttccatgttctcctcctcattgacttgacaatcagttgagcaagtaatccggcgaacctgggtgtttccttctagtcgctcccatacctcgaagaaatatttcgcgaatagctcctctgagagaggaactccattgatccggattctttctcgcacagccaccagatgtggagatgtatagagacctggatagatgaacgagggaagattcgaactagatttaagcctatggaggagaacacagcgcgcgcatagaagttcggaagggggaagaatgggagtaacgcaccgactttcagaggtctcttgatcttcttgtccaatggctcatgagccgcatacagagatcgcagtacggagtcacaaaatgctgaggttgatcccttgcctttggtaccagtgatgtgaatggcattgagcgcatttaatcttgtcggctgatctaggtcataatcccataccaatcagcaagcttacttgatgttgttctcggccgaaaccccaaagagaaacatctgattcataagtaagattgacagacctgatatcccacccttcctagatattctctcatttctaccaacgccgactcattcatttttccaccagaagccttgatggcagcgatggtggccgcgtttgactgaagagagttgagcagatggattgcatcctgcgagccgggaaacaatcaagaatacagtcaacgaataagcttcaatatcatctcaacaaagccataatttagatacgcaagacaaattctcactctatatgctctagtagaaagagacatttggaattgttggttgatagtagaagaaggcgaaaggccggggagagaagaaagtaagtgtgagataaaacattagggttacaaatcggttttctgtacaaacgtttaacttgttcatactcattgaattcttgttcaaacagagtaactctcacgcatcctcacccacatcatgtctaaccatccgttgcttcctccgatattccctgcaggcagaggtttgtgttctctctttatcattggttgtcaagctgtatccttctgtatgctaaattcggttgtctggttgatatatcggttcgttctgatctcattctcctttccagaacctgttccgccggggacgactgaggaggagcttgccaacatgcgtcaaatgacccagctcaacaaactcgttaccactgtcccagaaagctgtatattcaaaactgttctttctgctggtgcgggtttcggtctcggagctttcttctctttgatgtcgacttcgtttcagtatgaggatccgatgaatagagcaaacgtcaagatctccacaatggcacagacaaaattggcgttcaaggatatgggggtcaagatgtggggtaccggtaaaggatttgctaaagtcggagcaatctacagtggagtagaatgttgcgtcgaaggggtgcgttcttcttacatggtttctctctccggattcgaaaagcgagactaacgaaacataatattcctcttatatacctgccctcatccggatgatgctatatacagtatcgagcaaagaatgatatacaaaactcgctctacgcaggcatgattgctggtagtatccttgccttgcaaacaggtagtggtccaaaagccgtgctaggaggaggaatcgcatttgcagcgttcagtggagcaatcgacttgtatatgcgaaaggaagccccgttcgtcctatcaaccttcctttctgttctttatcgtttgtttctcccttagaaaacatccatggttgacctcgtctcctttggctgtgtgaactgacaacagggatgaagactaaatctccacaaataaataaacgttctcagaacagagttcgtcagatgtaatatataaacgaacacagcctcttctcttttcatatccctgacttgatatctcgattggctatccttggccttcttgcattgcgcaatctgtaaactatttgtcgaatttagccattccagaaagaacgtggactataaaactaggggataagaaagtaaaaagagagtcagagtttatcccctgatagaaaaggtcgtatgttgcatctcaaacgaacgaacaaatgagggaggacgctctgtcttgatatttgcacttgtaatctatgaaaagtggctttgcgaagaagcagattcttttcgcgactgttgtacgacaactagatgagagggtcatatcctaacgcagaggaccaagctgacattatcacgcgtacaagttagtatatgaggcacttcaggggtttcttaatattcgttcactatcgcgataatgacattcacttgtgcttttctcaagaaagtaaggaatgatacatatatgtacaggtcgtcagaatgagaaaaatgagaactgtgtaccccagaccgaggccaaagataggcattagaacgtataaagcaacatgcgatcaacgtgcaaccgcaaccagactctctacaacttcttttaaaggtggagggagacggtcttgatgtcctttccggcgttcttggctcgcttctggagcttggcaatggacttgttgcctcggagtcctcctccccactgtcgtcgagcctcctcgtacttgtcagtgaagttggccttggcggcggagacaagggtggcaagagcagcctggtcctcggacttgacgtcctggagaacaacacaggcggcggtcttcttgtggacgaccgtaccgagtcgggccttgttcttgacaatgacgtaaggaactcccatctttcggcaaagagcgggcaagaagacgacgagctcaatggggtcaacatcgtcggcgatgacgacgaggttggccttcttggcctcgacgagggcaacgacgtggttaagaccgtacttgacgaaaaggggcttcttctcgtccttcttctcggtcttctcaccagcggcaaccttctcggcagcggcaaggagtcgagccttcttctcctgcttggcctcaggcttgtacttgttgaggagcgagaacaactgggtggcggtgttcttgtccaaagtgtgggcgaactgggcgatcgcaggggggacctgaattgtggcggagaaaaatatgagcgcgtggataggaacttcaaaacgagaagtacagacaaaccttaagtcgctggtgaaggataaccttctgcctctgaagtcgaacgtattcgggccacttgacgaatcgggtcaagtcggtcttggggggaagatctcctccgataccgaaagttcgggtcctcttctcgaagagagggttcttggcgaccttctttccgcccttggggtctgtattgaaatatatatcgaatagtcagaggaagatcgaacacgaaaacaagattataatcgagacttacaaggagcgggagcgaccttcttagttcctttggtggctttgggctgtttggatgaaggggatcattgagacgaggggataccggttaggaatccatccaagttgctctacatggggaggaatagaaacccaagatgggacgaccatgaaccctcccctcccgacagcaccggctgagagcccacctcgcgtccgaatgcggcttcgccacatccgacgagcgaggtgttttccgagtcaaaggagaaccgtgccttgatcggtcttctagaaattgcatcactccgttgctctgtgcgaacccaactccaatctctgaccggtccagtgaatccttctacaaggaagggtcgtctctacttctcaactccaacgtctgaaggctttcgccttcgtcgaaacattgacgcaaacttgagacagaacgttggtgatgaggataaggagagaccgagaagaatttcactgaaccggccaggttgaggaatgatataagttgaatatatgcggcgagcagcagaagacacagaattcctgttggaaccgatcaagggagaacaggttctctgttttgacgacgaaaaaatacaacatatccctaaagggatgtgccaggctagccgtttcttatggaagagatagtgttcgagtcttaaacacaatagatatactgaccatggcgactgtaagttcttgctgaagaggatgggtcttgaggaagaaggtggtgctgagaggaaaagagagttttctatcaattttccactgactgattgtgtgttcgggaagtgtaactcgagccgtaaattgtaaccaagaggcatatgactttcacgtggtaacatgcaaaggtcagtcagggacttagccgaattctcgtctcctcccagccgcgcgtgaaacagctggggggaggaagtgtagtggccgagagatcagctcatttcttcaaggcaatcatccgtatgttcagttttctatcttggatgcatctagagggatcggggggatagaacatatgctcatgtttcattttcctgctgatgcgttgtgaacttgcaactgaataaaaaaatctagcccataatggctccctccacttccgtccccaccgccgaggttcgtttcgccaagttctaaattctgtcggtttggaatcacaggatattgagggagaaaaaaggggaaagaagggacgagaagtagaaaagaaagagaaaaatccggttctttgaaggtgtcgttcagaggctatagaagatgtgtttaggggtgttatgggaggaagacctttgatcgtttagccctgggaataacggcttgacgttaatcctgaagatacgcagagtcttgtcagtatgtttgtctcagtgatgttaaccatgtctcttcacctctttcttcttccatcctgatccttagcaagtcgccgtcccggagactctcctcaagaagcgaaggtccaccgagaagactcgggaggagaagctcgctaaggctgccgaggcccgaaaggtgggtctttcttgttcaaaatacaacatcaataccacacccacagacacgcacacagcatacacacacaaacacacacttcactcaacatcctcgactttgccacctcttagttcaagtcaaatccaatcgcgtcaatatagatctcgacacacttccccgctcgacacgtttagacttaaccatgttcgacatatgtccctcaccagagccgtgatcttgggagattttgatcctttttgcaatgatgcatacgtctatccatgacgctaattgacgactagtcttgcacgacgatgatgtcctcaagttaaccatctttcgggactgaatacaaaaacatcaaaagaaaccttagatcaacggctcttatcacctccgtcctctcatcccttcacacagtgctgtcggttgttcctagatgaatcccaagacatagcaaaagagcaggggctgacatcatgtggtcttttcttttctggggcgtgtttttctcgtttgggttcaactcggtgtgatatgcgtgctggtgatgtgaacttcgcgattcggaatcatctagaccaagcgagccaagcgacaggtgatcttcaagcgagccgagcagtacgttaaggagtacaccaccgccgagaaggaggagatccgactccgacgagaggcccgagcttccggtgacttctatgtctctgctcagcccaaggtctaccttgtggtccgaatccgagggttagtttgcgtgccgttcatctcttgcagctgggcatcaaagtctgaccatctcaaattctgtggacgtgtataaactttgtgtttgtttggctcggctggctttgttctggggcgttggatgatgatggaattggttgggtcgaaattcgatactgggaacatacaataaacgaatcgtcttgcatcactctgatctataatacagtatcaacgagatcgctcccaagccccgaaagatcctccagctcctccggttgctccagatcaacaacgccgtctttgtcaaggtcactaaggctaccgcccagatgctcaagctcgtcgagccctacgttacctacggagagcctaacttggctgccgttcgatcgcttatctacaagcgaggatacggtaaggttttgaagcagcgaatccccctttcggagaactccatcatcgagaaggctctcggagagaagggaatcatctgtattgaggatctcgtccacgagatcgtcaccggaggtcctaacttcaaggccgcttccaacttcctctggcccttcaagctctcttcccctactggtggatggcgagctcgaaagttcaccggctacgtcgagggtggtgatgaagggttcgtgccctttatctgattttcttatcgtcatgcatcaactaacttttgtttttgtgtttgcgcatatccctctttcacagactccgagagtccggcatcaacgctcttatcaagcagatgaactaagtgtttgagaagcttggatgaccaaccaaggtccatcgagtttccctttttgatacgtgatgtgccttttgacggtcgttcaatatacaaatagagcaaaggaaacaatcattgcaaaggacaccaaagagatatgcatgagagagatagtaaagagagatacacgaaaacgcagcgtaaccgaaaatgtgtgaaaaagcttgtgatgcgcgcgtcatcaaagatgggctatctgactggtttccggttcctggaatctcgtcttagttttccccaacgagtatgagattcgttcgtttgattccgtcttcccccatcttcccttcaacctaacatgtggttctcctggcttagccaagctgtcatagagtggattcctgttgtgctctctcttattctgatctatgctcctcagctttcgacattcgtctcctttcttgtatcttcaaagaaacgaaccagtgggttctactggatactcggtagtctggttggaccggtgtggttgattccttgggtttgctgggtctggagtggatgggcaatcttgtggcgcttggatatgattggaggaaaaggcttccctggagactggggatgggctcggtggggaagggtttggactggatggtgttttcttgaggtaagggcgacatatgtaacttctcatttctgttccttgttcatgagacttaaatatcttcttcatttgatgcgcgcaacgcgccatcctcgcatccaatgggtgtattgctaccttccagtccgtcttcattctataccatgccgttcaggccttccgaatccaggcctctcgcccaccccatgatctaccagcaaaccagatcgagcttctctttcttcgcatccttcaagcaggaatggatccactactcgagatggaggatggcccagacaccgagttgattcactcagaaaatgagctgagtgaagctttggtagacgtaggggaaaccacgaggagaggagaaagcttagagagcgtgaagagtccaagagcgcttagactagtaagaaggctagacacggccgatccaagggcgaaagccttcgcagagaggtgagttcaaaattgatctctaaaacttggacgtatatacagagacaactgactgataacctctaatcagactgcgaacatggttcttccgtatgccttgggaatccattaaaaaggacaacatcatggaatgggttgcctggtctgccttcaagtgcgtgttgcgcatttcttgcttttgtcttattcttcgaagcctctctagtcaatagcgctgactaattcttccgcacttgtatgctaaagctcctcggtggatcaagtgacaatggacccaacccagaaagcctctctagagtatgcggtcgatttgatatcgaggcgaacagacacgatttttgaggaaggtagaacaaacaatgtcgaagtcatgcggcttaccctaggttcgtcttcattcttatttgtgcataaccgcagttgagttccttcagcttgagccttagctgatggtctgttgtaaacatatgatgaaacggcagacagagtcaacatatatcatcgacccctcgtgctgtatgcccttacagctgtcatcaacttggggtgcgaggcttggtgtagggcctatggaatgcgaaggaacaccatcaaagggattgagtgcgcacttaattcttcttctagttctgacgagaaactagatgacaaccttcaaagtcgttactgatgtgttgcttgaggcctatttcgacagctacatggttaggatccctcatgattggacaccagaacaagggagagaggataagaaccgagagccgatcgtgttccttcatggacttggtacaatccttattattcattcacatttacacgttcctgttcttacagaactgaatttttccttcgatcgattgtcacctttataacaaaaaaacaacattgcaggcttcggcttccttcagaaccaaatcgtcattgggcggctggtaaagcgatatccatctcaccccatcatgatcgtggttcagccgcatatctcgatgaatcttgttggtccttttgtttcttcaattccactatcagaaagctagctcggtgcagtatactcatcattgagcgaggcgtgataaatcgaatcctcatgcggaaatttgaaacgatgtccttcaagttcaatgtgaaccatcttcgaccgatatctaaggatcaatttgttgattcgttatcaagcgccatagagcattacagattttatgatctacaagcagaagtctcaccctcaacagggacgaagaccgatgaggtagaaacagttgacaggggtggtgtcgttatgttcagtcattcgaagtaggttcttgtctccatatctcattgtgctagcacataccttgaatcagcggcttaggctattgtcttagtaggatgctaatccatagcactatcactgatgcgccttcttcttcatccatgttaatggcaggggaacggtaggccattcttggctgatgaaggatcgaccagagctcatcaagagaagttgcttcgcagatcctgtgtgagtgtaggacgtgtcaaaagcgtattctcataaaacacctcgctattaaattaagtctgctatagacgtgagactgatgtcttacgtatttaaacttctgggactgaattaaatagagttttctgcttatgggaaggaggtatgtgtgttcgcttacattatataactatctcactactgttcctctctttcgtccaatcccaatgactaaattgagtctgtccgtctcatctatcctttcttagacgtctgcttcaacttcgtttgtgagtttatgcctttcttgatcaacatgatgatattaatataaaaatttgcttattttgcaacaccatcgcgtcgagcaactaaaacagaccgagaaccaggaaacgctatcgaggtacatgcagataagcttcatattctgtatagctcagcgctgtgcattattcacgcaatatctgtctatctcatttatgtgtcaatctctatttggttctcggtagcttctcatgagttactttatcgggtccgaactaggaattgcgaatactatatccagaaactttaactggtcgttcgtctttcttcctttacttaatcctgtttgtgtggacctgctagtgcttacatccattttcaaatcaaaactgaaatgatcagacataacacactattctttgaggatattcctcatgcacacgatccttcccggacagctttcttccttggcggtaaagattcaatcttggacgctcaggtacgttatcatcatgctgcatagctcgtcttattaggaaagatgtatggtactgaccgctcgcctcgtattgagggaaaaacagttggttaaggattacttggagcgccgtacgtggattatctggcttatccgtcgatgcacccatctactaatctctctggtgatggttgaggatgcatagatggcgctacccagtgtgtgcacttcaccccttcagatagccatggtagcgcaattatgtacgtttcctggttatttctttccttgatctgtggcctgagttcgatctgataaaatcatgtggaaatttacagatctggctctactctaaccaagattctaaagtacgtatatcgcaacccttcacgaccaagattgttaaccatgtttcgtgatcgacggctgacttggctgaactccaggtggttgtccggagatgacaaatagagatttcgaccaagctgtaccttacttttttcttccttgcgacatccatcttcgaccgaatagacgcgattgctcgtaacataagttcaaaacatgcacaccattagaatatgtctcctctcctccttctgctctcaagacttacagttctctcaatacacctatttgctgtatgatattcagcataacatacctagacataatttgcttgtttagtaagcaaccctatcgttcactctaactttatattctgctttgcactatagaatgtatgcgtttcaactataaccagtttgaagacgatccgtcttcctctttcatacagaagctgactcttaagaagctgcctattctgctcactcagctgatagagacagtgtctgaagtcatcgtttgatcgactatcaaacaagaccggcctatgccagagaaggatctttgcgttcctggagtgcctgattgtgtgcctttctgtgaaattgaacaacaacaaacatcaacgaaacaggctggtccagatcgtcatcctacgggaagcgtctccaatttatgtcttcattcatgttgtctatataaacaagccttcgttcgcttctctttccttcttcccttcatctcaggtccatcaaattcttataagcatggggttcaccataactgaagagctactggaacaagatgataccctacactcgtcgactccttctttttccaacaattccgctcaatctccggtcgacattattcggccgttacccgacctttctacattgatcgaagaagagagagaaactcgttccgaacctactcatgcgcgtcttcattgggccggtcgagtgcttggtttcgcttctcgaatcgaagagcttgttcatccctctgttgacgagaggctgccggcagacaaccgaccaggagtgtttcagctcaaaaaccctgatcttagaaagctcatccaaatcgctatcgctttcgtccagaagcttacccaggttagacctcaggaaggcgatgagttgatgacagctgaagcggtgtacctactcgccgacattctagcttccgggtcttaccctgaatattgcgagcgaaacataccgttgagcttatttatgtttgagaagagtgctttaatgggctggacgctggcctggtttcggctcgggatgcattatgaaggacagggcgatccgatgaaagcgaatgatcatttcagaagaggtgtccagggcgaggatccaagctgtctatacgtgggttccggttcacctaaccctgatgttctaaaacatgagaatcgatcgactgatctgtttttttatctgggtaacaacacttgcgccggtcatagcgaatggggatggcctatttgctcggtcaactaggtcgttcgatcgatcacagtcgagcgttcgacttgcttcgaaagtcagccgatgcagccaatgaagatttccctgctgctgcttacgtttttggtatgctgctagctggagaatttgatctgccggataccctggacacgacgattctagagcaatgtctagaccagatagccgaggtcacagacgattgtccttctccatcaatggctcggctggaccgggcgatcgattatcttgagaaagccgccactctgagctttcctgctgctcagttcaaactaggttactgctacgaacacgcccttcttggatgtgagtacaacccggtgttgtccgttcagtggtacttgctcagttcggagaatggtgagctcgaagcggatatggcgctcagcaagtggtttctcgcaggagcgccgaattgcttgcctgtcagacaagagttggcattctcttttgcggagaaggcggctaggaaaggattgccccatgcgttgttcgcagttgggtattattatgagatcggtattggaaaacctatagatcttgcgctggctcagaaatggtacaagcgagtgagtacttgatcaaaactttttgacaagaaaaaagtagtcggattcagctcaacggattgaattgtcgtttcttctttgtgtttgttcaacgaaccatcaaaggctagtcgagctcatcatcctgaagctaaatctagattgtccgcgctctcaggacctaaggctgcaccgatcttgctcaaagaacaccaacatcatctggacgacaaactagtccgaaaacgaacagacgcgattgctcgctctcaacggaccagcctcgttcgttctgaagcgagtgtgagccatcagaactccttggctcgaccatcaagaccgccgtccgttacgagcagcgctacgtcctcttcgcgcagacatatcaacgctcaaacatctttccggtggtcggctgatgaattggaccgagcggcgagcatcgtttctcaattggaaactcggccatcctttccgtctgacagaaaagacatgatcgatccggtccagtaccatccagccgagtacttttctccttcgtacgacatgcctgatttctcgcatagggatgatcaagtcgattgtcatccgaggtacacccttcaggaggtatttgtgaactcttcgacgctgaacagacaacacccacctatggaacgagccagaccaccaagaacgagggcggggatggataattcgaggcaggaaggatcaaaatatcaaagcttccacgagatgggtttcgcccctgtcaaagctgaggataaggattgtgtgatcatgtgaatgcttctttgtcggtttcttctttgtctgttctttcctcttcgcagacgtgtttgttggctatctgtcatttgtgtgttgcctctgtgaagtgtgtttgatcgttatgtctgtttagattaattttgtgtgagagagagagggaggcaaggagcccgtctggttgattgaaatctatttctatatagaatgttccgattatttcttgtttttactctatcttatttatgttcttacttttagaggtcctcaggtctcacaacgacaccaccaatcatcccccacatgagcgcctcttttccagctgcgatgttttcttcctcgtcgtcgtcatactctccatcctcgtcctcgtcctcgtcctcgtcgtcccccgctccttctacgccacctacgaccagctttccgttttccagacgacctactcggatagcgttctggagtgctcctttcgcgcctccaccggggacgagcgtgggaagagagatggaagacgtgtcggacgggccgaagacggacgatcggaatttagattgggacgttccgttggaagcgtacgtttcgggagcgagctcggatgatgataggtcggatgtaacggttgcatttatagggacgaactggttcaggagaagagaaaaaaagaagagacaggatgagaatccaagtcatgtttaatattcagacttgtccgatgaaagaaaagaaaaaaaaagagagagagaaagacaacatgaaaatggacaaacctcttcagcaggcatcaacccggcaccttggtccaatagtccatccattccgcctcgaccttggatgaggtttttcaatcggtagtaattcaccgtggcttctctcatcatcatccggtcgtccatatcgatctcgtaatcgtctccgtcgtcgtcgacgtctgagaattcgacatatccgtccgaatcgccgtcgtcgtcgtccgagtcgtcttgctctttgtcatcggcaaggtcctctacttgcgcttttgaagaaggctgtttgggaagaggagacgaattgacagccggtgccgataaaggaataggggtggggttttctgaaggatgaacgtcaggatcatcctttgctcttgatgcgggttccccaggagcgctaggcttaggaactgtgggagggtcgatcgatcgttcgacaaccgtcgatttcacagtcggtggtaatgatgatggtggtgatggcggggggagagatgtcttttcggcagaaggagaaggagtagtcgcggacgtcggtgctgatgttgatgagacagctgcctttttcttgccggagaataccgaagatttcttattcgaagaaggcatggtaggaggagccatcttccgttcgaccactatcggcttgaccggaggggcttcttggggtgacgtcgacgaggctgccaatatgggaggagccgcttggtgaggtgtagatgttggtgtaggtacgaaagcagggatagaggcaggagcaggagtaggaatagggatagaggcaccaacgacggacggcttgggtttagcaagtgcgttcgctctgaagcgactctgcttgtaggctccactgcccgcgccaggtgtcctcggaggagccatcggccgttcgacgaccatagtcttcatgatttccttcttttcctttcctcccctctctttcggctcggtttctgtttccgattccggggcgagcggttgttcgtatgtctgaccggtggagagggacgaccgtttctggtcggccgcagagaacggaatggaaggaatgacctcgccatcagtcgtggaggatgcaggggcaggctcgatggccagacgagcggtcggcttggcctccaacgtttcgtgggggacgaattccttgacttgggatgtttccgaccatgtcactgatttccttcctttgcccttgccctttgccttgtctttcgcttgcccgtcttccttctccttctccttgcctttccctttgctgaccggctttgacgtgggtttctccgggccgacgtggttgcccgaaccgaggttctctggctctttttgcttggaccggtttgcctgttctcgctcccgctcccgctcttgctcctgctccttgatctcctccaactccaacatcctaaagatggcctccttgtcgtctggtttgagtccgatccgagggggcaacggcgcgggacgttccatcacgccggccttgcctctgccttcgttggtctctactggcgaagacccgtccgggccggacgagggtgggaggtcttctttgatgtgagcctcgaacgtctttgggtcgatctcgaccgtcccgtttttcgtcatcccggtcttttttcttttctttttttcttgtcaaaagtacgggaaggagctaaggggctaggaagtgacaagccaagcaaatagtgaggtcagacctgggaacgagaaaggtcgacgatgatggatggaatgggatgggatggtgaatgaaaccaagggggggggaagttgagggaaattctaaaacgtcgctcgttagggttgccccccgtcccaaacaaccaatcgatcaaccatccatcccccggccgtggggttttccaactggaggtgctttcagcctcccttctccccaggagcgcgcaattgtctatcatcaccatcgtctttcaagtcggtcttgctttctctcgtgcatggtctttgtttcctctcgttggagctacaagatgagtaatgtacattcatatcgtgttccttcaactctaccaaacgaggcggacagaaaagaaaaagaagttttggggaaaaaaaaaaaaagtaaaggagagagaaaaaaataatataaaaaggagctagcagacgagaacaatattgcgtgaacgggacggtaaacgttatatgaagagcagggacaagagagatgtattgcaaaagcgctcatgatgtgttggatgatggttgattcaatacgggggggg

SEQ ID NO: 1604 - DNA, 3042 bp, Xanthophyllomyces dendrorhous
gagaagaggaagagggaactagtggcgaaagcatttagaggtcggtgactacgaagcaaaggcaagaaaagaaagaggttagcgagagagaaagagaaacgttctggagagataacgaaaaaagaaggaaaaaaaaaagaaaaaaaagaaagacgtaccacatccttgagacgcgtcggacaccgttttgacatacttgtaaagcgtgccctgcttgacctttaacggcggggcgacccagttctttcgtctcctctcgagttcctcctcggagacgtccatgttgagggtgttcttgacggcgtcgatcctgacgacgtctccatcctggatgagcgcgatcgggccaccgacctgggcttcgggggtgacgtgaccgacgacgaaaccgtgggagcctccggagaaccttccgtcggtcagacaggcaacgtcgtaacccaggccggcacccatgatgagcgacgtcggcttgagcatctctggcatgccgggtccacccttgggtccgaggtacctgagcacgaccaccgtcttctcgcccgccttgatcgagccggactcgacggcggtgacaaagtcggcctcccggtcgaacgctctggccttgccgacgaactggaggccttccttaccggtgatcttggagaccgctccgtctggtgcgagatttcctctgaggattcggatgtggccggtcggcttgatcgggttgtcgatcggtcggaggatctcttggccttcccacaggtggccgtttgtgtggttccatcggtcgaggttctcgccgagcgtctttccggtgacggtcaaggtgtttccgttgatcatcccgttcttctcgaggtagctcaagatgctggggattcctccgattttttgcacgtcctccatcacgtactttccactcggcttcaggtcggccaagaaggggattcggtcagagaccgactggacgtcgtcgatcgtcagcttgatgccgaccgagtgggcgatggcgatgaggtggaggacggcgttggtggaaccgccgagggccatggtgaggaccaaggcgttctcgagggcttctctcgtcataatgtccctcggcaggatgtcgttctccaacatgtttctcatcacgctaccgatcgagtcacactctgcgagcttttcggccgattccgcggtgaacgaggaagagccgggaagggtcattcccatggcttccgttgcggatgccatcgtgttggcggtgtacatctggggggagagaaagaagaaaaaagaagaaaaagaaaaagaagaaaaagaaaaagaagaaaaagaaaaagaaagaaaggcaaagagatcagttcatgttcgcgggagggaaaagggaaagaaagccgaaaagaaggaacccaatgcgaagcgcaaagaaaatcaagagagagagactcactcctccacaggctcccggtccggggcaggcgtttcgaatgacgtcgtcctgtttttgagtgtgtcgagaaagggaacacaacagatgggacggtagagaacgaacaaccgagtcagccaaggaagcaagaaatgacgaatgaatgggggagctcgggcgagtagagaaaaggaactagaagaaaacaaggtcaagcagaagaaagaaagaggacttgcccgctcgagctcggcctgttcggtctctccgtcctggaggtactttccgtaggcctggaaggcgctgacgatgtcgagcttgccagaggacgcacactgaccggctcggatggttccaccgtagaccatgagaccgggtctgttcaatctgccgagtgccatgagggtaccgggcatgttcttgtcgcaaccgggcaggacgaccattccgtcgagccagtgtccaccagcggcggactctacctgatcggcgatcaaatctcgggattggagctgggcggagcgggaagaggaggcggaaggaggcgagaggaggcgagaggagtggtcagcgtttttgtggagggctgctgatggcaggcgagggagggagagagagagagtgtgtgtgtgtacaagaggaagggccagacaaaagagagaagatgcttaccgagtaggacattccaaaggttcccatagagataccgtcggaaacaccgacggttccgaattggtaaccgatcaggtcagactttgcgagcgagcgtttgacccgttgaccgagtccgagcaggtgcttgttgcatgggtttccttcgtacctgtggatgtgagagtacaagagtgtgagtgagtgcgatcacaccaacgcaacgcaacgtaacgcaacacaacgcaacgcaactcaacacaacacagagaaaagaaagagaaaagaaagagaaaagaaagagaaaagaatgagaaaggtgaaaaacgaccgaccacacagaggcgacaccgaccatggccttttcaaagtcagacttttgctcgaccccatcggtcgcgtacaacatggcctgcaagaggggggggatcacatatgtgagcgtgtgcagacacgaacaagaacaaaagcataaagagaaacccacttgggaagcaccctgggactttggctgggtgatcgtcctactgtacttgttgatgggacctttgagagccgggctggtgagcccgaaggaccttctgagggcggggcttgagaggatctgcctggaggacgaggcggggactagcatggctgtgacgggggatgatggatagatggatagatggatggtgaggaggggaaagtgaaagaaagaagtaagcgtttttttttgatgatatcttttttgtccaatgggatgagttggaaaaaaaagaagaaataaaataaaataaatcaagatggaaagaatgctcttttctctttcggctgatgactcactgggctttcacttggaacgaagtcggcgtgggaacgactgggttggtgtagagcgaatggagggatgcgatagaacgagttgcccatcgaatcatcccaggtcgagtcaaccaagctcatcctcttttcggacgcccagagccgaaagtatagagaaaggg

SEQ ID NO: 1605 - DNA, 2942 bp, Xanthophyllomyces dendrorhous
ccctccaggtgtctccaaggctgtcgccaacgtcaacgacatcctcggccccgccttgatcgagtccaagctcgagcccacccagcagaaggagatcgatgacctcctcatcaagaccgacggtgttagtaactttttttttctctttcccttttctctttcgtccttctcgtatcactcacactcgatcaccatctcactcacccacccctctagacccccaacaagggtaagctcggagccaacgccatcctcggtgtctccatggccgtctccgaggccggtgccgccgccaaggtacgaactgtttcccttttgaacccttgctcccaaccttacggccccaacttatcttaatacttttgctttcccctttctcttcctcatccacagggcgtccctctttaccagcaccttgccgagctcgccggtgtcaagaccccctacgtcctccccgtcccgtgcttcaacgtcatcaacggtggttcccacgccggaaacgctcttgccttccaggagttcatgatcctccccaccggtgcctcgtgagtctgccttaagggttttttttcctcttcccattcatcaaactattctgacccttgtctttttcattctgcctgccttctctttgtaatccccccccctcctccttgccccccgacagcaccttcaccgaggccatgaagatgggttccgagacctaccaccacctcaagaaggtcatccagaccaagtacggaatcgacgccaccaacgtcggtgacgagggaggattcgcccccaacgtctctggagccaccgagtccctcgagctcctcgtcgaggccatcgagaaggccggctacaccggaaagatctccatcgccctcgacgtcgcctcctccgagttctacaaggacggaaagtacgatctcgacttcaagaaccccaactcggatccctccaagtggatctctggtgaggagctcgccgcccagtacaacgacatggtcgccaagtaccccatcgtctcgatcgaggaccccttcgaccaggacgactgggcctcgtggacccacctcaccaaggacacccagtcccaggtggtcggtgacgacttgaccgtcaccaacgtcgcccgaatcaagaccgccatcgagaagaaggcctgcaacggtctcctcctcaagatcaaccagatcggtaccatcaccgagtccatccagtccgtccagctctgccagtccaactcgtggggtatcatggcctcccaccgatcgggagagaccgagaacacctacatcgccgatctcgccgtcggtctccgaaccctccagatcaagaccggagctccctgccgatcggagcgattggccaagtacaaccgattgctcaagatcgaggaggagatcaaccttgccggtggacaggctctctaccccggactcaaggccttctccaagggtcttgccgcccccgagttcgctctctagatgtcgttctttcttttctgtttttaaatattcccttttccatttcttttgggttttgccaatatcatgtttaatttcccatgcacattgttttctcctcgccagaggatccacataacatgcctttgatctttgtgtgtgtaagtgtgtgtgtgtgagatacaagttctatggaaaaagccactgaacagagtgtgttaagaataataagaagaagaaattaaaaaattaaaaaaaagacacgccttacgtaaaaaataaaaacctctcggggggaagtcagcccaaccctccgcttatcgactacagactaacgaccgaacgaccaacttctcgcaacgtacactccctcactcactcacacactcacacactcacacacacagaaggaaacaaacgacagaacacaaaccgtctgatcacacatgagctcgctttcaatttttgtgttgggttgtggaacgatgggtgtcgccatcatctctggtccgttctttcttcctccggattccttccctttttcgttctcaaaacacacaacattgaggtgagagaaagacctgacgagtctactgtcccgaaaccaatccctccccttctctgggcctggctcggttcgaaccatcaggtgtgctccaatcgatggaggatccgttcccaaagagatcctctgccagcggcacctctactcctatcggcaacggcctgggcgagggcgaaggagagcctctgttaggcaggttcatcgctaccgtcggtcggtatgttcttcctcaaccttttccttctcttcgtgtttggtaatcgctcctttggcgacaaacacaaaagaccaaagctgaaatcgaaaccgaatcatccccccacgggaacgatgggcgatgacctttcctttctttctttctttctcgtttggaaaatcaaacactaaagaccggaatcagtaaagagactccgaaagacgttcgcctcgttgcccaacgggatcggagagaaagttgaggtttggtcggccgaggggaacgcgaaagccgctgctgagtgtgatgtcatcctcgtctggttcgtccctcttgcctctgtggtttcggtcaaggcttctctgagtgttgattctcaatctttttacctttcacccatccatccacccacccaccctttctcttctgcgctcaaacttcacaccgaaacaaaactggaaaacagctgtaaaccaaacttggtggccggccttctcagcgagatcccctcagaggcactggagaacaagctggtggtctccatctgcgcgggtgtcaagatcgaacagatgaaggcaatcttgccggctagcacgatggtcgttcgtgccatgcccaacactccttcccgagtttgtcccttctctctttcttccctctttttctttctttacggacgtgcgcaatgcttactgagatatgaacggttggcggaaaaaaaaaacca

SEQ ID NO: 1606 - DNA, 789 bp, Xanthophyllomyces dendrorhous
gcccacgaacctgctccagttcatcttttcctccatcggtctttgccggacgctcgaggagaaacactttgatgcgtgtacggccctgtcgggatccggcccggcgttcgcctgcgtcgtgttggaagccatggccgacggcggggtgatgatgggtctgccgaggaaggaagccttggagttggccgcgcagaccatgcagggagcagcgaggatggtgctcaccacggggttgcatcccgcccagttgaaagacaacgtcaccagttcgtgttttttttctctctctcttctttcttttctctctcttttccttcttggttcttactcttctttttgtttgtcttcccgatctctctctctctctctccctgatctttcctctgggtttccacaaaagccccgggaggttgcacgatcgcaggcctgctcacactagaagacggcaaagtcagatccaccatggccagagccatccaggtcgccacccagcagtcagtcctttccctctctcctctcctcttctttttttttctttctcctctctctctctctcaccccaccccacgaaccaatctgacgaaactatcgactttcggctttcggcgttcaccttgaaatcaccaacagcgccggcggactcggtcaagacaagaaatgaaaacctcaagaagtcaaccttcaaacccagaccagaccagaccagaccgggtctgacctcttgttcaaacgtatccttgtcagccaaccccgtttttgtcaataagacagaaccaccacccccccccc

SEQ ID NO: 1607 - DNA, 18502 bp, Xanthophyllomyces dendrorhous
gcggacgatgttatatgaatgaacttgaaactattctgtagagatatcgtctcttgcctcttgcctcttgcgtcttacctcttttccttcctttctccctcccctcttctcttgctttcaagactgaccggtttggcacgaggatgagaatgcaggaagaacatgaggatgctccctcgaagggttttctcacgatgagacactgtctggcatcgatcaaaagcataaagagtaaacagcaaggagatagagaaagaaaagaaaagaaaagaaagaaagaaggaacagatgaagatgtgcggctggaagaccggtcgagtgtgttggttggtataaatacttgaattgaacgatgggagaggatctaaagagataaaaggagaaagaaaaagaaagacggaagagagatgaatgatacagattcttctatatattgatgtccaaaaaaggaacaaaataagagagagaaaaaaaaagaagggaaggaagtgaaagcaaggccagacaaaggaggagtttagatccctcctttcataggttcggccacgagaagtgctgttggcgacaagaaagacaagttcgaaccgtttgtcagtacagacaaataatctttaacgcaaaaacaaaaaaagagaccaccggcacgcttaacataccttctgccgtctccttatcctgaccggtcagaccttcatcgtccgcgccgttcgcttccaaaaacgcatcgagatcagccatcactccgtcgtcatcctcctcctccctgcccgtcccgtcgacctcatcgtcgtcgtcgtcgtcgtccccaatgtcatctatcgcgaaccgttgtcgttccatcagcgcgtcgttcgctctttcaaccatctctctttcttcccggactttgttggcgagagtgttaccggatgaagcagacgcaactgaaaccacagaactgatcgattgtcgtcgatccgttttttgcgatggactcagaagagattctctcctcttgggctcgacgaatgtcatatcggtctttccaatcgccggccgatgtacaacctgtcaaagttaccccccccccccacacacacatgcgattttaagttttcagttatccaaacaagtctcagaaaaggaagaaaagctaccgacctggtgctttccgaatcgctgtcctaccccatcagcaaactttcataatgatcaagcctcaaattagtatgacggtgttcctcggagcaaacatcaagacaagaaacccaagaaaactcaccttgttgaacgccgacttgttttcgtccgttagaaccatgcccatgattcctccccatagcccagacttggcttgctcagcggccttgttactgtaatcctgcacaggctccaactggaaggagcctgacaattctgattcaaagaatgcctccaatacctatagccgattccaaacatcgccagatcagatcatttgacataaacatgcaccacaaagaaaaaaaactcatgcactcacctcatcggccaacacaaccatacgaaaagtggctagagactacaagaaaaaaaaccaagacagaaaagaccaacaaacgtttgcgcactgcccatttcgtccaaaataataataatatagacttaccagataaggcaagctgtgatgaccaggagtagagactgagctactcctcgatctacccaacacctggtcagactctgaagattcactatcgatcaactgctcgacagcagtcgaccgtctagtctcggggtgatccggagaggtagcgtccccgaattcatacgcgttcaagataaatttagagactgcagcgaggaagacatcgcctggttcgtttcggaacacgaaaagcaaggattccgacagctgaagcacttcatccttggtcaggaacccatcatggttgttgtcctggcacacaagaaacatgtcaaacgaactgtgagtggggtatggacgaaaagaattgggtgaccgattcatcaagtaaacgctcacgtgtaagttgaagaaccactctatagactccatcagccctgcgcccatgatcttgctgaggcccgagacaatgtcctgacaagaagcaatagcgataatttcatgttgttaatccaaatgcggtacgaacgaacgatgcactgcttttctttcaatactgaatgactggaaagacaaacctgtaacgaaagggtgcctttgctagatctatcccaggagtagtatattcgatcgataagatcgtggtccgctatctgtcgatccaatcgctcaaagccgagtgtaatagtcacagtgtcctctcttgcccaagttaagacctcggaaaggaacactctgcacatgaaaagcacatccacaagtcaaagttgataaacatatagtgtgccccgatagaaagaaacgaagtggaagaatcaaatacttacttgaagatattgagatcgatccgggtctctgtccggccatcatcggcgatagcgctcgttgtcgtcggtaaactatctccttctttccttttcggatccgaacagacagcagtgaagaatttatcatagatgatactgatttgttcttttgtgaaagacccaagggatttgagatttcggacggctgcccgtttcgagaaggactcgatttcatccgcaatgtccgcacggaaccgtttacgttcagataggatggtttcctcggtgataatattgaattcacggaaggcgacaactagtataaaagaggggaggtaagacgttaacagggatgataatattgaggatgattgtcggcgacatacctagaagctcttggaaattggtgattgatctgacccggggctatcaacagaccgcaagtcgaaacatcgtcaggatccatcgtattcaacaacgcttctgatgacccataccaaactgaggggctaagcttacatcatctgactcaggatgggccgagtctccaattgtagcgaagtaatctctcatcaagctagagggcgcatcgatccataagttagttcgaaaagacagacaagatcaatgtcaatgaaagcgagatgacaagataaacgaacctgataaacattccatcgtccgtcacgtccatcaaggcctcaccgttgatcttcaatatagcttgaaatttctcggacgagacaacgatcgggtcagatgtctgcagctattccattctgattctagataacatgcgtcactcgtcgaagaagaaggaaactagacctacagagaccaatctggaagagaaccttaggacccattgccatgaagcagtcacatattcgatatgcaaaaatcaaaggcatcgaattgatatataacgacaagaaccagctgtttttcgccaatcgttcaaataaacccctccacgatttatcagttcatgtgcagatatgcaaatgtagacggagtaaaaaaggacaaacggtagggaagcaaccgaaagttggacgtccacacttttaaggtgatcttgaatcatcggaaggcatttaccaaccaagctctcgaacaccctttggtccaaaagtgtaccatgcattgacggactataaggatgttttgttgaagaaagatggatgaaagaatacatgttagaactacttcatatatgtgggtaatggagattatgtcgatagactgccaactgacgaatagtatccaggctaaatatccgaggagaaaccgagaaggagagtcaaggtcagaatttggaagagataactgatcaacacaaaaaatgacgagtttgaatgtaccagaagtctatcacacaagacctctaacaagaagaacgcttgctcctgtatcaccgaatattaatgaatggaatacagcgcataagtatgatcggcctttgcagaggatgaaagcgctttcggcttggacagacctccgacatgtaactgagggtacaagagaggaataattggtctcgaggtcagcgcgccaacaaacaaatgagagtagagaagatcgaaggcccacatcaagattgcggcagtgaggatattcatagcttggcagtacctaagacaaagaggaagcaccagtatgaaggtatatatattagcagacgacagggcggtaacataagaagataacggacaaaacgaaacaaaccctagttctggatttctgaacgagtacgccgtcaataccctccgaagggattctataccctgctctgtctggaatcctttgtactctggcaaggatcggtagagatccttctcgatctcttccgtagcggaggtgactattcctctgttatcctccaggatcttctcgtataaccctcgattagcaaatcgcaggtctatgtttcgacgcgcaagtttgtaaacaatttgcatgaatccgtaagttggttgtatgaaacaaatactggaagaggtttgatgtacaccaagacaaaagaataaaaacaacagaagggacgtacgtatcgagccagagaggacctcccagagttctcctcgaagtcgggatggaagaccaacttgcaacaaccgctggaaggatggataccgaagcactaaaaatgacatcaaaggtcagtcaacaaccaaagcacttatgaattttgcaaggatacgaaggaaggagaaattacaagtcaatgatcttccatgaactatgtgcgtagacaaagagaacaacaccagctatcagctcgtcaccttgaatacatgtagaaatttagagcgatggcgatgccaacagccctagaacttggaaggaagcatgacaaacaggatacttaccggcaaaatactctttccacagcttgattttgcttctctctctgagcttccgcggatctccagggaatccgaatgtctcgcctaaccctctctggtagactcctttgctttcgcctccgggtcctcttgcatcaccttcggccacggtggatatcagactgccttgaggctcgtcatcgacagaagccatgagatactcggagtagagtgtagcagtgaacggtttgagaagcttcatttgtggtaactaaatagatacaaattgagaaagagggacgaaagagatgagctattggtcgtacgtaacacggatcgagggcataaatgccatgagctgatagacggggcttacttgcgctttgagagcgtctcgaagaagtatacaaaaatgttctctgagtgagcgtcgtccagttgaccgggtatataagttcgagatcagtcatagagttatgcgcatagtgtaatacgaaacgaatccttgaaacaaagatactcacgccgttggcagcatactggtcaattgcaaaatctacatccagaccaacactcagttgttgtgattaattgttgttcgatggagtattgaagttagaaagcaaaaaaagcgatagacataccactcttaacccgtgccaaagagaagtactcaatgcaaacactccagctctgctgttgagcctttcaaccctgcggatacagctcagcgggatgacccatttgatcgaccgtttatccagcgaaaggaaacacaggtacggagggaggagatagagtcgaccagcctgcaacagtaagatcagatgtagtaaaagaggggtttgacgagcatatacaggccaaaggagagtagaagtgaatcaggatttgttaggtatgagcgttcaaaatcatcaggaaccatctcccttcgtgggatataagtctcgtctttgaccgtgtttgaagagattgtgttatagatctaacatctcttcgaatcggatcaaaagcgtaggcaaaaagaagagagatagaagcgagaaagaaagcacaagggaatacgcacatgaacggcctcgtcagaaatgctgaccacgcaattgatctccattgattttaagctggcatcttgttccgagacagaagggaggttgaaagaatgacgagtgtattcctcctttgttggttccttctgagctcgaaggttagggagagccatattctgaccggaagaacaagtagggagatgagtagatgagagatgagagatcaagcacggatgcggcgtaggtcgcaatttcgaagaatgtagctggacgtccttggccgtgctctcccaagtctcattcccgctcttctacctcgtattctatatgtctatgttcacatcacttacagtgtgtagtctctagtaaatgttctcttcgaaggaataacatccagtataacttatgataggatagaccacatagaagaagatgtttcatgtgagtgatatgcgtcgcgctcttaggactgaataggcatacgtcctgattacttttatttagttatgagtaagtatgtctcatttgtatttcaattctctcacgaagaaagatgtaatcaataccagagactcattgcaaccattcagcatagaatccatacatcacacagagaatagagatagtcagaagggcactgttcgattgcaaagtgagaagattgtacgatgaaagagatgcctgatgaagaacttgtttacttgtttcattccccttcagtttcagcccgtgggtgtgtcatcacaagaaggatctcacgaaacgcaaggccctcgagtcttcttcctgtgatacatctgctcacgttcgctcaaatatcatcgtgatgttccggaacttcatttccctcagtcaaggctgtcacgcgtataaaggtagaaaacatagggagggtacgacccgaaaacagagacgggtcgaagattgagagcgtaggccttgtacagtgtaggcggaatatttcgaaatcgaataatcggctacgccaagcgcgccgtttcttcaccccaaagctcttgatcatattatcgttgccgctgccttcgtttctctaattctcgttcgcattcgacggaacaacggatgggaagaacatcaaggcgaggctcatgtctccaaccatttctattttttgtcgtttcttttcctactcttctcctgtttttctcatcttcttctcatcttctttcgaccttgactactacatttcttctttctgggtcatcccttccttcaacatttccctctgcaacagcatattctgcccaactgaaaatttcgaagcattagaactagataacgaaaaagggttatggaacaagagaaagaagaatggtctctgccgtgtatattccctgtccacttccaaacggcttgctagagtggccaccgatgaccgagtacgactgcatgtcaagaaccgcgttcatcgtctgctacatcttgactatttgtacgcttctgcctcttgtcgttttctttaagctcgcacgggttaaacgctctcaagtgatcctcaacattcgttttccttctcaatctacctttaatgacgctttcggtcaccgaaccaggagatctaacgagacctcgtattgtgcttcctatcgttcattcacctacaccaacactgtccggtcggactgtcctcatctatgggaacagctttttctagcgctatgcttcaacgcgtcaacggccctcttactgtgcgtcttccggtgcggcttccaatcttgagcgctaaagtcgaaagctgacaacctgcctaaatttgtgttccattcggtttctctactcgtcagaatatctgctcccaaacatccaaataaagcactgtgtctgctttcttcagctggaacgatgtccggcacagcttttgtggcagttgccgccatggacactgtgctcatggtctggggaatgcttcgtagagcaagtggaaagaagatttggctaaatgaatactttgagaacatcgtcagttgattgatttctcgtccgtatctcatttatttggttcatcattctgttttgatccctaagatttactatcgaataatgtagttgctctggctaccatgggccatctatgtgatcttcttaccattgaatcttgtggtgagttaagtctggtttcgtttactggtcggcgttctgctcctaggtactgacatccggtccattttccacataacaaatgaataatcttgattgtaccggaatttatcgctttcgcctatctaatactaaccctgtatatcttctctacgccatctagtatacggccttgaattcagagacactctacgtgagcacaatgacatgctacgctgacaatgtcatgtaagaccttacttttttgttttgtttttatattaaataacaataacaatataacctaattgtatctacttgagttcattgtgatccgcaagctcattttcgttctgtttggactagttagttagtacgacgttaactcatgtcgtcgttggaatatccttagtcgctgctctcatctttgacagtaagttctacactttccgctgttgttccgaagacgaaacacaccaaccaatatttgcttctttcccgatcataagtctggagtgtgatcatgctgcttcttcaccggcacagagtgggaaagacaacggcggcggagcgagatatggagtggtctcgtcgatcatacgaatcgaccatgactgtcaatctgcccatcatcagtcgcgtgctcttatacagtctcagtacccttggtggactgttgtaagcttttcttctgatgttaactcttatttctcgtcttttcatcgttcgttgcgaccgagatcaacctaattccccctggagtttcttatcttctccccttctttctcttcaattgaaatcagagcggccatcatattgtatgtcaagccagagtcacacgctccagcggtctatcaatcgacttgtggcgtgtcatgtttctctatttttggtttccaaccggacatatggaaaaaaacctaccagtccctccgtttcctatcaacatctgtactcaagtcacagacatcgacgtcaagtccgacaccaacaagaaaccagaaagagaacgcacaagcggatattgaatcaggacaggattcgtcttacggtccgaatatcgatgatctttcagacctgagtatacaatctcggacatgttttagatcgatacctctacaaacgatgccatctggatcaagacggagatcagaatcaggttcgagcttcaatcaccacatcagcgctagcgacgacgatgaatacgagaagatggaagcccatataacactggaagagtcttttcgatctggcaagacgatgaatcgatcggccgaccaagttgaggagggtgttgttacgtgtctggcgtataatagatctactcaagaaccagttgaagtagaagcaaaagtaggttcatctggtcccatggaatcagtgggtaggtcggtcgagtcggaagcagaggtaaagctttcggcgaggaagtagatgccactgggcggatgtagtaattgtttctttcgctttattgtcttgtctggttctgcactgtccgttggtttgtatctttcttttgtgtgaatatcatcaaatcgctcttcgtcggtagtcagtatcatcgtcttctcctctcgtcatatcctatctgattttattatgttattttctgcttttacacgttcccacattctatgacacatgacgcttttctcatccttctgcctgcccgtcaaattatacctctgtctatctgtttaaatatatatacgcatcatatttcaatctcttttgcacctaatcatttgctcgtatcgtatcaagtcatcatcgaccggcacgtgatctatgtatcactattaattctcacttcctgcactccgctctggtttcccagaaagaagaaaatctcgccaggagatgactagtacgtccgttcgtctattcaagacctactttcttcatctggctggctgagcgacgaggaacatggttgctgatcgacacacacacgaacgcacgaagaggttggttagcaatgtgattcacatcatatcaagggagagatgaagactgccagaagcaagaaagaaaaagaccaaaatgaaaagtgcaaaagcaagtaaatacgttatagatttaaatagagaaaaaaaagaccatgggttcatgaaaactttataaatttaatgaggggagagatgaatctccgggtgtacattcgaagtacaattgagtgtataaagacaggatacgatgtgttcgtttgaaaaagattgaaggaaggtattttgagagaaaaagacgttgaagtgtgtaatctatgaacccaagaaaagaagaatacatcttctgttttgatcgatgaagacctggttaaaatgaggaaaacgtagaaactataggaagcgtacgagcgggaacatgaatgacaacgaaataataaaagctaaaaagagagtgtaacgaaggagttaaagaaagaagaagacaatggggcaaacccataagtaggccaacaaagccttgtctacattaaagcttcttcatatccggctcctgggcatcaccgtaggctggtggggcaaaaggcgcttttccagcgtcttggacaacgggcacctgtccgtctaccgggtcgtctgaccttggtccagctttgtttcaagaacgcagataacccaatcattagcagtcggctagaaaatgattgtaaacaaagaatcgaaaaaaaaaacatttgaaagggcgtactgtatcgtttgtgagcgctgacagcgtaccaaataaaagaaagcaacatgacacccaatgtgataacccaagagctgtcgtagaggggtaaggagaagaggaaaaggcaaaggcgaaagatcagatcggcagtttagttttctgtgaggaaacaaaagacgaagaagaaaagacgtactagttgaagttctgggcggtgatgggttggaaagtaggctacattcgttaccccaacgagaaatatcagcgccagtccggagaaccctacacaaaaagataggaccgttgtatccaaaagggtatatagaaaacgtacgaaagacaggatgatacactcgaagaatgtccagccgaccatgagtagattgatgatcaaaccaagggtctcacccatctgttttcgaccatcagcatcacaaagttatatgtcagactcagcgatcggtaccctgattgaaggaaacaaaaatagatgggaagcagaaacacttagacttacgtagaaaggacctggcacaaattgaacctcgggatggtttttgtagattcttcgggcaatgaccgggataacatatgagatgtccaacgcaactgcgcacctgtttgtattcaaggaatccatataacgagataatcacagcaatgtcagggtttggttttctattttctacatgcaaaagggcatttgaaaatcgacgatgaaaaggggcagccaagtattgtgacaaggacgaacatggaaaagatagcattaacctagagcataagtttgaccattaattttttttaaaaaagtgtcaaacaacgatccgcctataagtagaatcaatcttctagaaaactcacggcaataccactagcgaagttcaaagctcccagtgccatactgaaaagaacgacggcccagacggcaaacaatggggtttgagtggtcttgttcaaccttccaaagaatccccaatcaggaagtgcgtgatcacgactatcaaatccaggcgtcgaaccagtcgaacacgtgttagtttatatatatcgacaaagaggaggaatagatgtagattagacttacgagaaagcgtatagagttcgggagtttgcctgtaaagcagtctgaacagtaaagaatgctaccaaacagatgaatgaccagaggacgagtgttcctgattttccaatccgaacccgcatgatctagaagcatatatcccattttttttcttctgttagctccatatcctcagaacagtaaaatgattgataaagaaatataaatacctcaatgaaagcttggccagagaacccaggaagatcgcgtatgtcaggactgcaaaggatgagaacaatctgtgcgctcagaaacagataaatcaatctcagtacaattttgtataacacaaagccacaggtacagtaggcactatgatgaacacgcacgtttagcaaccatccgatgactccagtcccggcaacagcaacgaagatggcaacaggggccgcgatcgccgctctcttgacctcaaaagagatatgagcgaccgcgtcgtaatccgtcatcgtccactggacactgagtaagccaaagaggaaggcgattccatcggatttgtagccggtgactgatgacgagaatatcaagatgactctaagagtgggacgcgaggaaactctacactgagtgggctgtaaaaatagaaaactggactagatcgtaccattgttgatgtctccaaagacataagacgcggcttgcatttcgctcctgggagtcgtagccaagaggcagatgatgaccaagaaggcaatccctgtttttgaagcattaatttggatacttcagtctgcaatctttgaagcatgcatgaaaacatgatagttgcaaccaaggaacaaatggaaaagaacaacataccaatgttgatgaaaacaaaacctttggtaaagatagcgagctctctagtcctcaaagagttgagcagtccgtgaaggacgagtaacccggcgaacaaaccccactgcatgatcgctgtaacgacgagatctccgtctttgccaacagagacagcagcccagatcatagtagccagaccgaactcggtcgacgcaactccagcaacttggccgagaaggttgagcctagaggacaagaaagtagccatccacgtgcagatacagtcagtaatggacgcatacttgtagagagttgcgcgtgaaaagaacgtaccatctttaaagacgattaagaaaagaagtgcgatcaagagttagattgggcgatgtatgtgcacatgcatcttgtaatcacgaaatagaacgagaacatacccaacgacccatccggtgatagctcggtatttctaaataagcaaggaaagaaggccagaaggaaaagacacgatcagctaatggctttggataaagggtatatttacatatgaacttacctgaggaacaagccacgcgctggctgagtatacacctccacaggtctagttgaaacaaaagaacggcgaatatgccggcaagcatcaaatcaatataccgttcaattcgatttatatgacgaacgagaaactcgacgaccaatcgatgatcccagatagtgtacgcacaggataagcggaaacaatctcagcaatggaagctccctgattttgtaccaatgacagaatgatgacaatgaggttaactacgaattctaatatttgaagagagaagagtgaaacacgtaccaacgtcatgttcataacggaacccattgcccaacaccaaaccacacttgctggtccaccagattgctattgatgccgagaaagagagatagacatctcaaacggttcttagccagaagttcccgttccgtttcgaacatagcgtaggtgtggatgtgataacagttttgctagaaaacacaaaagattgcacataccaacggaatgttgaaagtggtcgcgattgacgaagacattccctgcgaagcgtcgaatatagaaataggaggggtattgaggtgtgatcggagatacgcgctgtaatgattagtatatgcgatgagaacgaagcaagtcaatgggtcgtaagagaggacaaaccatgatggaaaaggcaaaagagaaggttgacaagctagaaaacgattgttgaactcgaaaattagtatttgacacacaagacagaagtgaggaagagcagacgggcactcaccttccgaactccctgtggaaaaaggatcggacatgataagagaacgagatggctagtcagcacgagtgtacggccaagaggacttgtcgtcgctatttttcctcaagtgtcctcaaagaaagaggatttcttcgtcggacagcccaaaagaagggtgggctgtcttttctcgttacgtatccgaagataagtggtcccgcgctggggtgaatacaattgtatgaacgcaaatcgcgcacgaatccagcgcctcatgcagttgtcaaattattcgattgtgaaaaacgaacaggagaaacaacatgcctgaagaaagagaggagagaacgtatccgaaaagaaagagaagaacaaaagaaaaaaaaagacaacacaactgtctgccaagaacgaacctaacaaactcattcttcagtccgaaccgtttctctaccaacgcatcatccgtatctgtgcttccgacagattgaaggtgagcctctggatcagcagcgtccatcatcccgagggacacctgaaaggatgattcggacatcttggaaggtttacttgagaaggcgaaagggagagggagataggataggaggtagaaacagaaagagaagggtgcggagcgaggggaaaaagtttcctcatctgttaagatagcttgatcggcgctcatcggagggacggtggtcagtaacattttggatcagcgtaaccaggttacacgcccaaaatgttacttataaggaaagcattctccttagttgcagcagaattcctattcagaaatcctatcatcacggaaaactgaaacatcatcccatgggtatctagcagatgaatcgataagacacacataatgacagatataggggtagtgatggatgctatagggaaaacatttgacacgaaagttgacactcgattgagcgggagtacgcgagagaaccttaggggcattacgaaagccagacgaagatgtgcgccccggtgttatctggaccatctcttttccttcgcataccacctactctctttcgcccttgtccttctttcatcacctcccgaacgttgtgccctctcaaccatcaaacccacatctatcttttgtgatactaaatagggattacgactctgttcacgactgtaccttaaaacacacatatctcttcggatgacggtctctcaatcatacggagatccggatctcgaggacgatgaggaaaactcgctcgacgaaggtcttgcgatgatggttcttcctcactttactgccaagaggcatcttacaggtggcaatcctagagcttgctccgagagtgtgtatcccataagattcctttctcgccgatctcctttgtacataaacacacattttctcgtagttgaccgatttttcccattcccttccatctcgaatttgtttgattcgctctcattcagccgatcagcctctagactggcgtcttcggtcaagattacgaacgagtcaagcagcattactcatctgtctcaatatcggcactcctccgcctgacttcctcaagattgcggattgcgcaaaactagaatgttgggtagatccctctggtatgaggccagagaaagctcgtcagtcttctccttccgtcttctaccttgtccttacggttataatcagtatagcttatagttaagcatttacattcacgtaatgacctcatctctatattactgctggtcttagtcgaggaaattggaaagaacttgcagcgacaatttgaaactcttgctcagaaagttcggttcaaactggtgagagcctcatctcctttgtccatccatcgacttcaattgcacatagaattcacatcacagctgtcttccagtttctggatccagctttcgaagacaccaagaagctctgtcacagtcttcgtaagtctgccaaggatgaacgtctgttgttctactacaacggacacggtgttcctgcaccaacggctagcggtgaaatctgggtgttcaatcggacgtacacacagtacatacccgtcagtctattcgaccttcacgagtggttaggaaggtttgtcttgtacttcatcgtctcctaccatcttttcttattgttctcccgattactaatagtctgcccggtctcctgcttcagtccttgtatctttgtatgggactgctctcgtgcaggtaatattctcgacaacgtcagtcgactggccgagagacgcaatgccgagaatagaaaacgagcttcttcagataagccctcgtcatcatcaggagagcaaccaggctcgtcatcatcctccttccgaaaggacgaagatacaaatcccgtcgatggtggagcgacctcttctccttctctccgagattgtatccagctagccgcttgcggcgcgaacgagactcttcccatggaccctcagcttcctgctgatcttttcacgtcctgtctgacctccccgattgagatcgctctaagatactttgcacttcaagatccactaaagcctcaaactccaacggatgcgccaagagcgcgagtgacgcttgagcagattgggcaaatccctggagatcttaaagacagacgaacaccattgggtgagttgaattggatattcacctcaatcaccgatactatcgcttggttggtcttgcccaaggatctgttcagaaaacttttcaggcaggacctcttagttgccgcgctctttagaaacttcttgcttgccacgcgaatcatgagaacatacaattgtactccacgatcggaaccagaattaccgccgacgcaacaccacccgttgtgggactcgtgggatcgaacgattgatgcttgtcttgcccagctaccgaatctattgaaggcggaagcttctgcccgagatccgacgctgcctcctttccagtacaaataccaaccttcgaacttttatgttgaacatcttactgctctcaatgtttggctattcaacgcgggtgtcgttccgagaccgctctcgtttggtgattctaatacaccggcagtatcactcgttcatcaggaaagacggccaccggagcaactccctatcgtcctacaggtccttctctcacagactcacagactgagagctctcatcctactttctaagtttgtcgacttgggcccctgggcagtccgtcaggctcttgatatcgggatttttccatacgtacaacgacttttactgtctcccgcaattgaacttcggccagtgttgattttcatctggtctagaatcatggcggtcgacaagtcttgccaggctgatctcttgaaggacaatggatttgcttacttctcgagcatcttatccccctatcagaacacaaacactcccttgttgatgtcgattccaaactcttccgaacatcgagctatgtgtgcgttcgtgctctccatattctgcagggactttcgacctggtcaacaagcctgtttggcctcggacgtttttgcctcgtgtttgtaccgaatgaaagatgatgactatctgctgcgtcagtggggacctctgtgtatcgcccatctgtgggccaataacgatgaggccaaagcgcttggacttcagctcggtgcaccaaacttgttgtgcgagatgctgagagacaactcggttgaggtccgagcggcggttctgtacgcactcggtactttctttggagcttcaagttcgagcgatccaaacgttcgtggaggtggtggatccggtgttcagcttgatcgatcagaaagggatcaactacggacagagattggaatggccacatccgcagtattggctctcgatggagatgccagcccgttggtaagaaaagaactcgtcgttatgctttcagctatcgttagggagtggagaggctggttcgtcatctccgcatgggcgtatgcagaggacgagaagattcggctaaaaggcaaaacgagaagcgcacaagatccgcttgctagagttctcagggaatgggcagggatgccaaggtcggagggaagtagccgagcggaaattcaagaggatcagatgattctctcgagctgcagcaccgtctacactgctcttctggagatgtcggtagatccttacacagaggtcgcgtctttggcatgtacagtcgtggattacttgaccgcgcttcttcttgactctgctttcatggttgccgatggatcgtccatcgagccgtcgtattttgagaaggccccacctcttcgaccagactatgttcatacctcaggcccggctacatcaacaactggctcttctttccttttcaatccgaccactccgacggcgatcccaaactttgtgaatcagacggtgtaccctttcccttcgaccgaccttccggttgaacttcagccggctccgacacctgaacatcatggtcatcatccgtcgaggaaccaaagatcattacttcgaaaaaacgcgtcgttcgcttctaggctaatcggtcttgccggtctaacccacccatccacgcccgaagaagaagaagatgaggtcccaacaacgatggcagagatacatccacctgcagctggattggataccgctcattataaatcaccctaccttactgcttcgacttcttcatcgtccccttcaagctcccgacctaaaacagatcaatcttatgtgaatgcatcatcagcttcgatgacatcccctgcatcct

SEQ ID NO: 1608 - DNA, 24634 bp, Xanthophyllomyces dendrorhous
cccatagaccaacgacgccatctacattgtcagcttcaatgcattcatcgattggaaacttgcaattttcaactcttaataacaatactggaaacaactcgaccacagcagctagtgacagattgtctgaaagtccagccacggtctatccaccttgcacggcggctcaagtgatctttgcacttgtcgaagaggatatggaacggttaatcatcagaagacagcttagatcggaagcaggcttgagagctcaacaagctcagcaagctggagggccagagtttgatccgtacaagttggctggaaaagtaagcgatttgggattggggctggtagctaaagaagtgaaggatgacatattgccgttgaagagtggcttcttcgattggagttgtgagttcttttgctctttctcttccgtttgcctggatgtatgatagaagttgacaatgactaaaactttgttgttgctaaatgtcttgatcttcacaggcgagtactacaccgagcctcagatgagggtatgccgtttctctcctcttttctgttcctagagagataagtaacgcacactaagcctaacctctttatgttcaaatttgatcttcctaagccatccgaaagcgaggaaccaggaagcgtccagtacaatcaacaactatggagacgggaacgacacgagcggatcgatgcagatgccaggacaacagccgaaaagatctcacaaagcgtacggatggatctggagaagaatcagagacccagtatgttttgatgtctgaacattcctccaaagcatttgtgaggtaatcagactcattcttgtgtcgttttcgtgggccggatgaacttttaggtaaacacccatggaaacagattgccaagattcagaatgatcattgggcgatgaaactctctttcaatccgtacgaggagcatctcgccgtttcagatgagaatcatgtcatatcgttagtactcttcagaaccccttcacttcttgctctgtagctcgatccggaagcttatgatttttcgtgtatgctctgattttgcattacgtagtgtatgggactacaagcaacagattgtattgaacaagttttcgaacggaaccacctcgagccctatcacaagtctacgattcatcaatgaggtttctgctgctctatgtttgactgccacaggtatgtagtcttgttgtgacatgtataaacgattgtctttacactattgatgtcatatgcgttcataaatctgttcatttctgcacgggcatagccaccggttcgatccgacttttcagaaactatgaccgacctggagaagttgagttggcaactgcattccgagcggtcaccgtgacgagacctagcgagaatccaactggtacggtcaccgcttgggaccagctcactgggcagctatatgttgggggagatacgaacactgtcaagatctgggacgcacatcgagaacttgccgctgctgtatgtagtcttctctctatatagacaacacttggctctcatttaacgctaatgcgtttccctctcgcgttctttggaaacaggaaatcctcacgggagttaatagtcccttgacgtctctttcaactgagactgatcccgggttgatttttgtagctgggttcggagatggtcaagtcagattgtacgatcctaggtgcaactcagaagattgtgttgtccgatcgttcaataatctgactagtcgaatccgagaggtcaagcttcagcaaggcggtcaatatatggttgctggaaggtttgcctacctctttctttctaagagctgcatcccaagtatttaaccttagattttgtctatcaatcatggtatccagttcggacgggcaagcagctatatgggatttcagaaatgctggactaccagtccaccagttacacgttcagccgcaaggactgtcaaacatatcgacccattcgagcgctcctttctctgcttcgtgagttcattcttttatgtctcagatatcttctgttcctgatgtaaatactcattctcttcttactatacatgtggatacaaaaagcctttcggttcccttgtacgatgctgccacgcaccgaaaaacgcaacatctcgacattcactatttgaacccctctacgacccagggcttgacacctatcgttcaaacgttcttacctgcttcatatctctccccgacttacgaaagacgtcggtatgcctcttgggataacgccatggtattccaccccaaagaattacttttagctgttggaggagtggattcttcaatcaggatcctggctccagagtttgataaatgggcggctcattaaatagtgatcaagaaatcagtggtttttcgcctttttgtaccctgtctatggaggtctatgctccttttctttggtagttttaatcaagatgtacatgtaatggaactctttgtatcacgtgtagccattgtctttcttctcagtctcgtgcccaacaaactattctcaaagaaggatcaatccgtaaagtacattctcgactcctcggtctaggttcgactattttgcatcctccaagatcatcgtctctaaatgtcagctgaacattaatggtttgacaatctaaatagaacttgagtggctgtacaaaatggtggatgtcagcgcgtatcaatgtgaaaattattcaaccaacgagacaaaaggcgcaagaggacagccacttcatctgaaaggagtagaagagataatgtagaggcagagttcgatatgagagaggacaggtcatgcgaggagataatgttcgatcggagcaagagatggatacaagagggtgtattgatcaatcggggacatctcagtatttataatcagtccattgtagattgatgagaaaaggatggtatgtttcatagaacgaagcctctaaagattatgaggtctagatggtgatttgtaggagtcactatattcaacaagagaagatggggttgattgatagtaatatatcaaaagggaacaacaaagataaaacccaggaaagaagatacaaaagattgcgggaagagagggtagatgtgaggaagaacttctaagtttgagtaaagatggagaaatgtgtagaaagaaacgattctctttctgttctaagtattttattaagtctggaatatgtaaaggaatctgagatttagaaggagaacatcatcaaccaggggttgaggacgatagggtagaggatatggcaagcggcctgaacagcaagaggaatgatggccgtcatagaggtgaccctataagcttcagggagcagtgaagtcgagaagatgatcatgatgacgatctgaccaccagcaaagaggtaggccggccagaaacgcttcaagatggctgggacctccttgaagaagttggaaatctcaacctccttaatggtggatccccagagcactatcgagcaagcgagatggccgaggagtcagctctactgttcaagcgacatcaaatcagtagatagaagaaggtagactcactgttgtaagagaccaagtgagcgaccaaggctgcctggacgtgccaactcattccagagaagaagaaaaagaagaagaagatccatttgaactgttaatcggaaaggtgtgttcgaggtcagtcgatgcatcagcagcagaacgaaaagaagagggttcggtcgataacatacgtttgaaacgagcgagcttcccagggattcgactttgagtcgatacaaaaagattgaactacaaatgttacccgcgcctgagaaaatgacgatacaagctatgaagagaaacggaggtaggttagagagtttccgggaaattcttagaaagatgggtagtataagatacatacttaagaagaccttccaactttccaaatagaaggaggacagaacgtcctcgagaattccgatcaagaagaagttgagcaagcaaaggactgcagcgatggagatggctaaagagaaaaacaatcgattggaatcatcaacactgatcgcttttcgaatagtgaggagcaaatatagagacgaacaatagtaagacgagatataagcggcgacagagatcttggagtgaagagggatgttcgagaaaaggaacgtcttgaacagaaccgtcacgggacctttggtaaaccaactgtagcatacgcagagacgtgtcgatcatattaacgagggatgaacgagcaacatgaaacaaccatcgaagaacgaaagacgtacgacttgagaggatagaacaacaattcactgtcaagattccaaaacgtcagctttatttcttcatcaaggtgaaggtcaacaagatacgaagaaagaaaagaccgacctgcatccataaccgtacttctgccatcgattaagctcgtcatcacacgtcaacgagacaccctctttgaatcctccgttagagtaggtcgcccatcggacagtgtatcccttcatctgtaaccggagagccactgtaaggcatccagaagagagaaatggtcagcgcacggctctcttcagaattgtgtttcaaaggaatttgacatactatcgaagtcctcagaaacgtgggattctgatgcagagcaggaaaggcgaatagaaatcaatcatcatgatactgtcagaaaaattgcaagaagcacacgggggaacataccggaccaaattttggtgcagccgtcttccgtatcgacgaaacaagcctcctggacagcagaccacctcatgaaagcgttgtgaccgacgaacggggcgactgaagatcggataccatgattgatttcgtcaataaaaggaatcaaatggattgatagtgaatgacaatctacgacgaaccttctccattggcacaacagaaggaaatagctttgttgattcgcctagtgaagtttgctattggatgaagatggcagaaaactctgattaaaaaaatctcgataaattttgacaagaaacgagaatgggacgaaccaattccaagctcgaagtaatgtccaatgaccaacatgacgtcggctgaatgaatcccatggaagaaggactggtttagcaagcgaatctccttcggggctaaagaagagaaatgcacagagaacgtacattcatgttggataatggcgcactcaggggaagcgtctaactcggcggcagcatctaaaaagcaatcctcaggtactcgagtatcagaatcaatgatcaaaatgtattctccactatatcaaagtaaaagaaagaagaggacaggtcaacatttttatcacacttcgagagaccggatgaggaagaaaactcacattcgaacgtttccagcggcccaagcgactccattcgattcctcgactgcagcggccagcgattcctgatagagagcgtcctcgtcctcgtctgtccagacccaagtctgttcattctcatctggaaccggtcggagttcatccatcaattcttcaattctcaacgagacagccaaagcaaagttcatgttcgaagctttcttaaatcgaccctttcggaggaatcctcgatgtccgtgcttgggtcgggcgacccaaccgatagcgtttcgatcatagtaggctttccgagtctcaacttcttcctcgtgccagagttgcataccgtcctcacaaatcatgatggaggcagttcctccctgtcgttcataagtggtaatggcaactttgagggattcgatggtgggaacaatgactccctcgagtccttccttgtagacgggcatgatgatggtaaagtgaggcaatcgatttcggatgactcgctccggagcctttccagagtagaatctgagaatgacagaaggttcagtattgggtcaaggataaggaaactaaacgaggctggattgaacaacatatgactcacgcagagttttggtagaattgagcaacaggaccgaacaactgccaaatgtttccgacgatcgaaatacagaagaactgtcctcgacacacacacatacacacaccatgtaaatgagttggttcttagtagagaagacaaaggaaaggacataagagatggctcacgaaccatggcaataacgaaggtgaatggagaggtgagcaggagaaggaatcggagggttttcccatcaagaaggaactccttgatcaacgcccgcgctccgagaccgacgaacatcaggttgaaactgacggccagaccagtaatgatcggggcatacagcctataatttagacaagaaaaatgctgagcttagttgagatttcgacgatggaaactagaaagacaggaaatacagaaggaaaagggaacaggaaaacaaagcaagacgaacatcataggtcgggttttcctggactctgcagaccattcatctggtccgacaccagcctctgcatcatgccaaagttgctcttcggtctcttccggcacggccttttctcccagttcaggaagatatcccaattcacttgagttactagcaccttcgaattcttcgaccttctcactgatcacgacggccttcttagtcatcagactttcttcttggtgagcagcagaggcccagacataggaaaccatctttgcttcaagcgtctcggcgttgacgattacactatcgacctcatcagaccagacgatcaaacatttctcggctcgggcgaacgcagcgtattgatgtttcctcgatcgaccgagatgagacaccttctcgatcacttgaattcgagtgttagcgtcgatggcaatatccatcgcgtggcgggacctgtgtgaggtgaaacagtacactgtaaacaaacatgatcgttcgaaaaataaccaggaaagcgatgaaagcttaacgtacaatcgggccatgatggcctgaacgactttactagtgatcttaatggcaacctcggtgttaagcgcggcaacggcattgtcccaggtctgaagagtatcaaagatctcttcagagtcgaatgaatttggatccgctcgaggaaatgtcctgagtgatagaagagcaaggaaagagtaatcagatgaaggtaggtagagcgataagaggattagacaagaatccaataaaaaagaaggtgatttacttgtagattccttttttcattcgaatactaacgacacccattcccgagatgttctcgctcttgaaccaaccttgagcgacacacctcgagtaaagataaccgaccataacggcgaatctatcggcattgtctctcgaatcatccccatcgtcctctctgaaaccagccggaaggtcactgtgtctgctgtgcctacttccgaatgagttcatacttctggcgatcgaatgatttctcctgatctggtaatgtgggtagggatcttcctcctctggctccgtatcggatgctctgtaagtagatgatttggattctctccgaactctgcccccagagggcgggggcctggagccgtagctggaggaattcgaggctcgacgagacattggtcctcggtaagaatcgatcgactgtcggtggttcaattccggataaaatgcctggggtgcaacggacgttcgtcggtttccactagaaatggcctggccgatgattggctcctcgtgcgcagggacctcatcccaaaaggatgatgtcggaggatccatatcaaggtcggtgagcggcccagcggtttcatcggcggccgcggattgttgcgggattgatggatttgacataactgcctaaaaagagcccaccacataatgttgagcgctcaatcgtgcagggatccattcaggaatattgaagaggacatgacttaccgagttaaagtccgagtttcaagtaaagattgcgtctttgttcaatggttctatagagcgcaagtgtgtgtgtgtgagagagagtgtgtgcgtgtgtgtatgcgtatgtgttaactgaagagtcaaaagggtcggaattcaaggcggtagtggtagttagacgaaaggtataaacgaatgtgtaatgtccttccttgcaaaaagaggaggcgagaagaacgggtcagcgaggaaaaccggagaggacgaaagaacaagaaggaaatgaacctgtcgagtcagcagagtcaaaggcagaatatacaaataagatgaaacaaagcttttgactaagaactcacaaggttcaaaccgatggcagtgtaaccggtagcgtgaaggtgaaggggaaggggaagaaatgtggaaggacctgcttccaaaaagaggaattgttcaaggtggttttaagagaacgagggccaggaggtgaagaaaagggcgcgcggagaggaggaaggaagagtcaagctttgtacgttgagaaaaagcgactgaattgtatgggattaagatgagagacagtggggatcgaacgagagggaagtcggaggaaagagaagggaacgaaaagaaagacaagagtgataagaaacaaagtgtcagacattgtggagagaccgaactagagtcgttaactaaacttacccggagcagcgtaggagagagagggcgaagaaggaagatgaggaagaggagaagggattgatcaggaagaagaacgcagacgacagatgagttaaacattcttgtactcatctttggcatgagaacctgttgaaaaaagtgagtccgttggcgttgaggttttccccgttgagttgagtgttgagacactcaggtcttcgtagcaatagtcctgtcgatcacttcccacgaggcagccacaagcaggtcttcgtagaattagatgaggctctggcactgtttagttccattaggcgtgaaacggcagtcagatgggcgactcaaacgttgtggtgttgggattaagtcaagcacatgctaaactatcaatgaagatcaagtatcagtgtattatgaaggatgccatcataggcatcagatgagagaggatcgtcgaagggagaaacaagaagaatataaggaaaggagtggaatcttcagccaaccccacacgctgacggagaacaagaagacccggtcaccggttaatgcctcggcctgaactgcgcttgatttttactgttagctattcattccaccgagagtagacgtagatttaaaaccctaagaaacaagaagaaagaacaaaaggacatcacgtcgatcagacagacgattcagtacattgattcaagacaaacagattagactcatccaatgtacaaagaggtttacacagccttacttggatttacgacgcttcttccacttctgtatctgtcatccaaccaagaatcaatcagctcccaaccggatccggcaaacagcccggtctgatgaggagagcagaatttgaattgaacttgaaaccatgagaagaagaagagtgagatcaaaaacacgtgggaatcaagagtattcgtgtgtgagaatacaatataatggagtaatgtttatcaacacatgggacagaacatggagcattgagtcttgaaaactttaacatatgttgtactttccgcccttcagtactcatccttcctcggtcttctatcacattttctctccgtgaatcggccttcctcttctttctatgctcaagttttcccaccgttcatcgatcaatcagttcgttccactgctgatcgcacacacctcagcttaattctaatcggcagcccacgttatgctgtctttgacccttattaatcccgatcttcgactcttcgcccaatcgctatccacgttctctaacgactgcttctatattcgtgtctctagattctttttcaacgtttttgtctcggagacccacagtcagctagggccgaaactgatcaagggtcaatcttcgtgtttgtctagaaccgttttaaataaaaggattgggtcccaacaaaaactacagaaaacaaaaagggtaacagaaaagcaagacgaagtggaccatcagaaaattaaaaccgctctggaggtattcatttacttgaactgtggaaaggcagaggcaggaagaaccagtcagattccaaaatgattattacagaacgaaaggatacaaaacacccagtacgtacgttctttccatcaacccattccttgtctccgatcttgaggtcccaggcaagagctccctcgaagaaggtcttgtcggcctcgttctccaaatccaatcgagtgaactcgtaagactcccaatcaggggcaacagaaacaacggggacaacatcctgtcctcggaggatcaaagtaccggtgatgatggaatcgttggccttgccgagaactccaacagatccgaaaaggtactttcgggatccctcgaatcgagcaaagagacctccgatttggttgctgtttggacaatgaacgcaacggtaagtatgtataccaagcgtgttatactgcagaaaaaaaaggacgaacgaggacatgaaggtctgagtgagctcagtgttgtacttgaagtcgatcttccagacagagaatccctccttgtcgacgttgttgtagaaccaaggaatggcaccagttcgggtgtcctcgttcgagtacactcgcttccactcctccaagttgaaggtggacttggggagagcgtccaaggggttctttccggcgggcttgtcggcgaaagactcctcctcctcctcgtcaacctccttagccttaggggccttgggggcggcctcagccttgggggccttgggagccttaggagcggcctccttcttgggggcaacgtaggtagcggcctcagtagcgagggagacgtccgagaagatggaggcaatcttggggtggttgatcacactggttgtgataaagtttttaatcatgatcagtcaacctgcatgtaagacataacaaatcatcgagcaaacaaggcccagaacgtacgtctgctcgaatcggacggcgttggagaacttcttctggtcctcagctccgtagtgccgggagaaggcatcggcaaggacggaggcgacggtgatgtcagccaaggtgattcgctctccgacgaggaaagttcgggtggaaaggtagttatcgaggaaagtgagagcggcggtgaccttctcaattcggctctggaagacaggctgtttcagaagataagaggcaatggtcaaccgaagatccttttttatctatatatgtatatgcaagcttaccttgttgtagggaatgaagttgttgatcataccggtagcaacagagattcgctcgttgatctcagtctcggcaaaagagacccactggtcgatcagggcagcctccttgggatcagaaggaataagaccagagttgggggcagatcgggcgactatgattcatttttcgtttatcaaattgaaccgaacagtaagacaaatacaaaagaaaataaggataagttctcaatcaatctgatatgcaggtgccgattcgggaggacaagtaacaaggagtatggtttggaaaggacacatcaaccatgctccagaagatgataggtacaattgacgagtgatgacctaaacagacatggtcgaggtctgatttgaagagagaaagaaacatacggtagtaggcaatggcggttccctcagtgagcttgaagtcaccctgctcgagggccgggatctttccgaaggggaactgtagatccaagagggaaaaacgattgatgtgatcagcctacaatttctcctcggaagatgactagagtgattgggcaatctaagcttagagcattgcccttctggtcgcattgactatcataattaggtcactcgacgcccaacaataggcgttgctcgggctaagacgataggaagcgatgggacaggagggggaacgcaaagagagaagaaaaaaaaagaatgtctagaaaaacgaaccttctggaggtaggcctcagccttctgctctccgctctcgagagtggttcggttgaggtcaaggccagcgaaagcggcagtggccaagattcgtcgaaccttgaaggaagggttgactaagggatgaaatataagagtaacccagacagattttgtcgaccgagatgagacgaattcgtagaaaaattgagagaaagcaaatcagtgcctgtttcctttccctttttcacttctttaatacttgcagtccacatcgtgttgactaacaatgacaaaaaaaaatcggacaaaggacgcaccaaaggagaaaagagttccgtcagacattttaagatgggatgaggaaagaagaaaagtgaggatgggctgggtggcaaggcaaagaaggggaaagagaaacgaaaagaaaaaaatctggcagaaaagaaaaaatgagggagcggttcgcgcagtcaatcagcttatgtaagccatctcccttgggagtgcctgagtgtctccgaccatctctctcaattgagcccaactggtccttacactcaccacgctgttagaggagagtgatccgaaggaaattgatctagagggaatttatttagatgggtcatagcacagaggcctttacagactcatcagagtaaatgtggaagcaggatatagaacgaacgagatagatcaagagaaggatatatgatcttctgcgtataattcatacggtggtcctcaatcttgccagaccagattggagaggctggttccattttgagagcactcatacatacaccctctcgtgtgcgcagaaaaaggataaggaatttactcatggaaaggaaggtaggcatagattgatggaagtagcgcatataccgatgagaatcacttgacgagattgacacacaagaaagaagacatagtggaaattggctgccctgcttttcttgttcagatttattagcttttcaagaaatttttaatagacttgtctcgatacactcctattactttttctctccagattctcttttttttcgctttgtctcttcctcctttcttttctcctcgataaaaaccccatccatcaaagagaaacagtgaataggactctcctcatcttccttcctctcatttttccctcaacaataccagtagaattcgggcttgtagttagagcaggaagagaacagagccttgccatgtccacgacagaaaccccttcgtcaccaccaccagcaaacagctcatccaacgagcactccgctgccaccatcacctccaccaccattaatattaccgataccgttgacactaacacccctgcatcctctcccctcaagaactccaaggacagtcctgctaaaccatcaatccctcctcagacatcttccgaaccaaccagtccggtcaagccatctctggatgttccttctgccccgtcggagggtggtaaatcagctccgccgaggataacgaacggagatcaggtcgagaagactctgaagcggaagttggtccttggggcagagacatcggtacctgaacaggaatctgaaggcattaacctcaagaaagtcaaagaggatggcgtgagtgtttgtttgatgccttgtttctcaacccatctttctttctctcctattctctttcctccgtctcgcttctttttttttccttcgggatgagatcaagaagcagggggagatcggagcgatcaagacgcttcaactattacagaacatattctccattttcaagagaaggcaaagaatgacatttttatcgtgtagctctcatctcggcatctctccttgagccatgttctttttggttatgccgtgtcttcatctcagcatgttttgacgtttgaacacaatctttgtgaatcattaatccttattataactcattttctgccttcatgaaacagatctccgtcacatcgtcctccgaatcgcccgtcataaagcccggaattgttcccggaggtggtttttcttctttcgcttcttccccgtcacccttcgttacatcctcttcttcttccaaaactactaccatcaatgcgacgcctcatgattctccctcgagacctgcttcttctgtaccttcgcctcaaacactcgctccccagccaccatcatcgaccactacgacatcgttctcaggctttcttcccgcttcgggtgcatctccattcacgtctggaggtcccaagtcggtctcgtctccttcacctttctctggcgctaccgcattttcggccttcgcaagttcaaacccatttgtagtaggtggcaagaagaaagacgtgagcgatgtgctttccggagacggagaggactccaaggaagaaactgaggcggatggaaagttagagaaggatggcaagaaggaactgaacgagaccgagaaggacagttcattcggacaaattttgagcaaaggacaggacgttgcacaggatgatgaatccaaggactctgaaagtggactcaaaatggaagcccaggacggtgcgtcttttgtctggtgtcactttttgaagaaggaaggaatctaattggtcttgacccttgacctgacatactgttttccggaccatgaaacagtaatcacgggtgaagaagaggaggatacgaagcatcaagttcgttgtaagctttacgtaatggaaaaggatggggggtggaaagaaagaggaacagggttattcaagttgaacatccattcgctcaccaagacgcctcggctttgtgcgtcttatctgttcatctcttctttccgcgtcttccatcggcatgggcttctctggcgttctctgactttctttgacgtctgattttgcatcgaaaacacagtgatgagagcggacggaatcttcagactcatccttaacgtcgcacttttctcaggaatgaagcttgagaagcaggataagtgggtcagatttactgcttttgaagaggcgaagcccgtccatcttgctatcagggtgagtcttgcacatcccattttttctcttcacgtagttctcgcatgccctgcttcttcatatgccatgcgcgcatagtcttctgagaagactcagtatgctgaaggacaactatgatgctttcgttttgtgaatttttcatgataggtggggacgttgaaatctgccgaagatcttgtacgttccctccacggaacttgcaatcttaacaaatcacttgacattgacagtctccgtccttctgatctcatcacagttcgataaaatcaagtcttttgtgcctccaccaaagtcgacgattgatcgatccaagacgtactcgctagctccttttgaaggaacctccacatttacgaaaagccaagtagaagatgataagccgtcagctgatgatcaaccaaaggtcgacaagaacgagacggaaaccaaaacggagcaaacggaatctcagaacgaggttaaagacgcggcagacctagtttaaaatttctgtcactgggggccttttgaaagtttaatcttcggattgcatcttcactatcatcgtcatcgccaattaggacatccggccgaacctgtctatcttactctatcttcttatcctcatcttctctgtcgttctcttttctctcaactcatcttctctttttaccctgtcatcaaactgaatcaaaatcgccgccatacctcatccgccttcccatcttcccactttcttccattccgttttttcttcctgatccttgtttgtgtccgcgtagacgcgtttgtcgacatgaactgtatcctaactgacgtatcctgttccgtaccactcatcccataccatctgtcttcccccctctttctctttcggctcctgtcttctcttgttttcttccttttctcaaccctcacctattcagtctactctctctcctgattgtcattccactttctcttcccctctaacccttgttcccatcctcttttttatccgagctctgatccctctttctgttcattctgccacttctggttcggcgagacctaccattagtctcagttcaattcactctgatttcacttctcaacctatgttgaatgaaactaaaacaaacaatctcaatttctctactttgacctaatctactccctttctcttcttcttcttttttcctacctttttttctctttttatcgttatacatgagactaggaagtcagatacaatcattgtcgaatccgtcctcttgatacattgtccttacgcaaataagctggatatgaaagaatctattgctgaaggcaatcttagcataaccctaacacatcatgaaccgattaatgttaagaaccattctgctaatttggaatctttttttatcttcgtctactttcgtgattctataaacatttattctctaccaactgaccgctataccacagaacttacctaccgaggttttggccgtcttgagatggcttcagctgtgatctgccatgtttttcttcgaggcaacaccctcagatcttgcgccagaccccaagcatttctctccgtgcagtcaccagacctgctagctcctcccggttcttcttctttctcgatccatctcactgtgacacctggttggtgcgcatatggtttggcaagccaggtgggtctcttacctttggtctgttgtccgtggtcatatcacatcagtccattgtacgatgacacctgggtggtgtgcatatggggtctgggaagccagtggggactcggtcgggaacgagcgccagaacgaaagggtgccgttctcgcccgtcggctttactgtatggtcagtgtcctcgacgagagacagatgccagcgagattctggggctgcttgagacaggacaaacatcaaaggagtagtaatcaagtggttacgatgcttccctgctatatcagcaagtacaggaagtgccctctgggcgcgcaggttcgaatcctgtctacttcgtttttttttacgttgatctgcgtttccattgcaatccaccctttttaatcgtggttcaggtagttatggatcgagtatatgggatgcatgtcatgtataaaaatcattcaagaaaggagggcaggaaccagacaaggctgatgctgatcaaactcaggacagacagaaaatacaaagtactgggaatattacaaccataaaaagaacatgcaagcaacatgtcagaggataaaacagaaatacacattattctcaatcgctcgagatagaatcgacatcatggaatggtctaatgaaccaagtttgtagatagtggtcagcacgaagagtaaccaattgagaatatctaaaaatcctcttgccaggagccgcactcacgtgtattcaatcccactcctcgcagcctgcacaaccaacccaaaggaacagaagttttttcgagatcaggaacagcatcactacagcatgatctcggcaaagaaacaacacacctttagcatccactcctcatccgcctcttcaaattcataaccccttcctccaaatagtgagagcaataccggcaacaaaacaagtccgtgtagagcaccactgatgatcaacgaaagccacattcggaagaagtaaacctccaagagttttgatcttgtgaacgcaaggacagtgactccgataagcttagtgagagtgatgcccgaaaaaacctttgaatcgaaaagtgaagatagggtcaggccaacctggttttagaaatgagagcatacagaaagagaacaaggtaaagtaggacgaacggatcctccaacatcgaccagagcgctccaagcgcgttcgtctcgctctttcggacctagaggatgatcgtaaggcaacccgcctccgccagcacccatgaatgcccgagcgatatgcgagcagaattcgaccgcaatcccaagagatattactaggttgacaagagagatcgcactgtagcaacaggttaagccgtcacagaaaacggatgctcagtcagtcgttcgaacttcacataacaaaccactatatcgatataatacatacttgaggctaactccccagacacccattaagcccatcacgctcgtcaccgccagagcgcagactccagtaacgatcgttcccgtcctccacgagcccaataagagtgacgtcacgaaaaagatggacaccagagccaacgtaaggacttcgaccaagatggtgatgacatgtgcatactgagcgaaaatagaggtcaacagatgatcaaccatatgtctactttcaatgtaattgctaaagagaggtccaataacgaggacaaacctgatcaaagaatatatagaacaacgagtaaggatatactcgagcgccgattctatcctccatatcctttgcgatccgtcgagcggaagccaatgcgttgataaagtcccctccctttttcaatggtgtgtgatacgtcctgaaatgagacgcttcgatggcgtctcggctctttgagaaagatagtgcgttactgtacgacgaccttccaccaagaggacagttttcatccgtcggggtttgaagccattggccaaggtatcgcatgaattctgggccttcagggaatccttgcattgtagtatcaaacggaggatcacgatcgagaaaacaaggttgacatcctcgttcggattcttcaggcgaacagaacacatctggatcgtcttttctcactctgcaacacgactcgagtacagggttgagccactggaagaaatcgtcgatccagacagcaggcgcattagaaaggaatgaaacctcgggtcgtttgcgttcagcatcaagagtagaagcaacagagagctcgtcacaagtggtaaacctaccacacaacgcttgctgtgcgggtcgttcggtgacattgagatgatccactacaaagtagacaggaggtccgatatcaaggtactgatcaaccgcgtcaaagtatgggatcaaatatgaatctgatggtagagccaaacgttgatctgtcgtccaccaggaagggaaagtaacgcgtgtcagcttctgtagacaggtctatcaacacttaaaccaatgaacaaaaattcaacaaacctagtcctagctcgactttctggacaccgactagagcaagagcaaacagccctgaaaatatgagaagaacagccgatttggtttcccttttgagcaagaacggtgcataatactttcgaatgactctgttgatccatccctctccattggaagcagggaacccagcctgtatttcatcgtcgcccccatcgtcttcatcatcatcctccccatcctcattatcaaccgtggactcgagatagatagcctgctcaggatccaacttgatgaaaggcagacaatccattctgtgcgcctatttgaactcccaaaatgcggatcaataatccatcactctcttccaagacgactacgtattcctaaaataaataaataaacacgaaaacccttacctcaaccctctttagatccaacgtcagagcagccacaaagattgttacctggaggatcgcatcgatcgcgacagacccagccgcataaagcgcgaagttcctgaccgctggcattggtactaacgctcctaatccgaacgcgaccgtctccgtaagcgagctgagcaagatactaggtcccatcctagctaatgtccgagctacacgttcctccggggagagatacaactcagtcggcgcttgggtctgttccgccgaagcaatggtgtcgtttggtccagtggaagacgaggatggcgtgatggcaaacgggtcctctgtgaaagattgaccctgaagataatgggatgatcgctgttgaatagaactgggcgaagcgagaggtccgtgcaaggcgttttggcggtcaagctcattgacgagaatgaaaacgttgtctggattgtgaaacgtagaagactcagctttgtctgtgatcaacaaatataggaacgagagatagaagaactcaccaactccaacagctaagactaagaaagggataacctccgcgataatcaatgttactttgacccctagagctgaaaacacgccaaccgaggtcgagatcgagatcaccacaaccaagattccaaaaactcctagggagaacttggagttgatcaatgccgtccttaacaaattcttgatcctctgacgtctgcctgctgaccctccccgttctttctccctcatccctaaaacatcagttagcccgaatagactagcaatccagctaatcaactctatcgctagtcctatgaggcttccaccttgagacccccctaacgtgaatgtcacgtaaaccaacatgcccagataactagccccgacgacaagtttgtcaaggttggatgccttattcaactcttcttctaaactgacaccggtggaaaacccgatccaagcacggcctgcttccagttctttgggcgagttcacaacgtcctccaaataacttcttaggctgcgttcccattcctctgctctaagtagaccggcttcgtctaacgttccttgcaggacgaacgtcgtgataaaactcgaaacgttcaaccaattagttgactccgacggcagtcctcccagaataaacttcggttctaggatcattccactttcggccaggcaatcagatggttgatctgaacatcccttaatgacgtcctgccattcgtcctcgtcgacctctccgcccgtgagggcatcgaaccagaccgagatcgactggacgatacaagccgtacctgggccggctggagagtaacacacatcttcataagtataattgttgggtattgagcgcatagacaaaatcgttcgttcgtgttcaagccaccagttaaggcgttcgtatgagagagcgggttcgataggcgttggaatactagctgttccttgtctgtcgggcaaggaagcagaggatgaggagtcggtaagagaggatgtgatgaagatttgttgaggtcggaagaaagggccaaagctttgatcaaaatgattcttctcgagcacgggtgatgacgtaggagaaacccaaagatgaactggatcagtctctacggagaaccgtttccaaccgagattaagaagggcgaggaccagcaacgcaacaatgaatgttgtatctagatgttttgtccatatgagatacaagaaagtcaatgatttccatcatcatacaagatagcaagggacagacgaaatccacatgacttacaagctctctgtgcgcacatcaatcccagtcggtaaaagcccttcttgagccagacattgactttgctctgtctaggctgcaaccttccaatcggatccaacaagcttcctaccctagccctgccgtcgtcatcatcattcgataatccaagttcctcggatccgatagtcgtcccaaacaggtctgacgtgcttcgtctggacgctccaggcttatgcctcgtgcttgaaggactgattactcttccatcttgagcgtctacctctgtatctactcctggctggtcgtcatcgcccaataaaatcctgcgctcccagctctgtttcttcttctttgctattcgatccattatccagagggatgtgacaatcaacacggctgccaagtatgataacgtgacgacgaacgatgtacagctcattcgaccaatatgacagcctggaatgggatccatcctagattcgcctgatggagtcggcaagtaaggcaacgaagggcatatcgatggacagtcggcacaagcgcatcgagagtagatctctggatcatcgcaatgcaatttggtcggactgaccggggaccagcgatcctcatcctcggtttctggcagcgaagaaggaaaattgatctggaatgggctacctaagccagggcgtagcttgcccatatatcgtagaaaggcttccgggtctttggcaccccctccaatgagatccatagcgagaccgttggtagcaccaaattgaacatccttgcaagagtcatagaaggactgtttgaattctggagagacatacacgttgatctctttaacagcttcctgatgcggactagatggcattgtctgggtagagagaacttctaaaaaggtcgattgggaaggtgaacatgtgaagtggcaatagaacgatcgaaatgagtttcggcaagccggacaggcagcgatgaggctgtaggcagcagagttgcacatgatagaccatccagtgtcagtggcttataaccgcttcttcgagaacaaatcaagcaactaagcgggtacaagagcttacggttcggcttggaggaggttgtctctgagagcttcggcttgatcgatcgtacaacagaccgtgtccggagtctcgaatgacgggccgcatatgtccatgagcattgctttcagctctgtcgaaggctaaataatccataagttacaaattcgtttgtccatttgatcgtatttttgaagataatcaagaggagagaacgtcagatagctctggtacatgagtgaatctatcagaaacagatacaagttaaacggaccgaatcggcatcgccatcatcaggacaagggagttccggatcgaatatcgattttttgccacaggatcctctgattgagcatatccctggtccgtgtcttcgatcgaccaacgacgtggtcgttatgttcatggcaagtgagcaaggaagtatctcaggtacgactgtattgaaatgtcgtgggtgattgaaggtattgatgggattgatggtggagatgggctatatgcggtccgatgacttaatgcagccatctcggaatacaattcatttattctgaacacaacttatctaaggttacagacggcaccgtgaggggaaatctcctccttcatcagccatccgttctcttttcttttacccatcctctcactcctctctatctcttttaattctctttctcaaggtcagtaaatgttagactgcattataagaatggtttgaagttaggcttagttgactgtagagcttctcctgacgttgttttttctttgaattttcttcctctttggcattctcattttctcttctacctttgaccacgtctctttttagttcaaagatgtcttcccaccccaaagctttcttccctgacttgtttggcaagcgagccttccctactcccgtacgtctgatcactgtactcttttcgccgattgttgctgtcctcaggcatagcatattcgagatgagcccttcttcggagagaagcgagttttaaagatctgctgtagatcgaccaatagcccatgttgacctctacctttttctcctttttctgctccttttgttttcaacaataccatcaatactctttcttggaatgcatccaacttgaacgaactcatccatctgtagatctggaagccctacaagttcctctttgtcggtttggccatggccggttggggaatctaccaggtccaagagattgccgtctctcgttcgttccgtctttaaattatcttttggtcctctacggatgaagtctctggatgcatagaaggaagctgatgctcaatctttatgttctctttgctctgttctttatgcgtctgcaacaggacctgaggctttgaacgacgtatggccgttctctttccatttgcatatgacgggtttctcgaacatcttctcttctcacttggctaacattcttttcttttctatcttcgtgcttatcccgaatgcttttcacctcttttgtcttggaatgactagcctgagaacccctaccgttcgtcgaatttcatccatcccgctgaatctttgtctttgaatatggaaacaatagagctgaccatttcttttctcttatgtcctcaaccctgaacgccttctcttcacttttggccaatgtatattctgatcccctttcgaccaaccctctccgttctatctcaatcttccctaaaacccctgttccactcatacctttcgactcgaatttgccaaccaataggacgacgaatccttgctgcccaggctgccgctgagggtcatcactaaatgcgattgttcttcttcctggactcctttaaataagagtcttagaagcgttggcgtgattggatgaacgaatcaagtggatattgtgtacggtgagatgagaaggaaacgaaatgagatatgccctttcagttctttgttcgtactggcaacacaatatgtttaagaagcgaacaagaaggagtcggtagtattttaaggataaaaattgagataatcagcattggatggtttgcttatggacacagaatgtcatatttttactagagacacacgggagctattactctcgtatccaacagtcgtagactttcctgtatgtccaagtctttaacaccatcatcacatcaaccaaagtacttgtaacaacgagcaaatttctatgatgtctatgttcgaataacaagaatatgtacggaacgatgaaagagacatagatgactggaaaaaatcgaagaatgagatgcaaagaaaaaaccggtagaggaaaaaaagagatggtgaaaccccaagttttccttctcatttagtcggctgtcgaccatcatcttcaataactctcctactcttcttgctttctccctcttcttttttccacaacagatcagcttgcatgttggattacgtgtcaatatctcatgagagtcagtctcgttactatgattttctcttactgttttcggtcggtgctatcagatgtggacgaaaactgatagtctattgg

SEQ ID NO: 1609 - DNA, 9349 bp, Xanthophyllomyces dendrorhous
ctatgtgaacttgacactcaaaggtggagttatcctctttcaaaagtcatactctccctcttttcctgtcccgtcaggagttgctacttcttctgctgccactccttcgccgatcaacagtcttctctccaccgtacttgtcgaaggccgaactctgaagccttttcaagctccgtccgggccgaactatggtccgggagtctccaaaaaagatggaggaaacgtctgggagatggctggttggaaaatggaatggttgagagagaattcgttagggttgatctttgtcgttcgtgtcttcttcttctcctgtacatctccaaggatatttagacgactgagatagagcgctcttcgttttcatgtgcgagtgcttgcaggtgagctaccatcggcttctccacttaccatacattcctcagctccttcattccctccgaacgctcttcctctctctccatcttccgtttcttcaatctttccatgcctccctctctgcgccttcttcctcttctacgatagccactaccacagcatcaacagggccaacccaatgggcgcttgagaccgagctcgcaggttgggaatctacttgggaaaaactcgttaggcgagtcgaagcaaaagccggcgcgtctgagaaagttggatcaggaggagcagataaaaagattggtggggtaggtagaccaaagggcttcagtcgcaaatcgactggagcaacgccggtgaaggctaatatggttgctgatgattccaaagccggtggtgatgctatacttgttcaggcggacagtatgttctctttgtgtccctttgtttgtagaatttcctgccttcgttgtgtctacaaaactgaatcactttcattttcttttcccttgccgtgtgtgtctgtgtgtggctcagctccttcggctccagctacaccccaaaaaggatcaaccggtgaagataccgaagaaattgcaagaaatgtagaggcgctaaaaaacaggctgaagggagcttcggctggaaagagagctttgggtaaagcaggggcaaatgctgggacgtcaagtccaggaaaatcgtccgggtttgttgcttcctcttagctgtctttctttctcaactgagaactgaatgatgtttctgacgaagatctggatttatatactttcgctttcgtttgattaatcagcgaatcatctcctcgtcggccggccacgtctagctctacatcgaaggtaatgcgtaaatggggtgactctgccattacctcagccgacatggccgctctagatttctccactcctcctccttcctcaaccactctacccgacggctcgtctgttgctcagccatcccgagcagatatatctaaactagtcgatcaaacggcgttaggaatcaaaagagacgggttgtacgatgtcaaagacctggatagcacgttcgacgaaggagacgacgaggaggacgatatgatttcaagagcactagctgaaggttctgctgcagctgctactgctgcttctggaaatggctctacctccaatatgtccctcaacggatcagactcggccacctccggttcgaatttacttggccagaagtctctatctagctttttttctaggttgaaaggaacgaaagttttgacaaaagaagatcttcaaccggtgctggaagtgatggagaaacatctgatgggaaagaatgtggcaaagggggtttgtgagagggtatgtgaaggagttgagagcgcattgatcggtcgaaagttaggaagttttggtagtaagtcgtcgggcttcattggatttccctttgtatccattgtggccgtcatttttaaactgatgtgaatacatgtctgataggtgtcagatcagaagtccgagcggctctttcccaatcaatcactcggattcttacccctaaatcatccaccgatattcttttggaaattaaacgaaaacatagcgcatctgccaatgccgccgaagctttcagtaactcgacgtcttctaactcggaaccatacaagatggtgtttgtcggtgtgaatggtgtagggaagtcaacgaacttgtcaaaagtttgcttttggcttcttcaaaatgagctcaacgttctgatcgctgcgtgtgacacgttccgaagtggagcggttgagcaactgcgagtgcatgtcaataaccttggaaggctgagcgagcagattggggaaggcgagaagaagggtagagtcgaactgtttgagaaaggttacggaaaggacagcgcgacaattgcgaaggaggccatctcgttcggtacgttaagctacgtttgatagcattgcttcattactgacgcgacactgaacctatcgcttcggtttaattgcccttttcacttgaatcctcttcctagccaaggagcatgcgtttgatgtcgtcttgatcgatactgctggccgaatgcaagataacgagcctctgatgcgagcactttccaaactcgtgtctgtcaattcacccgacaagatcatatttgttggtgaagctctggttggaaatgaggctgtcgatcagctcagcaagttcgacaggagcttgaaagagttctctgcaaagggagggaaaggtaaagaacgaggaattgacgggatgattttgaccaagtttgatactatcgtgagtatcggatatcagatctttctttcgccttccgcagaaaacgggcaaactgacaaccaatgggctttgcttctgtgcttttcttaggacgataaagtaggagcggcactctctatgacatacgttaccggacaacctattcttttcgtcggctgtggtcaggtacgtccaagttcttcgtcttcatatgaataagaggcatgtatatctccgatctgattagttcttgatcatctccattaactatcagacgtacacggatcttcggcatcttcgagtaaatcatatcgttcagtctctgttgaaggattaattccatatgtgccctttcagcgtgatgatcaatcaaaagtgcttcaattctttgctagtctttcaatcttattctcttctgggcttaatctctacgtttgcatattgttgtataattctggtcccatgcatctgtttaatttcaatcagggaaggcatatcatcattatctatcccttctgctcaataattttatatgtaggaggaagatcgatatcaacaatgaggtataatggagcaaaaaagcccgggaacaataagttgagactgattagatattcatgatacaaagtgagaaaaaattgccataagaaatatttgcattctctgacgtctcttcctgattatctcgtgatctcctcactcctttacattgtattcgaccaatccattcaactttctttgaatcccggtaaaacactatcttgagctacctctattaggatttctacacagacaatggtctttcctaaacctgcagcttgtcagatttgcaagacgaacgcatcaaagtacaagtgttcgacatgtcaggtcgtctagtcagttttatttcgctcttgtctgttgcaagtgattgttcagtacataaaacgagatccatccattacctgaagagaggaaaatgtaagagaagaccatagttgactttctttgttccaataatgggtgggagaaaatatagttgttcggttccttgtttcaaaaaacacaaaggttcgtctcgttgttagacgttttctactctacgttggttgtttcttctgtgctctctttctatcctagatgattggagctctgggtatgacttgttttcgggctgaaaaaagattggaatggccttggtagaggaatcgtgctctcatttacctccgccgtccgaaacttctccacctgtctcttccgtttctcttcctacttcaactccgacctcaacctctgacccaaagccgctaccggtaccgataacatcaacatccttaccggaacctccgtccgagccaattcctcttcggcctctctcaagtctcaattggcctgttaattctgatgggaatgaatgggaagggtcggggaacccgctggaccgggatttaccgaaaccactccaaagggaggatttaatggctattggtatgtttgctaactgtgcccacctaactacgttctgtttgaagactttgaactgacgcactcgatttgaacgacattgactgcataaacagcaacatcacccaagatcagagaattacttgcaaacccgctccttgctcctcttctttctcagatcaacgacctcccctcttcttcattgtcctcttcttcccgtgctcattctcactcatcctcacgcgctagctctgactccttcacaaggtcagcttttcttcagcaagtgctcggtctttcggttctctctccttcctcgtcctcgaatttggctttgaactctaccccacacgcctttgatcagagaggacggcctaaccgaggtaggatctcacgtggtcgaggcggacgtggaactggtaatggtcgattccaatcccactcgtcagcagatactagactgggatcgggaccagggataaagactacatccgaagagatggaattgatccggtcgtttgcattggaggttgaacgagttttgaagggcgtgaggaaagaacggcgaggggtagagtgggaagttgttggacctgacgatgacttggttggtggactggatgaccaagaggaagaacaggtcaagatcatactctgatcatctgcttcaagattagaaaacgatgttttatactgttctttctgctatggaaagaaagactcaagacgaacatgcgataggaatacattctgatggggcaatggttgccgatacaagaagaaaagaaatagagacttcgtttggaaagatatagaaaagaagaagaagaagaaaaaagaaaggaaaaattggaaacagcataaatgatgcagaactatttaaagcgcatagatggcaagggataccacccaataaggaagaacaaaaagaccagatattgaaaacggtgtctagtgaaccttgcctagagcgacctccttgagaccagccttgctctggatggtcccgccgaggtaaccttgccagttggcgttgaacgcttcgacgtcaaatgttttctgatcacactcctcgtggctctggatggtttcacgaggtggacctccagagcccttgataatatgaggtagattggatgcagcccccatatgctggtaatgtttgtagatgatttcaagcatacggccttctatctcggataaatgggtgaaaatgaccaaggaggacgtcaatcctgcgcttatcttgcgtagatactcaatagcaggataggagctttgaggacataccttcgtagtcgtactcatagctgactccaagcttttcatttgccccgactttctcgtggtccttccagacgtcacccagtgtaaacgttttctcgtcctcttccgcgacatcatcgtcagacctctgggaagagggagaagcagagatcttgatcttgggtgagccccagttctgtacgtgcttcacctcgggtgaggctgagacgagtttaatctgacccagcgcggtgaacttgtgtggcttgatatctgaccagccaaaggtgtactgaatgagcttgtgtactgagggttttaggaccggaatagagatgggcgtgagtgatgaggcgcagacgaaaatgagcaagaagctgaagcaaattacgtacttagttcaaacgagtagtttgaaggaactcgaattcttctataggtagcatctgtgtcagagaacacaaagtcctgaattgaaagccgtttctatcagccatatggttttcggcagagagagaaagattgaatcttacaaggacgagatgggactttgtaggttcgggaaggctgaagtcagacatcttgtatatgtttgtctatgtttgaacctgagaatgggctgatggttgagtgggtgtgaaagttttgaacgattgatgtaatggacgtgagatgggaccggatggaaaagaacaggaaggagaagagatggaaactttgattatatacagtctcggtctcgtgggctgacatcgctctggatctgacttggcctatagggacgggcatcgtcagggcacaggatccgtgcatcgctccatgcctagtctgagaggccaatgcgctgttgtcagatgatccggtcgagctcgtctgatcagctgctgcagcaacataggccaggtagttaccatgacaacgaggcaccgtccgactccctcccccaacaccggtcctttcctgagtcttccccattattgtcgactgtgtctatacagaataaatatatggctttggttactagaaagtaaccgcaacgtaatccttttggcttgggtgccctcagaccagaaaccacccggatcccaccggtcacgtgtttagtctgtgcctgccccaacctcatcctcaacagtcatggcagtttcagcagcagtggcaaacatcagcagcaccgatcagtgctcatcccggacgcttgtcctcgtcactccgacttctttttgtcttgcaggctgccgagatggatgtctgcttctttgcaagggattccttctggtcggtttgactggctgtcggtcatgatgaacagcgcggtgaaggctctgcagtccacagaccacagaccaagacgtgaacagacaaagatatgaacagacagagatgatgtgtttgatcgggtcatgtgcagctaaacgtagtatttatcagtactcacgataccaggcacacaacatgaacatcaaagtagtcgagtcaattcaccactaactctggcatgtctatctggataagcttgggtgtcgttgtcttcatctagacttctttttttcgttcctcctccttagggttttatgcatttgctctttcaagtatgagtcttactacttcgatatacaagtctcagctatgctgtacaaagataaatcacaatagggcagctaatctctccgtaatgtttgacagacgatttacttccactctttcacttgttgtttcttctacaggtctgctgaatatttcagaacgagtgacccttgaagggttggtcaacaaattggctgattgatagattgatggactaatcaacagactgttcttgactttatatacttccttacttttgaatatgattgctgagtgagaagttcaaatcttacgctatctatgactgagattgtgagaaactcagtaaacagctatcgacgactttgaacaagaaatcagaaagcaggagaagagaggtccaggaagaagaagtaaacatgagaagatcgtaagactttgtgaatcaagagaaaaatctgaatcgcgtcaaactttgacctcggaagtttttacagatcgcccgaagaagaaatttgcacataactctatttgatttaggcctatatggcgcaaactcgcgtatgcttatcagcttgggataaccaagattctggaacaattgtagatcacgtcccgatacacagaggtgatccaaaacactcatcagtaaatgagcccgagaggaccagaccttacatttcaagcggtgggacgaggttcgaggctacggtgatttactcctgatagcaagcctcctgcgaaactcacgattctctgccttcctgtcttccagtccctgaagagtcgaaaccaagaacacgttacccaaacgaattttcgaccagcttcacctctcgcactttctacgatacatgttctcattttgagttcaatttgtttatttgtttgggcttttctttcgtttacgcggggaacactttacagccaccgttcgttttctggatggcgtgagtctacacttcgggaatagaaagaaaccatttagccgaaatttacacactgaatgattggaagcagagcatgttctctttcttcttccgttgggatctcgctaatgggtgctgtaggatgaaccttcaccgtcccacgttgataagtcactgatcgcaatattgtttgttttgctttgctttacttctttctttcctcttgccgttcattcagatcgtcccggacgaactacttttgattctgtccctcgtttcctccattctctttccctcttgacaaacatcaaacatcgtctttctcttttccggtctccatccgctcgctcatcactttcccgcctccctctcctttcttcacagactggctagaggagagcaagccaatcctggcttatcggaacgtactcacactttcacgcactcacgcacgccctcactcatcacatggctccaatcgacattttctcaaccggtttgagttcactgatgacccggtcgttgcccacactcaggagtccggagatgtcgtcttacgatcagaagttgaagacagcgttcgcgatttttcatatcttcaccatcagtactctcatgcctttggtccttttcatcatgatcacaggcatcagacggtctcaagtattactcaatgtgagtttctctgtctctgtttcgttgttgtttcattcatgatcagaaagggatcaaatgttcgaaggaaattcgtaaaacaccagaagagtcccgagtgttctgatcatctgaagaatgactagttggaacccctaagagaatacaaggtcaacaaataaacagtcaattgattcagccaacgatcacctcaatcttttcatcctctgtttctctgtcatttgctgttttggttctgatatttgtttcttgatctcccattcgtttcgtatctgttcctcggcctctgaatagctgtttcttgccatgagcgttaattcagtcatggacctgctcatgtatgttcaacccgagctttctcttgttcaaatgttagactcactctccatattaaactcaatacgccttgtcttggatcgccgtgacaacagggcgttttctccggaatgtccatcgagatttctctgtctgttgtcttcgacaggctcgatggcaggtactgcgctcatctcgacagccgtcatggtcacagtcctcatggtttggggcatgcttcgtagggcgagtgggaagaagatatggatggataagtattttgagctcatggttagttccctctctctgagccagctatattgatgtcttgattgctcaaagtcgcgcaccacacactagctgcgatggctaccatggatggttttcacgctcatccttctctcgaatcttgctgtgagtggagttgtgctctatttcattctgatgttattattttgactccaaatgactgatttctaattcaacatcatttattgtgatgaaaac

SEQ ID NO: 1610 - DNA, 9523 bp, Xanthophyllomyces dendrorhous
tccgctttcttacaatcgtgcatctcagtatctgctcatccgtccagagctcctttatgtgagtacgatgacatgttattccgataacatctggtgaggccgcttccctccttatataacctgcttgttcgttgtcgatcgcagagccaacctatgcttttgtctgtagtgcgacagcgtcacatatcgtagcaggcttggcattattcgttgctctcatctttgatagtcagttatttcgcacccattttctgtctgtgtctatcatccaaacttacgagatcccgtttttatatatctatcagtctggagtgtagtcattcttgtccgtcagagacgcaaggcaggaaagaaaacggcagtagaaagagagatggagtggtctcttcgatctaccgattcggccacaacagtcaacttgcctgtcgtcggccgggtagtcgcttatagtctgactatgatcggcgcgctgatgtaggtttccctttcatcattacagtgtcaagaatcgtccttaaaactatcattctgattcttacgtccttggatatacactccagatcggccatcatgctgtacgccaaaccagactctcatattccagcagtctaccaatccgcctgcggagtcacatgtttccttgttttcggcacccaaccggatatttggaaaaccgctcgtcgactggtgttctctgacgcgtcatcatcatccccttcaaatcgaacgaagagccgagcatcggaaaaatcatcgctaccatcgttcacgccacatccatcttctggcgagaaaggctctgacattatggtcagcgcagtttccgtcctagaagagcgaccgtcattcgttctatccgtacaggaactcggtcgtgacaaccaaatagccgaggaaacacgaccttgtcgaccttctccgtcagactcatcaggtgactctgttttaaattcggatgcgacaatcgatgagaggaagacccgttggggatcatcgttggatcatctttcagactcaaaaaattattcagcatcagaaaatgggaaccatcggaagcgtttgatagacaaatatccgcctgaagccaagagcacaaaaccgatgggactggcagaggcattggctgagttagagtctgaggtggatgagagtcgccgttgatctataacacaatcaatccgatttagggtttccgtcattcatttatctttcctctgtctcttctttggacggaagtcaatgcattatcccatctaccactctcatttgtacatcttttgagtttgatatttattttcactctaaaattgtttctcgagaaattctcactttactatgttttactttgtagcaacttttgggtcttttgtcttattctcttttttggggctttttgtttgtcaatccttatccttgataggtctcaagattcattctcactctcttgctctttccactctatgctcctccgtacatatcattttacttcctatttaaatcatagtatggctttggttacaaaccaaagtagcctcaaccgatggtggccaatacatggcctttttggacttgggtgtccccgggccacaaaccgtcaaaccaccaaggatcatgggtcatgagtcacgggttcagcttgccttcgtcgatggggcagcgacagcagcagtggcaaacatcagcagcaccgatcagtgctcatcccggacgcttgtcctcgtcactccgacttctttttgtcttacaggctgtcgagatggatgcctccttggtggccggagatctcctttgatcgggcatccttctggtcgattcgactggctgtcggtcatgatgaacagcgcggtgaaggctatgcagtccacagtccacagacaaagagaaaagtatggtatctcagtcacatttccgtacacgcccggggctaccgttcaagtctcactgtttgcccagctggctgccaagctcaagcttaagcccaacgcaacctacgcctacacttttctcgagttgaatatttcttgttacgacgattaacagccgctcaggcagtagaggactaggcgttggaaactggcattttgttcttctcgcagaacattggctgtccatggaagggggtcttcgtccactctgtcttctttctttcttgtttgtttgtttttttgctctcgcttgcaatattattgtctcataggttgatttttcccttcaaaaagttcctttccattactcgagttcatgagtcgtaacgttttctctctctaacaggaccatgcttgttttggaaagaatcgtaaccgtaagcgacttgactggaatgtcgacccaagctgcttgtttcttgattcccttgtaagttgcttcgtatgtttggattagaggcatgagacatacgtcatgatagcgttgacccagcatatagatcgttattatgcacagagatgagaaaagacaagtgcaacggaaaaagatatgggcaagggctgggtgaatgaactcataaatgtgatacacgatcataatatgattaggacaatgggggtggtacaaattgttcagaagcaaagtgacagggtgatccgatttgggtcgttagtatatgaaagatagattaccaatcctggttcaaagaaacagagacgagagggttggtagaatctgaaggtaggaagaaaagacacaagagaaatggagagatcgaacagcgtagaatgaatgggcagccaagacagcgatattgtaagtcgaagggaagagaaaatgccgtcgccagactcaaagtttcgacctactctgaacgactcctactgagagagaatcagtcgactcaaccgcagaaggaatgggaggtgccgtaggcacgttcgactctaacagaggaattgattcgacccgtccgttcactcgtcgagatctacgtggacgcagaggctcaagctatttggacaaaagcatatgagtactgattaactttacgaaaggataagaatagagaagcgaagattaagacaatgacaaactttgcgtcggagatctttcatcttagccgtcttaggatcccaactgtacaatttcgcaagagttgatatagtggcatgttcaaatcagccgacagacaggaagaagagaagaaacggacctgtcgaaagaacttcttagttcatccagttctcgtccgaaataccgcagaacagacgagtcttccatgattcctctcagaatccacggaatctcgtagctgtttcgttcttcgctagcaagaaactcgtcgacttccagagaaccagctgaaacggggcttgaggtagtctcaaacaagtatctgatggccaaccttcagaagataataaaacaacgagacatagatgttaggctagaagacaattccaacatgtcagtcggcagagacactacgcatacaaataggttgagtcttctccgtaagcagtggaatgaccaatccccgtcaagccttcatattgcacgcgaatcaaccccgaccagacataggagataagcagcagcatacatttgaaagtacttgacaaaagctagataactcaccggctgcaacggcctcgctaaggtgggtcactagcccaccgtcagatagtccagcattatgcagctggagacagaatgtcaaaagctttgtgacgaagtccgaagtacttagaaaaccatacacaaaatgtacaactagtcagaaagagaaaagaagagcctgcccgaattacaaattgagcagacgacttactcgtaagcgactgcatcaatatgtaaaaccctaaggatgtttggatgatgagcaactgagaagattgcagaatacaccgggacaactctaattgcgccggttgaatataacaatcatttgaaaagattcagacacaactcaagaaataccaagttttaggaagagagaaagactgactgatcgtttagagaagcaacgtaaacaagcttgcatccttggtccagaatattcgagagggactgaatatacgacttcgatgtcgcgctttcggtatcttggaatctgataaccagccaagttcgttagaaactagtattgcatccaaaacaagataatttgcaactgactcaaagagttgatgtgccgctgcattctcaaagtactgaagataaggtatcacaaccgagcttgagctcaggtatgccagtggccctagatggactccgcctaagcaatcgttatgaaaacagtatcaactatgcacagctgtttttcaaagaacaaatatcgtaaaccaaagttcaaacttacaaagccctagcatcaatacctttggcatttttctgttttgctgttcttccttcgccggtccaatctgccgcttgagctcttctacagccagttggttgaacgcagaacatatatgaccctgggcatagagcctctcgataaggtatgtggacaccggacaacctacaattgatggtcgacgatagagaacaacaagattatcgatgaatattcagagggcatagttaaaaactgttgctgaaacaagtcatcaaggtgatagagcgcaaatttcaagcataccttgagagtgagtagcgacaaggatagcatctgcgctacgaagatcatcaacccaatccggattcgatgtgtattccttgaacaatctatgcgataacagacataaggaaaccgattggttgaatgcagaaagatctttcaatacatgatcagtttaattgtagaatctttcgacagtggaatgacaggagaaacgaaccgatcaactcgatgttctaccttgccttctccttctagtggcatagctgtgatcttttctaaagtcccttctccgaagtacttttcgaccatgttgaccatctttttcgcaaatgtagctgacgtccctgttggctctccagcaatctatcaaatgcataccgttacattcaaatatatcaagaaaaatcctgatccaggttagtctgagatggaacaacctgtttgatagatggtgatatgaggaaggagaacatacgtatctaacaatagcattaggaaaccatccatggacacctataacaacaactcttttgacacattgaattcctaatgccttgcccttctcgtctcctcccttcaagcctttctgtacaacccacgttctgggtagtcctcttgattctggatcctccaaatattggctgtccagtccctctgtcgacgtacgctcccctttgttcgtatcaacatctcttgtcatattggtgcttcttggtccatagacatatgttgtaagagatgatattacgttctttgctatcgttctcttcttgactcgaccgttagtattcgaagtaggatcctgaacaggttgacttaaaaggggacgaggcggtgttgatcgaggcggatgatcaaatatatcggaaaatgtaggcagtacaaggtttggcggcggcagagagatgagcatggactgtcgacgcgatgtaggtacggaggagataggacgttcggaagacagatctccgggatgggcagtggtagtccctgcagtatcgattgacggacccgaagaaaaaatagaagaaggaagattgggacttgaaggagatagccgtaacttggtagccaacaggcttaaacttgatttctgtcgtatgttttgtggttcgcctaggatagattcaacgtgcctttttgagcttaataaagctaatgcctgcggtgtttcagccgttacaggaggtagtgtatcttcctttcctatgacatcaggaaccttctgcccatctaaaatagatgaagaggaagaagaaacaacaggctctttggctctgaattgagcgggtgtgagagtactaagccaagaggagtaagacacagaagtaggagcagcaagagaaacaggggtagtaccagtttgtagagttaggggaacagagagactcgtcgtaacgggaggcgcggagggtgtaggaggaagaatttcaggagcaggtatttcagagctcggatttaaggcgatgtctccagagggtatggctggcatcgatctgggcacaggtacaggtgtagcagcagatgatggccaaacccaagagatagggttgaggtatgaggacgttggaacgacaacagacgtcaacacatcaggtggtgctttaggaagacagttcgggatagaacgagatgattgctgatcagtcctagtaatctctccagggtactcaactacgagtacacagtgaacgacgggtagatgtttttaatcgattgcttgatcggtataatacatatcagcagggagatcaagatatcaacaactaacctgatggttgttcggtcataccttccggcagactgacttctcctctcgcaattacaggcgtacttctggttgggccatatcccaaataggaccaccattcagaatacctaacttcggatgcaggcaaagaaacatcttgcgaagaactgttttgatccacgtcctccggaactacagcttctgtggtcttgaaatctgaatcttttggtgattgaggtagatcagccgaagcctgagtatcgggaggaaggctgggctgatgcgctgtgtgatcagaatgaagatcagaagttgtccagacacagaaatcaagcacatacggaggttagggatgaatgtgaccacataccagatccatttttataggaccagatccatctcccctttgaagcgtttgcctcagttgttaacagaattggttcctcctcctggttggccttcacatttgtctcactaggaacactagtctcggcatcgcccgatgaattatcagcggactctccatagctcacagtgtcaatatggctaccatcgcccttcaaagaaacagatctcaaaatggcgggaatctgaagttggctcagacgggatgagtgaagccaagcacgactatttgctgtttcgggcgataattgttgaatggccaactgggttgaatcagtggtcggaacacattctgccgttgttagagaagcaccggatgagcttattcgggcagtaacagatgattgagaggaatttggttctgtcgaaggaacgagatgtgatgacgatgatgacgatgaagtcagtgaggcttttgggccggtcatatccgaacctttcgaggcagaaacaggatctgataatggaacattctgtgaggaggaaggccaaggaaaccagctgtgttgtctcgcaggcactgaggcggctttaggagaacatatcgtctgggtaggaccgacttctgatttggtttcctggctggcgtcgggagaagaagcaattgatggtgagaccaatatcggcgtgattgtcgatggtggtggtgcagatgttgagacgatggccaaagcttcatcttgatcttgtttagtcgagacttcttccagagggctctctatcaacctcctctttcctaagaagattccagcttcccctcctccttctcctccgaattctgaagtgatccaggtcctgtctctacctttgcccttgcgttttccattacctctagctcggtttctctcgagctcggcctgtttcgcttgaatagtattgttatccttttgaagggctgatctcatgaagaaagacgaggtttggtgatcttctgttgcaggaactattaatgacggtgacccacgaccagatgctgatgaagctgagaccgagatcaccgtcggtagggcaagggtgctcggggctggcaacgtcagacgaagggctcgggcggatgttgttcttatggaagagatagatgaacgggaagaagcttgacgctgtatatctggagaaggagaatttatggatgacatatgggaatatagatggtgtgtggcgtataaaggtggatgtggaaccgtctcggccaaaagataggatggctccgtagtatgtctaaaccggtattcttcggtcgcatctctctgtttacgtatgctttcacatatcagaaatacaacatcaatgtctggatgaatcattgtgatatactaaaataagatatcttctcaacacgataaagattgaagcagagaaagctccttggaatcgactctgtggaaaatgacctattccaatcttgagtccgcatgcggtaaaacataacaaatgataccctcttctcctcctaacaaacacacatctgaacaaacggttcaggaaacttgttcgattcaagactacacaatcctatttacacggtttcttgttcagctgatgttggagatttcaaaaaatcagtttcaaaaacgaagtagacaggattcgaacctgcgcgcccagagggcacttcctgtacttgctgatatagcagggaagcatcgtaaccacttgattactactcctttgatgtttgtcctgtctcaagcagccccagaatctcgctggcatctgtctctcgtcgaggacactgaccatacagtaaagccgacgggcgagaacggcaccctttcgttctggcgctcgttcccgaccgagtccccactggcttcccagaccccatatgcacaccacccaggtgtcatcgtacaatggactgatgtgatatgaccacggacaacagaccaaaggtaagagacccacctggcttgccaaaccatatgcgcaccaaccaggtgtcacagtgagatggatcgagaaagaagaagaaccgggaggagctagcaggtctggtgactgcacggagagaaatgcttggggtctggcgcaagatctgagggtgttgcctcgaagaaaaacatggcagatcacagctgaagccatctcaagacggccaaaatcccaacatgagtcagaattggtctcatttacgacattatgtcctttgtgatcaagtcatttgagcaaatgtcaaacaagatgtttaatcaggaggttggggacgagtgtgtttcagatgcatattatctttcccatctatcctctcctttcggccttcaactccttctcagccgccattcattcattcctgatcctactgtgagatattaccacctccaatgcgactgcttgacccactccatagggacttttcgcgtgtgaattttagttttggcgtgagggccctgttttcgaattttctcaagagctttggcatgatagacctcttgctgttggttacgaatagagattcagatcaagatgtcaattcgaaactctgaaagattggcattctgcatacagaaaccttgtgtgtggagcacgggcaccacgaaatgtgaaatacgtacacgttccgctacggtctggccctccgtcagtgtgaagtacattctggcggatttgtgatgcatctgtcagattttgaaatcatgtccaaatacaggaagcagattagctttctgttccagagatcccagtgaaagctacctcgaactgactactccaaatcgacctcgacccatgatcatgattcgcttgagatatttgcccttgccaaccgatacagcctctttaagtccctccaaaaacgtttcatttcagcacaaaac

SEQ ID NO: 1611 - DNA, 10348 bp, Xanthophyllomyces dendrorhous
ttataaatctcatgtacaagaagcagactcaagacgaacgaagcttcagttttcccggattcattccgagagcggttgcgtggtgcttgcctcgaatcaaggtcgatttcagtcgcagggcagccttcttctcagaatactgcagttgaagaatagccgaatcgacaggaagctttctgataagcctggccagcagtccaagctttcgaggagaaatcttgaaggccgctgtcgagaaagagaactaaacagtagaacaagaaattgagttcggatatcagcctttgataattgaccttcaagatgattaagtcggtatgaaatttccttggatggaggggcagactaaaggtttgacagttaacctcagcagcaagctggccaaagactaacgtacagttttgggaacctccgttcgctgctctcgcttaagctgctttttccaattcacaggcttagctcccatgctctgtccaaccgctctggcctgactctctttctgctctaactcgactgatcgcttgttttgcaaaatcttctcagcatcctgctcctgaccaagctcttgctctagcgagtcgaggagtccactagaagaggtcgatgctgggttttcctcttgaaatacagacttcacagatgaggaagttgaaggtgaggaaggtgccgatggattccagaacgcaggggccaaacgggtgactgatattggacgacgagaaagagaaagagcggtcctatagacaggagagacggtaggagagactgccaaacgacgaaagaggaaaggaaggctgccttgcatagtgtctgacgaggttgtgtatgagtcgatgaaaggtcgttgtcgattaactccaagggaaaaagaaagaagtggccataggcaagcgacacttagataatgaatgcgatgatctatatttcaagtattataaccctaacttttccctccccgacatcttgcatctcacagcggtttcttcagcatctctctttcattctaagagcctctgataccatcaccacaaccaggggaagtagagctaggatgattccgattcgaccctcagccgccttgctattcatactagctcctctgctttcattcgcggctcctacattcaaaaacacagccgttgtcaaaacgattgatctacaagggcccatcactacagaaacaactacctataccgcacagctcatccggcttgaccctggagagtcaacagcgaccgagttcgaggttattgtcggaaatgatgaacatatgcgagctggatggttcgaagctagagaaaaaaaggcaggaaagctgggagatgagctagcttggagaaaaggaggcaaaattgaagggtcatcgtcagtaatccttttcccctctttttatgatcgactggggcgtgtgttgcttcttctgacaggctactttttttgaccttcactgaccatgtatcactttcggatgatttctattgcttgaatagagctcacagctacattatcactctcccaatcccgttgcagattgattcatcgatcactcttaccaccaccttcgtgctgaccgattcggtcacgcccaaacccgctacgattgctcagaacgaggaccagtaccttctctggaagggcgatgccggaattttgagtgcttacgagatggagattggacgggttaagattaagtaagctattttggactcctttatcactgatagcataaacaggaatataacccatcaacagggaatcaaaactctcaagaacgataattgaactgttcaacctctcccacagatcacctactcctcagattttgtcttactctgagcctccgacagcgtacacacagtcgaatccgatcacaaagtctggtgcggtgctcacacttggaccgtatcactctgtgccagctctcacctcgactttgagtgttgctccattcgaggttcactatcgattcaatgatcctgtgatcagcgttaaggagctcaagagagctgttgaggtaggttggcaggttgtatccgagtgtagtcattgcggaggggaaagtaacttatattcgtgactctgtctcatcaggtcagtcattggggaaataatttgaacatcgaagataagatcactctatcgaataccggaccaaagtcagtctatcattgtcgctgcgcatgtctagtctgattctttccgctggacttccccattgaaattctttctcgtctcctccaaacagtcttaagggacacttttcccgtatagactatatgcgatctaaatctcagcggaagttccccgctcaggtgctttccgatctgacgatgcggctacctccgaagatccaggtaccgtacgtatacgacaccatcggtaatgtctcaaccactcatttcagacattcagtttcctccgagagatatgcgaccaagatccgggctgcgtcccgactgccagtgcctcacgagaaggaggaaagtgtgttggagatgcggccgagatatccgatcatgggcggttgggactacaactttaccattggatgggaccagagtttgagcgagagtctcagaaagacggttgatgggcagtgggtgcttggggttggattcctgactgcgttgcagggtgttcagtatgaatcgatccagtgggatgtcattctgcccgaaggggctcggtgggtccttgtttgacgtttgcttctatttatcagcttgttcgataactgacatgttctatcgtttaatacttcgcgtgtaacatctagggatatctcggttgaactccctttcccgaccgatacagctcccgagaagtacacgcatacgacttatcttgataccctcggccggccggccgtgagggtcatcaaggagagatgcactgagcaatgtgctgtacctgtctatgtgagtgacgcattttttgattgacctgtacacgtataaatgattgacggtatcttttatcgcttgtcatctcgctcgccaccgcaacgaaggtcaagtacactctgcctgttcaggccaaccttcagaagcctttggccgtgacggtggctgcgttgtcgttctttgtaggtgcaatggcactcaagcgggctttaccaagtgatagacacaggggtggcgtggcaattaaggaagtcaagaagcagtgaactatcgatagaatgtttcaaggcggggatcggtcgggtgatagagatcgcgggaagaataatgttatgtctttcttttctcatctcttcctctattatgaggagatgaaggaatcaaatgccagatttcgatgaagaaacaaagaaacaaggaagcaggatttgcctctcgtgtattgaagagttggctcaatttggccgcggaggagagcatttagcgggatggattggcagcaataggctggactagacttcgatcacatttcactccttttgtccttctttttcatccgtgaggttttcacttcttccccaagatctttcacgaaagaactttccaagcggaatatgaaagaggagagaaaacccaagaaaaaaaaccaagggagaaaagagcaaagaaacacgtggattgtatgatacgcatgaaaagcgggcgtttatttattctcgcgactgccaatgtttctatcgagcgccatttgtttatctcaaaagatgcctattcggtcaaatctttaacccaagcgatcaacaaagaagggcgccaaatttcaacatttttctggaacatcgatgcggcctcgcgctgttttacggggaaatcttttgaccattaactgatcgccctttgacattcctcttgcttcaagggcctatttcacctgatcgttctttagaccctgtcctagtcgtttgcctgttcatctgctcacatccaagagcatttgccctggtttctatctggccagaattgctcgcttgaccctcggttctgatttgttctatacaccctgtccctttttctcccttttctctatctttctcctttccttttgtcgctgctctgatcgggtccttttttctattctgcgtccgccttctcttgcctctctaccctcactctcacttccccctgtcaattcatttatttgcttacaactggctaaccaaaatctatgatgagcgggccgaacaagaaattgactattttcagcccgggctatcttctcaattccatataaagctaacccatcgtcagaatcactgatggcgacaacctcgcatgaacccctgcatttcttccctccttccctcccgacctctgaaaattactacttgtgcacagtcttttcatttctttaattgtcgtctctaaaggcctaccgtccgattcatccttgttcatatctgactggttgattcattccatcagtacacatacacatacacacgaatgtcttcctttcttgcattgtctcctcatttaagctcttcatcgacaccctcgacctccgccacagtctatgggcagtaccttcagcctagcctgttttcgccaggagagcatgtatcgatgtccagagtcaaccaggcctgcacgccctgtcgcacaaggtaagtatcttccgctcgccgggcaatgtgtgttatctgggttctcaccttggcgttgtcattctctcccgtactctttttccaggaaggtcaagtgctccggaagcataaataacgggcgttgtacaaggtgtgagaccgcaggaaagggcgactgtagtgagtcctgaggcttgttgtttctgctctcttctccgagaacaatctttttaagactgaacattccttgacactccttcttgcatcagtattcgaggccgtaccgtttgaagtaaaggtggctactcgggaacgaaaagcaaaaagaagggcaaacgtggccaagtcttcaactccttcgtatgtatgctctcgcccggattctccgatagagacctctacaatgtcgattcgacgtcggagagatcgagcggatgttgctctaccaatatcgcctcgacttcatttgtatgacaactcgttcacattctgtgtatgtcctctttccgagtttcttcagattgtagggctgttcgtcctcgggatcactcacttttgtgtgatccgaaccttcttttctctctctgtcttttgtttcgggaaagaagtcttcgacgcgccagtcttacgagaaatcaaaccaacgaagaagaagaggtgcgctctgttcggctacggtgttccaggacgatcaaactcacgccagcgtgcccaataccggattagtctacccgatattcgaatctccgtattactctcttatcgattcgacctggacctcgaatgttaggtcgacaacatatcccactccgacatctgaacaaatgtacgggctcggcctccatgctggacgcgaagcgtatccgatcgaggtcaccggtctagcgactactcttcctcatggtcagtcgatgacaacgactgctgctgccgccagtggacaatactacgctcaaccgacatcaactcaaacccaagtgccggacggttacttttcgatacctatcggccatgctcatcgatcaacagggatgaatgagcacgaaaacagactagcggtccctacagaaatatcgaaactctctcatcatctcttaccggctctgtcattagaggatcaatccggtgagggagagacaccgggcccaccgttgacgccacaaggtgaaacccgattagttcacgaggctacgaatggcagaataaaggcttgggtcgaatccgggctttaccgtgactcgatagcttcaggggaggacgatcaggttgagtggtcgaatgcttggtgtttatagaggaaaatgtccatcaagccttcctcatgttcactctttgcatttccgttactcttttgaaccaatccttgtatacatactccttaaattaatcaactatagaaaagaactctcagacgactgaacaagactctatgaaggtttctcctttccttttgattctctttatctcttgtgaatgtattgtagatcttccaatggataaatgatcccggcctgatatacggcttgaacccatgtgacaggctcgcttagtggttaaccgaaccgtcatcagtccaacaggtgcacggggtgaagatgaagaaaaggtggagagagaagaaaatcttctcggtattcaatttgtacgatcgactgtgcctgctatatttgacgccatgagatttgtttatccaggggaagagaaggaactatggagtaacgaatcgcgagaagggctggcgtggcgcactcagctcaagtttcaccaattcaggccccgttctctttgttcacgaccctgtgatggaaagagaagcataatcgataatttttttacgattgaaagaacctttcgggatcgggacgaaagaaaaagtagagcaaaagaggtgtctgtttgagcacaagacagtcatgagatagatggacgaagcgaataagaggaacaaaggaagagatgattagaataatttagagcaaaagacgaagtagacaggattcgaacctgcgcgcccagagggcacttcctggacttgctgatatagcagggaagcatcgtaaccacttgattactactccttcgatgaaataacaccttctgtgacaaatgatatgtgttgcaacattctttcggacaggactgttggagtttcagcagtcttgacataatttcatctgttatttgtaatctcttcttgagacatcatctgcctgcctctatttgcgcggagtcccaaggctctctttccgaagagctgaaaaattttctagcgggtttcccttctgttttcctggtttcccaatccattttaatgaaacacctgggtggtgtgtatatggtttgggaaaccagtgaggacttgattgggaacaagtgccagaacgaaaagtccattttcacccttttatttcagtaatattcttctttcttgaattgagagtaacacaaagcgttatgactgtttttacctcagtctcgtccatcgaaggagtagtaatcaagtggttacgatgcttccctgctatatcagcaagtccaggaagtgccctctgggcgcgcaggttcgaatcctgtctacttcgttttctttttgtctgattcacttttatttactcgattctacatcgcctgttgacgcaataaatcgttctcacatgactatcgagagatatgaagaacataagagacacaggttgctcgtaatacataaacgtccatcttgcactatagatagccgctgcgaaagaggtattaagactagatgatggatttgctagggaattaatcattgatttgtatgcaaaattaacgcacataagtaaggcagagaggaagcatactagcaatctgaggcaacgaaaggctttcacatatgaatgatggtagaatgcaaaagaaaaacatggcattaagccatcttgattcggtttaagaagatacaagctaaaaaaaatcagaatcgccatgcagaacgagaagcccatcgtgagtggacatgagataatttgtcagaaagcagctatcgttatggatcctatatttggactaaaagggaaaaataagcaagaaagacagaaagattgagtgcagatccatatacgatatcaccttttaagggttgacgaaggtctggatagaggtcgcgtctcagttgaggtcttgtaaaatcctcaattactcgtctggcctgtgctcttataactgctctgcaggaatcgaatcagtcggttgcctgctcatcttgaggagagctagctctcgagccaatcgagcgttctctgcgcgaaggatcatccgattgccttcggctgattcaatcacctgttttattgtcgcaaacaacgagtatcgtcggccagttactttcttcagttgcttatccggcaaaacactaagaggttaagaagacgatacaagaaaagaaatctcgggaaaatacctcaagcgcccatccagccatttcgtcccatcgttctcgctgatcttcggcagcccgtcgcatctgtctcagcttcacctccaccttctttctcttttctctctctgctgagcagctctccttccaggcctcaattggcgtttcccattcgttctctttgtttgcatcccatgaagctggaaacgatgccgttgaagaggtcgttgccggtctggaagacggagagccaacaccactgaaggccgatcctgtcttccctctagatccgacaagagacgcagatgcggtcatcatatcctcttgccttgatagcgagaaggagaacgaagcaactgtcgttgcgtccgactgacgatcaggcgttgacagagacggagagtcatcagtggtctgtgttgaacagctcgaattaggagagagatcagattccctcgcagatttatttccgagtggcgtcgtttgaggttccagatctggtttttcgaagttgtgtccagagacagaagagcttttgcccagctgacctccgtcctcttccgctctatcggcggagtgaagccatctcgggggtgtggaaataggatgaggcccaaaaggaaaagaggcttgacaggcaacgtctttacaagagatttcttgcctttcaatagcatgctgatcctcctcactgtcctcggctccttgatcgagtagactgatggtcaacgcccgttgagcaagcaaggcatctcgagcatcgtcaatggttgacgtagtaccaattaaagtaaacctccgcgttcgtccggaccggaagccctccgcaccaaactcttcttgagctcgtccggagcgagaccgagcacgagacgattcccacatggccgagtcggcatgtctttgtagctgagcggcagtcaatcttcctgagggcgccaataccgacgaagggatagaaggaagccgatctcttttgacggaagagacgttacttataaatgtagtttgtttggctatgcccttcggttgtggcaaatcagtggagacaatgggtccaagtatagggatatttgaagggctcgggtgactttcctcatccgtttcatagcttgagcgggttgaaggaacgtaaggcttagagtcaggcacatcagaggataattctgtcgacatgtgtctatggttcgaaggaggtagatgagggagtggggttgtgggtgctgggcagaggtttccaaagtctagtgtggaggaacgacggaggctaacagtaggagctgtagatgggcgttgactgcgcgatttgtgaggataagatatgatgttcacggtatttctagtgcagagaatagagcaatttgtgaatcagagtgaagagcgcacatacacataccaaacctaagagaagggagagactcacccgctagcagtaacaattttttgtacccctctgacgcttggctggatgctgtccatagagggtacgggtggcaattcggaggaagtggatagttgtccgaacccactattgccctcgtttgacgaaaatatacttcccagttttcgtccaagcgtcaagacgcttcgtctgcgagagataggattgttcttggaagaagcgcttggaccttttacaggcgcagtcgaaatttcttcttctggtcctgtcgatcgaagaaaatccgccagagtctaagtggagcgaggatgacgaatgagataggcacggaaatacatagttgacgcaagatcaggagaacgctcacctgagtcctcgtcgattgagtcctggctgatttgtcgaatacgacctgtttatctttagagccgtgtgaagaaaaactgtgaatggatgtctgcctgttgatcgtcgacttggcctcaagcctgccttcagtcaccgatcggacgtggctgtcaacagatctgactggaatatcgttatcaagaaaataattctggtaggtctgtccactggtatcgaagggatctatatcaaaaaacatagaagtcagaggagcaggtgtggtcttgtttggcatgtttttcgtgagtgtgggtgtggtgggaagagaagagaaaaagaagaagaagaaagaccgagagacgacaggcaaccggaggaggacggagcagaactttcaggattgatggacgaacatgtgagttgacaggggaaaaaaggcacgcgagaaaagatctgcagcatgttccaggtggaggttgaagctcacgttctatcagggcgagacagggcaataccaagtgagacaaggcaatatagggcaagacagctcaatgcccaggaaccatccgagcagaataacatcaaggcgagaatgtctagagcgttccagacttggtctgttcctgaattgatctaa

SEQ ID NO: 1612 - DNA, 31373 bp, Xanthophyllomyces dendrorhous
aatatcagctgcatggttagctttcggactcaagatgcaaacggggaagaaagaacgtcagaggcatggtcagcgtcaattctttgacacaagatggtcgttgaaactagctttagttgtcagatgagacgagaggattcatatgattatataatcggtcgtccaaacttctaccgccgagactcaccgcttcccattacgagaatatctaactggaccaactgacttgcgattctgggcatgttctcctctcgtgacattggcactaacacacttggctaactgcctcgctgacagaagccacgcagctcacgcattgtataaggttgttagaaaattcttgttgacctctcttttagatccttggggtgaagagaattccctgaaattggaccatccgcgtgtgtgtatatgtgcctgaagacgtcctgtgtgaatgtcctgtgacgagtgtctgactgcccaacaaatgaactgttcctccgaattcgtttcatatccttcttcttctttctcttcctccctccgtcgccttcgtcgtctttctctcttccgcattctcgactgtattcatatcgttctctcttctctatctatctcccctgatcctatccttcccttccagctgtactcgatcttctttcttcccgaccctggcaaacctttgatctcacaacccaaactatttaaatgctccctcacgatgcaagttttaagggcagtaaaacgttatctgtttacctcgatgacgctgaccgaacgcgtgtaccgttagctgccgggccgaactttctatcaatgcccgaccttgagaagctcagcaggagcctcaaagcgcctccagagtttccagttcgtgcaatttctctgtgacgtagattgttcagcgttatgtgttgatcctttactattgggaacatgaattatagcaaaacggacgcaccccatcccaggccaaaattgctagtctagaatcgcagttattgacacttcagacaacggtttgtgatacctcgtgccgtttattatcactgtgaacttgctaacaccaaagaatttgaaaacagctctcagaatctctcaatgagatgtccaaacactgtgaagagaattttaatttaacggaaagggtatgcgagctagaacaggcactctatgacatgtccgccgccgaacgagaatgcaacaggcgcaagaattggctagaggacgaggtgagttgcctgtatatctcttcgtatatcttgcgtgcactgatcgcgctcaaacatcactcttaaatgtcactgcttgacttgtccttctagcttaatcgccttcgagcacattcaccgttgtttgtgccgacagaaacgacgcgtggtctatcaaccatgtctgctggcgtctctcgcgcgatgcattcctgcaagagcacaaaacgatctgactacacacttgatccggcaggaggctctgtcaagaccttagcctgtgctatagtaggtgactgttttgtctctgtaaaccctgaatccttcgcaccgagattgaatagtctaaactctcgtcctgaatggtatggtcttcagccatcgcgcatgcaatcaactcccagtccatccccgaacatcactctacggacaccagcccgaatcagtcgatctcgagcattgcccaacacaactgccaataacaactctcttcagtgtatccccagtccaaacactcgaatccctgttctttcagcctcctatgaaagtcgaatcaatccccgtcctgcgtcccaaccgctagcctctccactacacataggttcttcccatgcttcgtctcagacaattatttctatttcacggtctcgttcgacaggagacgttccctctccgtcaatcttgaaatcgaaaactcactgctctcctcaaccggtcaggactagccgatcatcccatgtcttatcgtcagagtcgtttggagtgttcgactcaaaacgaggagtgatctacggcaatgaactctttacctctcccatcagaaggtctgataaaaaagggcatgacgacgtctgggaagagggagctagcgcatggaacaccttggctggttctcgacctgactggacagggtttgacagctcaccggaaggcgtcgtcaatacggacaagctcttgaagcatatgtatacacctccgacaatgaccgcagaggatgaacgctcatgttttctcgccgaatccaacaaggaaaactactttggacgctcaccactgaagactcctcatctcttgacccaacgcccgtcagtttcaaaagctggttcgaaattctcaactcgtatacctgcatctacgagcttccgatcgaaatttacacgaacagctccttctttcgaccagcttgagcttgggtttgaatcctctgatcgattcgactctcagagaacactagtcgaccttgatctatcctctgcctccacacgtacacgcgtactctcacccgcatcgcctactgaacagccctctacccgcacaggactcgatggctccagaagttctttagatcgaaagccaccattctcatcgtctcatctcagttttcatgagcgaaacccccgttcgattcagaatgcacaatcgacgaataggtcattgaagaaggtgataccaactcggtacgaagcagggagctctaggacaactaggatcactcgaactgggtacgcaactggaggttgagtttcttttttttcgctatgattgtgttatccctatagattgtattagtgctgccttttataccatacttaagcgtcataattcattgacgacatatctaaaccacaaatttttgtggatcctgttctttaaaccttggatacccgagctctccattctgtcgttgtacgatgtacactgtatgattttcttctcatttctctgccctattctcatttgtttttcctcgatgctggtctgtattctttctttaaatgatcgtcatctctccttattgtcaacctcacgcacacgacttgttcgattagtatgtattacaccttaatttttttgctcgaacctcctctcttctattgtcgcttcttgtcatgaagctttcgatacatctactcctctgacttatttcctcaaaaaaaaaactcagaaatgacgagagataaaaataaaacaacatggcgtatacaacgaaactccggttcttaaatcctaaacctgatctttgggggaagaaacaaaaacttgtccgccctcttcttgacctttctccttctacaggcgacgaagataaaataacaacaacaccgatcgactttctgagtgcaataatgggaaggaatgaggaagtggagaaagagtcgaaatctaaccctccgagggtttgaagtacacgttcgttcgttcatgtactggaggtaaagtagcccctggcaattccttcttcaaaccgtcctgtttagatagattcaaccaagattgattttgaaggcaggatgatcaagggttgaaaaatttcccgagagtacaaccggtagagaatttgattttgacacagaatgcgggatgtaaccaatggccaataccagaggagtgttgatcgatcgaacaatcaaagtcagacacaatatagattgtcagtaatggttctttttggtatgatataagaatgacgagcctctccacaaatatacagagtgaagaattgaacacatacgatcttttcaaacacacacgcatttagcggtcgctctcgatttcggcaagcataaaagtcctgattgagatgcccgttgacaatgtcagatgggttaagttcagatgaagtttaccaagcgacaaacctggttgttcctctccaagcattgccagtgagcctcgtacaactgagcacaattctctctcatcttgttgatactgttttcagaagaccgaagggtgggaaggcttagtttacgtcttcgttatccagcggccttgactactgctcggcagtcgagactgagagagaagggacaaacaagtcggtagcacaccgtgtcacccgccgaccctccgccaagcagtaagcaggatcttgattctctgccttgcaaagcataaagtcctctacaagaatcgcatcccgagggttaagcgtacgtgaggaatcagaataaatatcgtatcacgagtattaaaagaatttagacctgatcagcttatcaagttcggctcaacaccgcatgaggtttgagcggatatagtcggaagatgagatggcgaaccagtatagtctttgcaataaggagcgaggaagaatgaggcactcttcaaaggtgcactcgtcactccaagttcagtaaccttaaggatgtttgatgggagtggattaggctcgacgacatctctgttgatcgatgggcgatcaaaatgaaggagaaaagaggcagaataggtgaatcccgatagagaaagagtacataaacagacaagaatgtcaggatcttgctctcctatcaacgatcactcgaaaatatcaacagcaatcaaaagaaaacatacgagtacaatgagttgtattggtttcctctaaacttatggtcttgacccatctctggatgatgtattcgatgggaatgtcacaacggaaggaatgaatagaatggaagagatgggagagaataaacgaagaaggaggggacccaatctaactagtggttacgattttagaaagtaaccgcaacgtaatccttttggcttgggtgccctcagaccagaaaccacccggaccccaccggtcacgtgtttagtctgtgcctgccccagcctcatcctcaacagtcatggcagtttcagcagcagtggcaaacatcagcagcaccgatcagtgctcatcccggacgcttgtcctcgtcactccgacttctttttgtcttgcaggctgccgagatggatgtctgcttctttgcaagggattccttctggtcggtttgactggctgtcggtcatgatgaacagcgcggtgaaggctctgcagtccacagaccacagaccaagacgtgaacagacaaagatatgaacagacagagatgatgtgtttgatcgggtcatgtgcagctaaactcagtgtttatcagtacccgcgatgacatacctgatcatatgtttggtacatcatctgtcgacgctttcatcattcttctagctatacgcaaagtacgatattcctttttctaatttgaaaatactcctcctatatatacactgggggacatcatgttgaaaatagttcacaaaatctactgtgccaaggatatagaggaacagagatggcgagtttgatgaatgcactttccatgggagtttgacaagaagaactcactagatggtcatctcgaggcaaagaagggatatcagatatataggttgagaacccagtgaaccatagagtaagaatgggcagaaaaatggggaaggcacttctgcctattacatgatagttcaatcggtccgaatagactcatctcgataattcttattgttattgcccaaaaatttccttgttggtcagatggtcagaggtgatatgatcagaacattttaaagaatcactgaaacacgccaagtcagaatactatatcgatcagacactaaagacactgaatcttgttcattcgcgcaagactcgcaagatatcttctcaccttcaagtcgactcccaagatacgttcttatgtggcgaagccacctttggcatctctcctggcgcgacatcatgataccttctcaatatggttgcttcggacgagagatgctgcttatacgctatcctcagtgacctcggaaagttgacgagtaccgtatcctccacggtcggttcaccaagataatcaaacaacacgtcccgaatgttcgtcagcgatcgtccatttcctacttctggaaaatgaagtctcagcgtgaccctgcccagtaaccggttgaccatactgagtttgttctcatggtgaaagaaatcaagacaaccctcccggagttgagtttcgagaatgacgcggttgatgttttcaaaacttcttcctagctcattcagctttgctggatgaacaagagcgagagaagccccaacggcgttaaacatggcctgttggacttccaataaagctggctcaaacgcatccagcggaagacaggcgattgtctttcgaaaaggagcggtgtgcacgtcggtatattgttgaatatttgccttgaggtcttgaacagcctgttcgatttcgctcggcgtaggagggacatagacgattcgttccacgctatcaagtgatggaaatttgaacggcaggaggtcgttcatgtcggcattctgagtaggtccctctgtggaatcgagaaccaatggaaatgggataatggtgaacacaagttccttcacccatccgattcgagtgggtcctaagattggatggttcaagcatccggtctgtctgtgaaagatccctgtccaatgattaggccgacaaataacgagtcgtctgtacaataagggaaggcaatattgataatatgccttgcagacgcgcaaaaggggtagagcagatgataggaggaatggattgacgtcctgtgggcttgatggcaggtcttgcttgaatgcgaagaagagaatgatgaattggatctcgacaggaagattgggtagcaccatggaccgattgattcacttgatttctagagagtaagacctagcaagaagatcaaagagtgtggttgatccctaattaatattgggatagaatcagtatattcgggtcaaggaatttaggcttgaaggccaactgagagagaagaagaaaccagtgttagtacttatctggcagcatgtttttcattgtattccgtaatcagccgattgaaacccactcacactgatgtgaaattgactcggaaagtttatatagagcgtagcggtcctcaaggtggcacgaagtgatagtttcgaacgagaagaatttggcgagatacacgaagactcaaattctagggttggtcatcataaaactgaaaagcttatctaatcgtttacttgaaatatggctttaacccaaacacaagcgcagaaaagacatagcatacaatatattttgaaagacaacgaagggtgttcttgttgtgtaggtatcaagaggcaggagaggaaaaacagaaatcgaatgagaagtgcaacaggaaacttctagatgatcgaggtagatgcaaggcaagtggaactatgaaaaaggaaaataatgtgaatgaaaagggtacaaattcagacatgggcaaagcgtccaaacacgtcgataagaattggggggaactgcatgaagcacgttgagaagacagtaggtgaatgcagagaaagaggaggacaaggaagacaaaaacgagagaatagagtcttagatgaccaagccggccaaagattgactgatttcaacctcttcgactttgacggcaccttcctccagatccttggcctcatcctttctcttcagctccgcttctcgagccttcttctcgaactgtttcttcatcttgaaataactgtgaagtcaagaacgcatgatgagtaaggtatggataatatgagaacaggataaaaataagagcaagatatactctttatgtaatccacattcggtcttggccttctggccagcccatcgaccggatcgctcccccgcttccgggttggaagacggagtggcggtggagtgccaatccccaatagatttgtagccttgatctagaagaaagttgtagggaacatttctgagacgcagagattgcacgatatgatatgtcaacacagaacaagcatatgatccagaaagcaagaaagaacagcgaaggtgtacatactcggcatcaatgtattcttttacccgtccgaatgaccactcgatcaacgggttgatcttgagtaaacctgtcgagtcaatctcgactacaggaagagcagctcgctcagcgccttgcgatcgtcttcgtccagtcaagacggccttgacgcctagctgggcgtatgcacgatgagagggttccacctacgctcatagaaaagatttcaaggatggtcaggtttacacatcgacgacacgatgggacggatgccagaacataaagaaacataccttgacaaggtagtcatacatgtcctcttctctctcccaaagcttttctccataaacctgctcaaatgccttcgcatcttccacctcgtttccctcctggtccaccggcttgaacacgtgaagcggggccaaatacgtctcttctacttgactagcaagcgcaagtgtggacgggaaatggtagagtgtgtcaaggaagataagagggacgaggtgaggctcgtctcgtgagagcgaaatggaagaaatcattgaagtggctgcgagaccagttctagagtacggttaaatggaaaggtgattagcaaccaacgtctgatctggatttatgaaaaaaaaaaaaaggagaaaacccccgacgatgacgtacaatccgaaagcagtagtttgccagagtgctccttcaggtatattgtcaattgcccactcgagaatctgttgaggagactttccagcgagctgctcgttgatctgaacgagttcatctgaggtgaacagggtggatgcagctacgggcgaaggctgctcagcctggggagtggtagaaatgctcatggttgattctggggtgagaatggacgatacagctttggatgcagacgatgttctgtttcgagcgagcgtcgaaggtgattaggcggaggtgactgtctagaagaaggataacgagaatgtacagttacgagcaagaaaagaggggaaaaaaaagaaagaatgcttgagcgaaagatttatatgtcgcttatgggtgcacaagaaaatgagaaggatcacgcaattgttaaaagcgtaggtcgctccgaaccggcaggcggttccaatatgaattttgccggttgaatgtgtcagccgaaataatcggtaagccgtgtgtgagtgatgtaactgagttgctgacgaatgtaactgaagacccgagacttgtaaaccaacgcctagaacattcttgttacgctcacgcgagaccctcgatcaaacaggtggccatgactcatcgctagttgtaaccgcacgtaaatcgtgcctctaggctaagcaagtgatagatatgtgcgtggtctcacgggttacaacccttcttgcttgcacacgcgcaactctgtcttctgggtctttctcctttttcctcctttggtcttttttctttctctttccatacccaacaaaccttcttcgtaactttctcatacaattccccaaaggttcgttcttgtgttttctctattggcccttcccttcttcagcccttttctcgtcatgtcagtattctcggattttcgcttcatcctttgtcttgccatccttgactgtttatgtgagatgggaaaacatgatcatcacgaggtggagtgtagggtgaggtggaagtaaaatcccatcgcgtgttttttctcctcttccccttccttttcgcagagtcatgcttctactcaagcagtaggaacaccatcaagaacgatctctcctcttccctcttctcaacgccattttcttctatctctcctgtcctttctcttggatctttgatctccttgtgtctgtgccaatagaaaagaaaaggggtcaattgaacttacctgtcgtcttctttctgtcttccaccttggtttcatctcccattcatctattccatcattgcccttcctgtccatttgtcctcctctgatttccttgttatcgtctatcgcctttttgtcacagctaaatttccttgccccaactcgcaatatctaccagatatccattgtaagcttttcttgttgtcatattccatctctatctcttgctcgagctcttcgtatatcaccgaatgtgcccaagcggatgctccaaactctcagaacggacgaaggtggggtgaaataaggctgaatgtgccaaatttcgggcagagcacatcagaacaaataaagaaagtttctgataggaggggcggcaggagcaaacaggaacgatgtgcggatgcacctgtcactgccgagcaggggcatttcttctcggtttgtggcggaagatgctcctagatcgtctccccactcacacgtacactcctgtttctgtaaatgtcccgcttactgaattacgatccttttaaccgttaaaacagatgtccgagtcgagagaatccaacgtctaccttgccaagctcgctgagcaggccgagcgatacgagggtgcgtttctatcgatgacaacagaaatacaggtgtatgcgtactgacatctcatcattgttttcaatgatgacatcgtgtgcattcatctgtcaatccgacatctactcttactggaaatgggccatctgtcttgtatgggttgaatattatagagatggtcgagaacatgaagcgagttgcttccaccgatcaggagctcaccgttgaggagcgaaatctcctctctgttgccttcaagaatgtcgtacgtacctctcgttacagatttagtgtcgatgccttttgctgaatcagaccatgatctacttttgcatacaatcaagatcggagcccgacgagcctcgtggaggattgtcagctctattgagcagaaagaggagtctaagggaaatgatgctcaggttaccatgatcaagggatacagggagaagatcgaggccgagcttgccaagatctgcgaagacattcttgaggtttgtgactttccagattactccgcccttcgaacagcattgcatgaactgacgataatgggaatcaaattgtatattgcaggttcttgataagcacctcattccttctgctgcctctggagaatctaaggtgttctaccacaagatgttcgtcctttctggtacctaaaaaaaccgaagctagacacgtgctgaagagttatctggttgcctttgaaaaaaaatcaggatgggagactaccaccgataccttgctgaatttgcgtccggcgacaagcgaaaggactcggctgacaagtcgctggaggcttacaaggctgcttccgatgtcgctgttactgagctcgcccccacccacccgattcgattgggtcttgctctcaacttttcggtgttctactacgagattcttaactctcgttagtcttctctgaaccacttttatccgtatatatatcgactgttgctaagaacatttgatttatccacagccgatcgagcttgccatcttgctaagcaggctttcgacgacgccatcgctgagcttgatactctttccgaggagagctacaaggattcgacgttgatcatgcagctccttcgggataacttgaccctctggacctcggatatgcaggagaacgaggccaagggagagcccaccaaggaggagaccgctgctccggcagacgaagagtagaggctacaaggacgtttctttttcctttcgcctttccgagtttgttccctggtctttgttccgtatagttctctctactctggcctatctcattttcctcaattacctgtttcgttctcgcccttgctatcctcgccatccttctctttacctttctacttcatgatatcttggatgtgcgcctctagtgtttgatgttttttttcttcctttcgtcttcgattaatcgttttcgctctatctccttttcctcctttcttcctcttgattcgattgttttctctttcgcgaccgctctcgactcttcggtgcatgcctcctttttcaaattcgcaatttgattcggaactatcgaagatggtgaatgttatccaaacaagcaaataatctgtgtgttcaaatattcctcctgcggaatcgttttcttttgtatcccagttggttgtaatccccggggggtaattgtatgtatggggatcgatagaaagccgtggacggaagtcgaaatgatttagttcagctccgcattatatccgcgccacccatgatcttggaaagaaaaaaatggggaaaaaatcttgttccctttttccttcttcttcgccacgattcttccgtctcagttgaaaattctctcaagaagactctttttttcgttgtcgttcttcctcatcaaccactttaggtttttcttcctcacaaggacactatcatctaaagaaacaactacaagtcaagaaggttatcctgtctctctcctctgtggcttttagaatagtatattgaccagtatccgtttcttcgattattctcctccatcgatcgtattcatttactcgacgcaggcaaagaatcaaaagtttgttggttaggtttgtcgaagaactcatttccctctatttgtccaacatttcatctcgcagcaggcttgcgtgctctcctttttgtctttgaagagaaatgagacaggaaaacagcaattgcctatttccgtctaggtcggcggactgcctattattccgctctactattctgttttcttccatcttctctttctttgtgtctgcctgtttttaaaaaatataccaaaaaggcaatagagaaaccccagcgatgtacttaccacccgctgccaaagcgggagaagagaagctgaacgcactgggtgcaacacgggtgccgggaatctaatcaaaaaaagagacctgtgctgagataataccgtcatagcggatcatggataatgcctgcgtcgcgatcaattgttgccttttgaacccactttctcctgccttttttgctctttcttcaccttttctctcggtatactcatttttcgtgttggtgtatatgttggattgggctggtcgtcgcgatgctggttgtgcaaacagcaatgcatacacctgactggaaaaagatgtgagtttcttatgtttcttatgaccaggcagatggtcgattgtgatatctaaggaaagacgaggggttgtttgtttcacaaggcttggttttccttacgtgttccctttcgattctttttttttgttctatgtttctctgtttgcccgcatttcgttctgtctgcctgtccgttgtctatgaccggtttggtttttcagtcccaatgcgtccgaccacctgaagtggtacgagaataagggaaagctcaagctcgacttgtacgttaaccttttgaagcttcaaatgcagccctggacgactgacctcgttttgagaaaacatcctacgttttattttcacagtttcttgagtatcatctttgtgggcatggtcctgaacggatgtcagtagctactccaggactttcttttcattcttttttgtccctgtggtttaactcgtagtgctcgtaccgtgtgtagttgatgggacgatcatctccaggattttagcgctcgatgtttggacagaggatattgggaacccgagcgcttcccagatcggagtcctcaatgctgttccatacatgtctggttttgttgtcggtcctttcatcacttggcttgactcccgatacggacgacgatggggacttcgatgtcagttcttcttctttgtacgctcggctttagactggatttgggttcttggacttattttgatcccgaatcatgcgctatcatcagtctatgggtacactatgatcatcggaactgtcattggttgtgtcgccgggttggacggagtgaatggttacggtcgtacgtcgccttgtgctaactcccacgatatctggccgaagcttattctggttcttgtgactgctgctctcctctcgcttagtcttcgtcacctcaagattcatcattgggtttggtatgtcgttactctatgtctcttgttgacgcatatagtctcattgtcttttcataacttcactacaggactggcctcttttttgatgacttccctcatcgtcgtgcaggagatttcacaccctcgatctcgttcgattgtggctgcctcttgggattcgtactggattttgggttcagtcattgcatctttcttgatctttggaacatcgtacatccaaaactcgtgggcttggcgaatcccttacctggttcagcttccgatggccttttacgtatgtcctcatttcttctcgagatataactgtatcaatcggaatttagctacttctctctacttacgtcgacaactctctcagattgtgattggagttcaatttgttcctgagacgcctagattcttgatggccaaaggtcgagaggacgaagcattcaagttttttgttgattaccacggaaacggaaacccaaacgacgagctggtcttatatgagtttgatcttttgaagaagacgcttcagatggaggcagagaacaaggaggcagattggtcgatgatcatcaagaacaaaggtagtctacatcggttgtcgttggcagctctcatggcttttatgaccggggtaggtctcttctttctgtgtgctgaaagctcttgttggaaatctgacatgtttgtttctcacgttgatctccagctgtctggatgtaagtcgggatgtgttgatttcgatcacgtggttgagagtacgctgactataacgctttccatcgacaaacagcttccatcgtctactactactgttcgttacgttctttagtccagttgataatcccaagaattctgttatttacgttactcgattctggctcttcctcttctacagacaccgaggttcttaatcttgttggcatcacagacaccaccactcaaactggaatcggggccggactgtcgatgttcacttggttttgtcagatcgctgcagtctatcttgataaacgaattgggaagaagacggttctattgtgggtttggccaactctattgcttgggttgattgggatgtgtgtttcctcgtgagtgaatgttctagtcactttctccactcgtttgctgtcctgatatgttttcaattctttccacagcggcgtgtttgcaaacacgggtgcggacagcaagagtgcaggaattgcaaccgtcgctatgttgtggatttatttagggttcttcaactttgccaatcccgtcttgtactcctaccctgccgaggtccagacctactctcttcgaagtaaaggtctcttggtttggaacactttgaaccagtgcatgggtgtgtatgctacttgggtggatgtagtcgctctcgaatctatcggtatgtgcacctacgtcctatgtttgacttcgccgttgtctcatcagttctatctctttttcctcgtgtgtcgtcgaggacggtaggttacaagtactacatcgtctacatgcccttggtcatcattcaatggtgcctggcctatcggtacatggttgaaactcattcatacactcttgaggagatcacgcaggcatttgacggtccggacgctgttgttcctatcatcgataagattcagagccaggagttgcctgcttatgatttcaaggagccttcggttgaagatggtttgggggtcaaggcacacatcaagccacaagtcatttgaggaggggccatgtgtgggccaaagaatcaagaacacccaaaatcgaggtgttttaaaaattagaaatcttatcttccttattttcagtaatctaaaatctctatgactgtttgtctttctatctcttttctcaatcttatttgtagatagactttcttctcaattatttgaatctagccattcttgtgtatgtcatgtcagtgttgcttgtttctgttcgttggggaaacgaaacccactgcgtgattcgattaagcgcaagaggcggacaatctcttgatcggtcggcgctgacgatctacgttctctcatcgatccatcctgaattttctttctcgttcttcaccatctgttcccaaggaatcttcatatgaccatacttgttccataaagacgtatctctcatgacatcctatattctcgcccaacactctaacggtagagatatccatccgagctatacccctaaagagaaggatgcccgttgtccgttctgtcagatcgctaacgcgaatgaggcggatagaaaagcatacactgtttatgaggatgaacagtacgtaggccgattcgatccatcgcatgtgttatgttctgcccctctctatttattccttacactgtgttctctctactgaagcttctttgtctgtgtcgtggttaaattagcacgatcgcttttctaggttagacctcttcctttgttgacgataccgaaagcgcttctctgacgatcctcgatcgatttcactcgacttcttttatcacgatgtccagacttgatgccaattcgacctggtcataccctcttaattccaaagttcgttcgtttgtttgtttcctcttctcgttcgatcggtagttcctctttgggcctgattcagtcttgtttcttggtttttcttgctcgattgaccgatcgttcgaattgttgctgcatataaaggtcacactgtccgaggctggccgatctgtcttcagtagagggtgctgctatgggaagtgtgatgcccaagatcatcacggctataaacaaaggtatgaacacttcgacacgtacctggaagtggagagcatagattgagctccgagttctttgttgggatcgaaattagccacggataatccggatttgaatgtcggttcgttagagaattcttcatcgtcaactcggactaggatttatcaaatctaacatcctgagttcatatccttcaagttttgaatcaagggtttgcgcaagctgtgtcacatgtaattatcttctcttcagatttataccttttgcttaaacagtccgaaggccgtcaccttctgaatggcatcccgttgattgatttgtacgcaggcacatttccatctgattcctgcacctcatccgtcaatgcctcacaagtttcgaacaaactcgctttctgccgatcactctccgatatcccccgtggtcaatcagacggtccctatatcggtgacgacgaaccccatgaataaaagagagagaaataggtcgccagcggattggtcggctcaggaattgatggcccacccacctgaccacaaggagatgctcagaggagagaccgaggcccggatggggtggctcggcaaacgagacggggatgcattgagtgcgaaaattcgaagctttctataagcctgtatgctgtaagaaggagagatgagagatagtatatgtgtgtgtgtgtgtgcaaggtcgtttatagatctcctctgttctaaatgctgcagtctctttcgtgctggttcgatgtaaattcctaatgtaatggactgtataactgtcatagtgtattgcgttgtaagactcgacgggtttcaacccgcgcctatcatctctactcgtcggatgcctcagttcgaccttgatccaccatcactatcaccaccatccatcaactttatttgtacgacaatcgctcacagatggacgcggtgtacaaagaactttccaggctggaagcattaggagcaactacgccaatcactcacaaaagaacaaaatccagatcatcagacgtatctatctcgacccctggctcatcagctacggccgcttctgctggaggatcagccatcaatgtttctttagacacattggtagatcaattaatagcggctcgacgagaagtccttggctcaaacactctggaagtggttgacgagattttgaatcgcatggaagttgcgattgaaggatcaaagtgcaaagttgacgaggtttgttcttgtttcgttatcatcccttgcctctcaatctgtgattcttggaggggtctgatcaccgctgatttcgttaaattcgcctggtggtcgcttggaggacaatcaggcactaaagtcgtatcacaaagcaattggcaaagtcggaacagctctgaccaaggtctgtggaatcacttgatcacttataccggtctatccttgatctgcatggctcacattaagttgtgccgttgattcgtttataggccatgccggagaaccagtcgttccctgatcttggaaagttctcagagaccaactcacatagactgctcggtcaaacagtgatgaacgcattgacgagaagggcggaagagaatacagttttgttgatggaagaagtattcccctattcctctgtctgtccatcggactgatgaagacactgaccagttttatattcgtatgatcaggaacatggatttaagtcctcctctgttgagctcgagaatgctcaacaacttcaccgaacactcagcgcaatcagtgagggagacttgacgcttgctatacagtacgtgcagtacttctatatgacgactgagaacttttcgagtaatataatgcagtcacggctcactaacattggatctaatttcttctttgatccagatgggctacaaataatgctggattcctgagcgctcgatcgtctccgctcttgttttaccttcatcggtcgatctaccttcggaaacttcttccctctctactctcccttcctgctccggcttctccaccgggagtgctcatcgattacgctcgacaatatttcactcctctcttctcattgtatccgaccgaaatcaagcggcttctcggagcgctcttgtttgcgtccaactcggttcagattttccgagattcaccttacgcagatttggccgacccagggttacacgctccgctgctggtcccattgtttgagaaagagttttgtgatcgagtgggttggcccaggaaggaagttcttggcatagtcattgggctaggagcgagtagctctgtaggtaggattgaaaaagcgagaaagatgatgaaggcaaaagtcgggtcagattgggaaattgaggcagagttaccggtatgttgtgtctccctctgctcagacatttcttcccatgcctcaagaggattggtgttaattcttctttacgttcagatcgagatccccttgcctccttcgctcaggtttcactcaatatttacatgccctgtctctagagaacaagcgactccaacaaatcctccgatgatgcttgtttgtggccacactatcgctagagagtcgtttgctaagttgggcaagggaacgtatgtagattacactcattcagttttgagggagttgctcaacttaagcatcgagctgaacttcggcttggcccttttctccaattaggatgcaacatctgatcagtcgaacggcaaaatgtgtgttaaattgatcctttgtcgctatatcatcttgtcatcgacgctcgtatagtcgggaatctttctgatgctgactacgcagcttgctttgcgtctttcccgaattctcaggcccatactgtcctatggttcgtagcggggttttctatcttttcgtagtgttctgttctggcggttcttcgagaaccacgaatttaagcctaatcgagaacggttctcctttccatttctaaaacgcaacaaaaaggaaacctctgtaaactcggctttggaacttcatttttaagcatcaccctctgatctgtctcatggacagttttttaagacttcgaccatctccttctcttgtctccctccatattggcttttttctcttcttctccctctgcttcacgactctgtacaactcagaattgtacttcacgcctgtatccagtcttctagttgcgtactgccacattatacatatgtttttttttcttaaactactatcgtctcatacagaatacacctcatcgggaaccaatagccaagcgttgagaagtcgaactgagtcaacagaagtgaattcaagaggttccgagtgattgatggtgaccttcacgaagatgcataagaaacattctcaattatccaacgcgtcaactgtcacatctaaacgaccatcaccctgatcgattgatcactaccatctgtttatttcccatcaacatatcttccggtcacagctggcgcagcgattctttgtcatctcgtcagattgatagccgttcgtggttgggcgttaggtctctcttgaaaaaagctcctcagaactaggccgtttctccttctgttacgcgtccaataaatcagggatcatgccatcttcccaacgtaccagccttatagcaggtccctcgacaaaaaaagaacctatccatgatgtacatcaggtctttaattccttcagaccggttgagtttggtcagatagattttgataagaattcctgtcagaagcagtatgtggaaggatctcttgcctcgcattccttgccaaagatgccggagaaatcaaagtctggggagagtgaacttcaggggtcgatgtaggtatttccgtttggctcgtttcctgtttaccggatctaatgcatatatgtaccggtttcatgttgatcgctttgtgttgatgggatgtgttctcgctgaaaacatttactcgatagtgtcatccgggaagacaacggccgagacccaccaacaaacatcaagatcattctcgcgggttcatgggctatcgaggcttctaagattgaactcaaactacaaaacacttaccacattgctctccaaggagccaagtttgaaaaggtcgtcaagaatgagaagtcaggcgttcgactgaggtttgaggacggaatattgatgagagatgctcgaacgatgaggatttggaatggatttagaggttcgttcaaggttcagtcttgatgatcacagactctgataataactagaatctaattcggtttgtctttcgtcttttctcctgttatagcggctaggaagtatcgaagacaagctccagcaaattcagactcatggtttgctagatcgacacctgacacgacgaccacgacgacgacggggaattcctcacctgctatagcctctgctactgctgctgatagcaattccaattctgtgcctaaaggtggaaacgtatcgacacgccctctgaaaatatcccgtactctttcctctaccccttccaacagttcagttgtagaaatcgagtccgacagtgtgcatgggtcacctcaagtgccagcatcgtctgtatcaagagcaagtcccacttctatggcggctaatatatcaatgccagtcctttcggatagacatatccggctctctagcacgcctcgaccagacagctcgcctgcaaaggatgcgattacggctaataaaaacattgttccagtacatggaagccagggagagggtatcaggccaaaatcagcagttcccggttggttgatcaaccccaagacggagtctccctcaccatcgaagaagcaggtaagttttttacagcttcgatttaatacccaacagcactcagtcatatggcatatactttgctgatttaaatactgcctcaattgatgatctgacctttcgatctgcttcacagaagcttacgaggaagcatcgatctgaatcgattctctctaacgactcccgctcgtcccgttcatcctccattttttccaccactccgtcctctaagagcggcaagatcaagcttaatgttgctaagcggattttcaagatatacccgtcgttggaaaccccagaatctgaagacctcgtgaacgagatggctgacgtgttcttacagaaacatgacgcaacgcaacgacagattctctacttcaacccaattcttcttaagaaggaaattgatcagataaaacagatgctggaaaacgcacaagaggagaatcttaataaagctcaagagtatctgcatgcactggtcttgagcgcagatccggaagttggagaacatatggggagaaagatcgcggggttaatcgttagatcgttcgcgactccagcagatcgaagggtcttcttcctggaccagcagattttaaaggtcaagataaacgaggcgaaggaacttctccaggagctggaggaagaggaggaagaggaggacgaggaagaagaagacaagatggaagaagacgatgatatgaagccagtagtggacgttctaatgcaggatggagatcaagaagatcagcttaaagaggatcagcctcaagaggatacgaaaccggacgtagctttgctggaacaagtacgcgcagaagataatcttccaaaagaaactcctacatctaccatcttgcctatagtcattccttcccccgtgcccactcctccattggcactcgctccttctccaacacctttcccgatatccgcatcagatccgtctgtggtcgcagggcctaatttggtcagtcgattaccctccccgcccccaaatcaagcccctgcacctagcaaagatactgtgtctgtcgatctagcacttctggatgctcgcaagactaaggagattcctcataagtctgtctcgtttccttctcctctcaacaaacccacctctgcattgcagaagacacactcggcgccagacttggctaagcctatcgcttcagtggagagactcgaaggcggagccacaatcaacactggttcaagatccaaacacaagaagaggacacctgaagagttggaatcttatttgaaagaaaagagagaaaaggcagaacgagaaggaaccgcttgggtggatcatggtcgttatttggagataaaacgacttaggtctggtttgactgtcgaaatgattgcggagggagcatatccaatcgggtttacagatgacgtacgtctagtttctccaatagatactctaatcatcctggttgaacaagatatcctctcaatcttgtctggttctgtacagagattcgagtattctcccatagccaatctgagagacctcgaggtcaaccgaaggggtaatttagtgggcgttgtcacaagtacaaccactaaaaagatggcaagcggtgagtttctgcaaattgcattcgctgtaactacgagctcttgcgtttgatttttgtatctgattctgtacgaaattgttcaatctccatctgtcaaatatatcaacgtacaggcgacttccacacatcgttgaatatgagagaccctagtggatctatttccatagttctgttcacaaacagagagatcaaccgtccggaccctatccctggttctatcctgcttctacgctcggtgaaggtaagacatctgcgtatcgcttctgaatcaccttgataagtaacctgactcgatatgcatgtttactccacatctcattcctgcagaaaagtagctggccgtcaccccagatggtcggtaccgccagagatgattggacatggatctacaccgatcaacaagtatccacgatgaagactcatagcaattttcacaacctaaccattcaagccttaccgatcatcacccatgactattttctgaagctttcaatatggtccaagcatacacttggctatggaagtgcggctgctgttaaagaaaaaaatcagaaaaggcctcgatctctaatcaatgtatcaaaaattgaggttaacgtcttttttgatcttgtcgctcaggtgagtaacgcaccccatctcatcccatccccttcttttccatttcccctttcctatttgtaagtaagacttgagaaagaacaaactaaccaatcagtgggatatcatgttgcaatgtagatcgttcaagttgcgagggcgaacgatgcgctggatctatgggtaaccgatttcacatcccatcctgatattcccgaatgcgaagaacacatgcctaggccagaagatggtctggcgccaaccacagctttcggaagatatgttcttaaagtgagcgcctgggatgacctagccaatgaggaaaatacaagtcttcgaccaggaaagatcgttcgaatgagaaatcttcgaccttggtacagatcaggagctctggaagcgtcaatgtatggaagggctgatagtgggtgtcggattgaccggatacgggaaggcgatttggaagcccaggaacttgtcaggttcgtttttttgtttgtatcttatgaagataaattcctaatatccaaaagccccattgctgattactatttcgatctcgtttgtgaccatacgaacaaacagtcgaagaaaggcattcttcgagattctttccggacaacagagtcaaaacctgaagcctgtgatagaagatgtacctcccgtttcaacaaccgagcctttaatcacagagcatcagtcttctacttcagacttcaatacttcagaacccaatgctttggagcgttctactgcaaagttggctgtcacgccagacgaagtatcacctggtaaattacgactgcttcgacatcatctttgaaaatgtgcgaagagactgatggtgtgactgcttgttctaaagtgaaacggctatattccgacgagtctcacccgggaggcgtttcaattgaacaaatcatctcagagctgccttgtcctggtaaatatgcaatccgagctcgagtggtagattacttgtcagtcttagcttgaattacctcgtcgtcaatcagatgttgactagctgaatcaatggtgtgtcttgaatacatacaaaatcaaaataaacagccccaagagactagaggactgtattattggaatttgtggtatttgtcaagatcagtaagtcacgatttccctacctgtacagatatccttcaagattactgatttgtggtatgcctgctgaatcaatcgctagtgtttccccctgtagaattcttactacagacaaaggatgtcgagagtgtaacgagacgagagtccgatggatgtatagagtcgttcttcagttagaagatggaacaggatctctgaaggctggtttactcgagggcgatatcgtacgtctttgtctatctctctctttcttctttgttaactaaacgacctaaaagtcgactatgaccaaccctgctttcctgtgtattgggagaaattattagcacgagatgttcccagggcttccattagcagagacgtacctcaacccggcaaacgaagtaatcgatctccttcgctcaaagctcagtctcttgatcccctctatgagatcccccactcccatctctcctactgggcagcagattcctggacctccgttagaagcatgtgtaaagagttattgggtaaaccaccaaaagggagagaatgctgctgaggatagtgtcaaggagaggagctatagaatatttgcgactacgctgaaagattgagctgtacaaccgatcgaactatatatgtttatatttctctctttcttctgtcaaatctaaggcacaaagagcggcagaacattcatggaagataaactatggaaagaatatacatgatgatgtatactgattttcggttcttgcaacgccccggtgattgtctacaacgagaaaagacacgcggaattacgtgatagtgattgtgagcagttggatacgggtaagatgtaaagggtgaagaagatgagaaggggaagatcaagatatttataagatcaagggaaagctccaggcatgggattcgtcgtcaacgcaaccttgccacccggtccaactccactgagtccaaccctgcccacaaaaaatgtttctttgacgtaactctgcagaccctttgcggtgatttcaccgaaaccagccatcattccaccaatgaaaggaagcaaaacgttgattcccaaacaggcgaaggcaaggagggctcgtcgacggagaggaaggtactttgacgagaacaaggcgagggtgagcgaaggaggcgtcaaggcggaggaggtgctggaagcgaggtagtgctcgataggaagatcagcagagttgataatggcatcgtcgactgttggcttggaagcagaaggggcagaagatggggaagaggcggaggaggttgtggctggtaggctcgtcaaggcagattcattgttgggattaggatcagaggccactgctgagtcaaccgtctgagaaattaagtctgttcagtgaccaatccgtacaatccgaaaagaaggtaagaaactacgaaagacgccttaccatgactgcttgaccgtcgacaagcttaacgtcgcctactgttctctgatcttgactcggcttagcgttatccaaagcatccaaccctcgccatgcctttccgtctctttggagagcgtcctgatcttgtccgtctacctttgcctcgatcttcgccgctcctaggacaccgtctcttccgtcgaggttcagctctttggcaagtccgctgccattcaagttgctcttttcctcggcctccttcgcagcctttaccggctcttgtttgacttttgtttctttctcggctgccttctttcttttagcctcttcctcgtaaaacttctcccagtacgctcggctcgcctcagctttctctcgggcgatcttgctttcctccttccacttccggttcaaggcatcaaactcggtttttgatttttcgagcttgattttttcgtcaggagatccgtccggaccaatatcggcagagttgccgggaggtccagagctatcggggagcgaggcgataggagcgggtaggggctcggccgtgctggtggaaggagcagatgatgacgatggcttaggcgcaggagggggaggaatgttgaacgaagtcaacaccgcggtctacgcaggaatgacaacacggataaatctggtgggtaagcgtttgacacaagagtaacgaacgagagatggactaatttgacgtaccccaagcacatcgtcagccgggatcgagataacctcctcctcgggttgaacaatatcctcttcacgacctaaaggcttctcctccgagttcgtgtttgctacctcggcctctagtgcggcgttgtcctctgaaacaggctcagcatccacttggcttacaactggctcctgttcggcagcttccgctttttgttcggtctgctcatttatgggcttttcctccacaggagaaattggttgttcctcttctacatgaacgacgttgtgttctgggtcaggagcatgagcggccgctgcagcataagagatttgttcttcagacattgctcttgatctattgtgagtatgtgctaatggcgatggatacgaggtgaagggcgactaagcgagatagagagaaaaaaaaggaagccaattagaacgatgatatgacgcgatttggtctgttagggttatgattagtcatcagtttcacatgcccaacgtctggactagccaagttcgttggtggactgatcgggtagttttgttagtgaactgatcaattggcgttcttacaccaggtcaaccaagaattatcaggatggccagttccaagcgcatgggtgaaagaacgagctggcatgtatagtatttacaacaaagagaggagagaaggactcaacagagggactgattatgtaatctctacatcgacgcgctaccaaccctaatgcgttcggtcagctcacgcgtttgaaacattgcagctcacgcgtccgagacgcaactgatgacgcgactgatgacgcgtgcgacggtcagacacgcgtcacggtgattgatagaatgatcagccaacgagcccgccgcgcgtgtgctgtatctgccaccttcgtctttggccctgcgcgcgtcccccaaaaaacctcatcaacacgcatacagcattcacgcccgaacgatatccatcaccctcctcatccactactttcaatacagttatatcacgatatccattgattttctcttctctttcctctcttcatcctgacactgagaatgtcgattcctaccgaacgtccgttccggaagtttcagagtgaggcttggaacatgggttctaccgtccatgtgaactcggcgaacctgattgatccagaacttcagagtgctttgtaagtaattttattctttcgcactcctcttttatgggttcttcctgtctctttctcggccttcttttgtgtgccttgtacaatctaccactcctctggcactgtgctatagacggtcccatttgcgtccatcgttctactctctaaaccatgattggtcgaaaaactcttgagaaggtatcgtccgaataagaaatgtatctgcctgatgcggtcatccatgcgctcataaactgaacccgagcaggccaatcagtcttttgttcctttgttctccttctcttcgcaaatctcctatatcatcctttcgctttcgttccttttcaagaacagtctaattgtgtcttgcttggtgacttcatcgacacaagaaaaattgagataagatgatataaatctaactctcttgcattattctttatccgttattcctaaacctgacagggcctccgttggagagcgagtccggaacagttcgtaaccgttgtttgctttcttcctatctacattatctcattctttccgactactctcgaccctgaaacctcacgcgcacacggagaaacacttccagtgtcctcttctgagttcttcgctcccatacacctatgctctatccgatcatatctcactgggttctaaccctccttcttgaaagcatcgacaaaataaatttctgatgccttcctatgtttcaaccgtttttgatcacaactcgcctgcaggtattgtaaagtcgaacccgacggtggctacagacccggtacggaagaatgtacctactcggacgttcagccgagcggcatctacgatgaactaccctattgtatccgatccgttcgcagcttcgtcccggtcgacctctgggtttgccagatcgttctcccagtacattccagcacggtcgtttgctccaccggctgaggaggaggacgacagctttgctaacggtataattgagggtgacaaggaagcaccggcgttcggagaaggtgaactgggctggggtgatggtgacgcggcggagaccaatggtgaactctttggtggagagcgattgggagcgatcagtggtgatcgaatccatgaggacgatgatgagtcaatctgttctcctgccccttctctctctcctcctggatcgccctcgcggactctagagccacagatttcctcttcttcccctctacctcctgccaactctgcttctttgagcaaaactcgatcgttcaaaacagttccttcttttgtcgagtcccgacacaacatgctgtccaacctccgagctcaaacgttttcctcacccgaggttgacccagaagaagcagagacgttcagacgacacgcttctgccggatggagagaggatctcatcccggctgagaaagggagattggagtccaagccagaggaaccatggaaggatctgaacttacactctttcgccaacgtcgaagatttttagttatcgcctccctctcttatttttccttctcttcacttttctctaccttatctattgagcggactgaatgggagcctaggagtggaattcagtgcttgaggatgacaaagaccggatcggattggactaaagttttgatatgtgatgcagccgttttcttatctcctcttgtcttgaattccctatgatattacatctgaatgtacactatatataaaaccaaaaaaagaaaatctattcgaagcgaaacaaaataatcaagaatgaagacaaacgagcaggagcaagagcagaaacgaaagcagaagcaagagtaaaagcagacagaagcagaagctaaagcaagatacgagaacacaacctattcatctttttcccttgaccattgtctacctttgatttttctaatcagatccgtttcctgaccaacgaacgacttctttctcgctccacaatagctcggtaaactagtaggacacgatgtcatcccagagataagttacccgttagagtttgtgtacgaacaggtcccgctggcgtcgtaggtgtcacctgggaagttacaggttttgtactttgtggttgccgtccagctgagcaatttcacaggcgttccgctatacgttgctgacgctggacaatctccagaggaggctgatagatccagaggaaggaaaatggaggagaaaagattagtaaggtcgaaatctccctcccctttcctttgataccgatggtggggaaaaagaaagacatactcagggtggaaggacaggctaaattagatgaactactagagttaagaactgatgttgatctcgtgtagagacaagctgcagggacggttcgtctagtcgaaaacaataataatacaaaacagaacttagatgtcaggacgatcaagaagagatgaagaatggatggatgttgaaaaatgagacatacttgtaattgtaagtacatgttgtaccggtagtcccgtaaggcgcaccggtgattccatccgggggataactcgtcctttgatcagaatcgtccgggatggaacttagtgtcgggcattggtctagggtttggcgcgcgaggcaaggttgaagggagctgatcagaatcagtatgctccagaaagggagaggagaagaaagagagtgaaactcacaagagcaaaccgaacctgagggaagagcaaatcgttttccattttcgttggtcgtaccagtaggcgccgcttggacggcgcagattgcgcctccgggaagcaggactatacagcaaatggatagagtgagcatggtggatggatgagtgcttaaaggtgtgttgagatgaaccaggaatgaggatacagattatccaaatggatgaatgcaagatggagaggagacaagttttccaggaaagatggaaaggcaggtagatttaagcaagtttgacctgaagagacagatgagaaagaagagaaagaaaaagagcgatttcaggggtacaagggaacgtcagtgcccttcataatatatattccccccttcatttcattgaacttgaaatcccgattagcaatatagtaaccagatcctatccgtcaaaaacttcttgaagcagcagtatatgtgcgattagcagagcaaccaatgcgtgtcaatggcggaagagctcatcagcgtaaaagatgttctgggatagaagggtaggtggttcggttcgtccgacccgcccgcctgattgaaaattccgatttcggggaggcacaccgctaaaattgaaagctgccgatcattttcataacaaataccgaaattggccgtggaatcctccgacgcgcagctcacatgccccctgatccctgccatcaacatccatccatctgtgatcgcaaatgcactgattgccttgatgcctaattctatcgatgaaccattggcggtttgtccttgaagaatattactgaaataaaagggtgaaaatggacttttcgttctggcacttgttcccaatcaagtcctcact

SEQ ID NO: 1613 - DNA, 17883 bp, Xanthophyllomyces dendrorhous
agactgctgaaactccaacaaagaacatcatctgcttttctcttagtcctttccaacgtcgtcaagttctcaagttcgagagtgtatgggcgccgtcccattgatgttacaaaggctgggcgttcttcattgatgagcgtatgttagggttaacacgttgacgcgtcggatttgagcgcgtccggtcttttgttttccttctcatttgacaaggtcgatatttcttctatactctacgatcatactggcaacggcaacagcagcaataacaacgaacgacgagccatttacgttggtatcgaaagatctcaacaaagaggaaactatcttaagaagaacacatgcgaatcgaggaactcatcctcgaagggttcaaatcctacccagtccgaacaacgatcaatggatgggatccatcatttaatgtgagttctcaatttcaattgatgctgcagcttgcttcagcatacacttagtcttcgagcggcggttcgtttgattcttgtaggctatcactggactgaatggatcaggtcagtgctttttcatcatgatctctccgctcaggcgagtatttttccttaaacattcgcctgacatagtttcacggatatataatcatcacaggcaagagtaatattctcgatgcgatatgtttcgtactagggattcagaacatgacgtccgtccgagcgtcaaatctgcttgacctagtctataaacgaggtcaagcaggaatcacgaaggcttcggtgaccatcgttttcgataactcggatagagcgacctcgcctgttgggttcgagaacttgaggcagatcactgttactagacaggttggtcattttgaacgcctatctttctctacccttcaccttatggaccttgttcttctttgaatctccttcatcaagtctcacttcctctcactttatttatcgcatatgctacagattgctgttggaggagcgacaaagtacctgttgaatggccacaagtcgactctacaatctttacaaaatttattccaatccgtccaactcaacatcaacaatccaaactttttgattatgcagggcaaaatcacaaaggtactcaatatgaaacctcaagagattttgggcatggtcgaagaggcagcaggcacaaggatgttcgaagaaagaaaagaaaaggcgctcaagacgatggcaaagaaggacaagaaggttgcagagatcaagtcggttcgtggattgcttctcgttcctattttttttaaaggtcaatttcgatcatagtgctgatgtttccgtctccttctgaacatgtttagctcttggaagaggagatcatgcccaagctggacggacttcggaaagaaaagcggtcgtacctcgagtatcagaagacaatgtctgaactagagcgacttcaacggcttgtgaaagctgttgaatggcagacggctagctcaaatgaggcaaaaattgacgtcgagctaaagaagactcaagtggttctgtgagtatctttcctcactcttccctgttcttatcttatttgcgctgttcgttgtagtgttctgaagctttgacaactgtccgaattataacataatgaaaccttatcagggatgagcggaagcagcttatcacctggattcaggataagcaggccaggatggagagggaagtagaagtcatcctcaagaagagagaaaaggttcgcgattcaatcttcattcatatatttcacagagtaatctagcctgatcttctccaaaacaaaatattaacaggaactcgccaaaggaggaaaactcgcaacgttgatcgaggctgccaaggcgctcggactagaagtcgaaaagctcagaacgcagatagagatcagtgagagtaatatcgttgaagaggagactcagctaagaaacgttcaacagaccatcaaagaggtattccctttcaaatctttgtctgcttagttttctcccttgtatcgttagattctgatgcgccagtcaaaatttatatgtccatcacttgtctccccttagattgaatccactcgaactgccaaactggacgcagccaccatatcctcctcgacctacgcctctctcaaatctgatcttcttacgcttgacgccaaggtcgaatccgacgaatcgcttctgcaatcccttcttaccggtctaacagcgtccaacaagaacactgacgaagcgacatcctctggtggatacatgggccaagttgctgaagccaaagctagactcgcgaccgccggtacagaggtcgaacaggcaaaagtcaggatcgagcatgcggagagagaggttaaggagaaagagccgagagcgaagaaagcgaaggtagaaggcgaaggtttggtcagagagttagacagagcgagagaagacatgaaaaagaagaagactatcttggaaggtctagagggcgatgaggaggcggagagagaactgatggagaagaagatggttgttggagacaaaatgaacgttttgctcgaggttcgtcgttttctttagccgagtttcatttatgtttgttgactgatctgctcccatgtgtcttccgctaaccttctcattcaaaacgaacagacacgagatcacctcaaatctcgattggcctccacgaatttcagctattcagatccttaccccaactttgaccgatcatctgttcaaggacttgtcgccaacttgatcgatcttcccacttcaagtttttcaagctctacagcactcgagatctgcgcaggaggaaagttgtacaatgtgatcgttgaagacgaaaaagtagcgagcgctctgttggcaaacaagaaaagtttacagaagagggtcacacttttgccgctaaacaaaatccagggtcagaatattccggccgatgtaagttcctcgttgcttcaaaattcctagccctctatatcacaggacagcggttctcaatatgttcccttcttttttccaaacccatggtcattactatagaaactccgcgcggctcagaatcttgctcccaacagaatcaagtctgctctcactctagttggatacccttccgaagtttccgccgcgatgtccttcgtctttggtggatccgtgatctgctctgataaagaagccgccaatttggcagccttccaggccaaactcaaagctattaccctcgaaggagatgtatacgatccatctggcacgttatctggtggagctgccccgaaaggagcaggtgtcctagttcaggtgatggaagtcaaggcagtagaagatgacttgaaaggattgaagagagaaatgctagtgattgagacagcattggggaaggtgaaggttggaatggaggcattcaggaaagcgaagagggagctagagatcaaggaacacgaagtcaagttgttggaggagcaggtcaatggaagtaatgcggctagggtatatccaacctctccttctactctcaacttggtactgccatgctcaacatattcttccttcctgttgacttgtcatttagatcgtcgctgaagtggcagagctcttggagcacatcattcaactaaaagagggcatcattgcttccaaggacaaggagaagcaagcgaaagcagatattaaaagactggagaaagagatgaacgatttcaagaataacaaagattctaagttagccgaactcagagtaagttccatctttgcatttcctctttttcttgtcaaaaggtacagtattcacaatcaccctccacttgggacttctttctcctatctatcacgttttgtcagacgtcgatcgtaaatcagaagaaagcaatcaccaaaagttctgcatcgatcaagcttgctcagaaaaagatgcaaaccgctcaactcgaactcggttcgtcttctatgtcttatgtcgacctatatcttacagtgtgcgcagtgatctcaactttgctgattttgattgtctgtgacagagcaagttgatcaggatattgagtccgccgagagtgaagtggaagaagtgaaagctaatctggaggagagccgtaaacaacttgcgaagttgaaaaaagacctcggaaaacttgaggtaagcatattccagcttgcttatcgcattgatagaaagttgttcaggccgaaaccaacgttttcttgttctttgcgcgaccatctaggaaaacttcaacgtggctgatacaaagttgaagtcagagcgagcggcgctcgcttcgtttgatgacgaattgtcctctcttgagcatgatatcaaggcaaagaagcaagagacggatgaggccaacttagacatcaagaagtacgagcatgagcttcagactcaaatggctgaacggacaaagtcgaagaacagagtagccgatcttgaaagacagtatccgtggattcttgaagagagtcggttagtactttcgctcaaaacgattgctatatttgtgaaaagccaagtgcattcatcgacaatgtaggactcattctccctcccgcttccatcataatgaaaaagattttttgggcagcctggaacggtatacaactttgacgggtttgacctggctaaatcaagaagtcgttgtgcagagcttgaggctcttcagaagggtatgcgcaaaaagataaaccgaaaagtgatggacatgattgacaggtccgttcgatttcatttctcctcacgcgttgtccaaattttgaccaaatgttagaaattctcgcttgtatattttgtctgtgcggacatagtgtcgagaagaaggaggccgagttgaaaagaatgatgagcacggtagtcaaagatcattctaagattgagggcacaatagccgaactcgaccgttacaagcgagctgctctggaaactacttggaagaaggtcaacgggtgagtagtttagtcatcatccttcggttcatagcgccatagaaaattcgaatgctttactatttcgactactgatcctttctttttctttcatgttactttcgatcagtgatttcggttcgatctttgccgaattgctaccaggaaattttgctaaacttcaggcaccagaaggtatggatatcaccgaggggctcgaggtcaagatccgattaggcaacgtttggaaggccagtttgaccgaattaagtggtggccaacggtgtgtctctctctatgttttgctgtaaatgtctttgagaattcaaacttatatcgccttctcttgcgtatgatctcagatcactgatcgccttgtcgttgataatgtcactcctgcaatttaaaccggcaccgatgtatattctggatgagattgatgccgcgctggatctatcccatacgcaacatatcggttcgcttttcagaaatcgatttaaaggatctcagtttatcgtcgtcagtttgaaggaagggctattcacaaatgctaacgttttattcaaagctaaggtaagtcgacaaatattattttgagctttttatgtttcatcgtcaagagattcagggctcatttaaaaaacgaactatatcgtttgacaaactgtttagttcgtggatggaacatctactgtagaagtgagtggctcctttgccgagtagtttggttccgtgtttttgttttgcagatctccccgactcatcaagaagaacatgatatgcttatcaactacttttcgctcttagcgcacaatctcgagatcgaccaaccaaaatcacattagacaacctgtcggcggaactaacaaccggaaaatcaccagaaccaacacgatggcgaacagcatggtagatgatgccgactctaccggtcttgaccaatctcgagaggacgataactctcaagggtcaccgagcataggcgttcgcagttcaagaagcttaattggacgttgatctggaacataaatttctttctctctttttattttcttcttatttttccaacccccttctcaatttggtaactttcttccatgggcatcctcattctgtcaaagacacgtcttatccctcgatttccatctcattgaccatataccaagatattcatttactctgtcattagtatattctcttgttcgatttcatagcttcgttatatcaaattcttatgatcctgacactgtgttttaacgccattcttgtttttgaatttcttgtgctgactggagtggagggaagtatttacattgaaacttaggaacacaacaattgagatgagaatcatattcattcaatctgaaggtcttccatcgaaggagtagtaatcaagtggttacgatgcttccctgctatatcagcaagtccaggaagtgccctctgggcgcgcaggttcgaatcctgtctacttcgttttctttttgtctgattcatttttgtttggaattatatgctcaacatctcgactgtgtttgaccccttttgataaccacgagcaacatatgtagctcatctatacagaagaacgctatctataccacttgtagatcaagaagcaattcaaaaaaaaagcgaaggattccacgatagaggtgaaacctcttgatagttccagacttcacataacacattgagttgagtagcaccatgttcttgacggatgggatgaacgactccgagatggacgccctcgagggtcgtcccgaaaggaaacacgatgagatcgaatgagatgcatctgaagcgctgaagagatggctgctgacgtaagcatcagaattcgttggttataaactattctgatcctgcagatcaacttctgtcgcgtacgcccatcgatatctgtccaaccatggccttttggaaaccagggacaacagcaccaggttagtgacttatagattagtagctgagctgaagaactatttgggataaattctgacttgagtgaaaaacaggtagcgtgatcgatcgtgagaccgaagcggagggaggatccgccttggtatcatcttccttgagcaagtatgccaacctaggactacaaggacaacgccagcgactgcctatctataaacatcgtgtgttttgttattccttttctccttggggtgatgaagaatttaacgggtacagaacaagagactaaatggacgcgcttggacaaacccatctatccggaatgtaggggacagattgctgtacttgatagaaaagtacccgatcgtcatcgtcgtgggtcagaccggctgtggaaagacgacacgtaagttgagttcttaaatcaatataactttgtcaaggtggtgcttacacgagacttagactcacttcacatatgatctgtattgttcaatcccaaaccttcagagcttccacaatacctatatgaggccggctgggcagccgaaggtcgcgtcattggatgtactcaacctcgaagagtggccgctacgagtgtagcaactcgtgtggcggaagaggttggatccgttttaggcgatgaggtttgtctttattctgaccatttgtctgaataatgctgggcaaatattgatgggtacttgatcatttaggtcggctattcgatccggtttgaagatctatcgcatcctgagcgaactaggatcaagtatctgacggacggaatgctatttagagagataatgatggatccactgctgtcaaaatatagtgttatcatggtggaattcccatttctctggtctcggatgttattttgcttgttaactaatcagaacaaatgtggtcctcctttgtcgtttcaaaacagatcgacgaagcccacgagaggggcgtgtacactgatttgttgctaggtgtcctcaaaaagtaaagttatgaaagaatattctcgtgtatcctgtctatcctgagacttatatgtgcctttctttctacctggaaatcctttcgtagaatccgtcggaagaggaaggaactcagaataatcatctcctctgcaactattgacgcgtaagtatttcttctcaaccccatatgtacttgctgttaaatatcgcttttgactgagtggatgtgtgatttatcattggctcaaaccgccccgctaccaatggtttatagagaagactttagagagtacttcaacacaaatgtggatggagctggaagagagaatgaaaacgagagtgtcagtacgtaattcagtctttcatctctccgcctttcaagcatctcgaaccctctactagcagtagcaggacacggaccgtctgacaataaatcttatccgggcttgttcacgcttggcttggtagtcatcagtttggagggccgaatgtatccggtcgaggtcgcctatttggacaagcctacttcaaactatgtcgagaccgccgtccaaacgatactagatatccatgctagtgtatgcagtttcagctactctgatacccatctccaataagattaacacactcaaattctgtttcctttgatttgcttcgtctcgtttttttgagctaccaggagccccaaggagatatccttgtatttttgacgggtagagaagagattgatacttgtttacaggagctggccgaccggatcccttcaatgccgaaatctcttcctggtctatatccgcttccacttcattctggattgacagcggatgagcagcagcaggcatttgaaccaccacctagaggtagcagaaaagttgtgatatcgacaaatatcgcagaagcgagtgtaacaatcgagggaatcaaatatgtggttgattctggatttgtcaaggtgagctgatgcgtccgaccgtgatctcctctggttcttttttgtattaccagattctcattctagaactatttcgtacccgtgcaccaaactagcttcggacgttcaatccgcgaacgggaatggacgtcctatctgtcgtgccatgttcgcttgcctctctgaatcaacgatctggtcgagcaggacgaacgtctcctggaaaatcctaccgactatttcccgtctccactcttacctccctctccaccagcacgtcacctgagatcactcgttcagatatctcactcttcatcctccagttaaaggcgctcggaatcgagaacgtcgtcagaggatttgactactttaccgccccatcgagcgagatgatgaggcgtgctttggagtttttggttgggttaaaagcgttggacgatcgaggaagattaactttgaattcaggtatgaagatggcggagatgccagtggacccgatgatggcagcgatggtgagtacaagagacgtatcttcgaaagtctctgttatatgctctttgttagctgacgagagatcgggtgctttgtgtgtcagcttttgaattctgcagagttcagatgcgaagaagaagcgttgacgatagcggctatgacttctgtccaggtatataactttcctttcgtgctcatatatcatttcatcctatgataggccagttgctaaaacagtcccttcttctatattcctcccgatcagaacgtctttatcactggggaagggcaggcaggagccttagccgacattgaaaaacggaagttcaccgctgaggaaggggtaaagttgattcttttcatgtttagcgagtttgaagacgatcgttgctattatataactgactcttgtatttgtatctgtgtttgtatatgaatgataggaccacttgactttgctaaacggtttgttcttccttcgtgttggttcatctttttcaacatgactcgattactgaaatatctcatcttcttatcttagtctacaacggtttcactaaatacggttcatcctcttccaaatggtgttcttctcatcgactaaatttcaaagcgctctctagagcagtctccatccgaactcaactgaagaagtacttgagcagattcggtacacaaggaaaaaagatcgagagctgtgaaggagaccacaaacgacttcgacgctgtctaggtacgttttccttctcttctgagttttgtcagaactcatagtaaacccttatcgagaaacagagatttgacttactttgagagacaatgttctttgggattcacttagtgactggttactttaagaatgcagcaagatgggtcgagagtgaagggacatatagaagtgttcgcgaaggcgctgtgagttttccttgttttcttacctctttgaaacgaaatcacaaagacacatgttgcgcccaaacactaatgggtatctgtcaaatcgggaatgaaataaaaaaattaggtcctccatccacacccatcttcggtactattcacaagatcccctacatcaggttgggttgtctaccatgaagttgtacagaccacaaagaatttcatgagggatatcacggtgatcgagaaggactggttaacagagttagcgtacgttctatttcttttgtgattggtccctcattttatgtctttgtgtgtgtttattgacgttgatgctgtgcttgatgtctggttctgtgtgagatagtcctcatttctacgagatcaaagagcgaccgagaatatagagatacaaaagaaatagatatgtgcattcagatatcagaaaaggggtgggtgctaaatgttcggaaaatcgtgctccgcgaatcagattcggaaaggacaaaatgaaaaggagaagcatacagtagacaccaggtgttgactgatccagatggaacaagataagaaagagaacaagatatgaaagattaccgagcattcctaaatggattattgcttcccatagccggcttgcctgtcgtacttgtatccggtccatcccatcctatgccaaatccagagatcagagcagaagcagacgagacgtccgttcgaccgaacgtgatcgatagatcttcccgcccaccttcattcttctcgttaatcatccactcggttctttttggatttgactcggtcgagatataatgacctgagcgggtaggagaccgagcaagatgtttgaaagaacggagagagttcaatactggtttgacatttttgaccgagcgatcatcgtcagggctccaaccacattcgctgtcatccccttcgatgaactttgatgtactcgtcgctgctgacactgtctttgattttgtcggcgacgggccgaatggttttcgagggatgattttaagtccaggcgttgggcggtgagaagcggaaggtattgtttgattagataacgcgcctttggtcggagcatggggagggggaagatgatccctaaaaagcgcaggtataggcggtgcgatatttgacctattattgaacttgagagtcgatgtcatcgctgatttgggcatcggcatcggttcgagctgacggaggtataggtctatgaagtctgatactctgtaagcaggcgaatatgtagccaccccctcatcttcaactgttctatcttcaaggtctgttcccctcagatttcgtgtctttgcaagaattttagaatctacgatgcatcgcggctcggaagagtagggacgagatgattcggtagacgtatatcgtggttccggtcggtcagactcgaaagtataccgggaagtgagcgaacctcgaggtgattcaatagtatgatcagacgaagtgggcgatgatgaagcaatgataaaccttgcatcggttggagagtccggaaagtacctcgaatcgttcctagacaagccctgtgattggcgatcgccattgctcgtctgagaagaagaaatatgggagagaaagatagtatctgtaggcaaaggtgtatagggtggtggatgattcctcctgccctgcttcttgaaaccaacctggtttctccatcctgtttctagtcgaagcggcttcaaatattttgcagttgttcctttcttggaccgttttctttcttcgggacgttgatcctgatcggcccatcggtcctccatcgtctgtctcgctcggcgcatgactctcaagacgttctctacacccagtttcctcttttgtttatccacttggacgtcatctagcccttccgcaaatatgagggtcgcctgcttcgtcttccgtcgttctcttctgacgtataaccagatagagagaaggatgatcgatagacaggcgaggaggattggaagactgattgatagaattttacgcttggtggatactccagaggtattggttgagagatcggataggcagatatgcagaaaagggacgagactcgtcggacaagtagagttgatacatttaccagaagagacgatgttggtcgccaacgagcaggagagacattgggagcttgatgggccgaggcaacttccacaagacgctgttatgaagtgccgttgagtgtgttatccgtaagatgatataatagaaggagcaggaatgaactcactgtcgcaggactcgcaactattgagagttgagttgaaataggccgcttggtcacaaacgacaagacatctcccatctttcaagactggcctatcagtcggacatgctgtgcactgattgactgcctgcaaagcacgaaaaacaagaacgtttcgacgctgattagatccggaggttgacaaagaatgagacgaagggaacgaagagaaagagtcataagtcacccaccgaaccagaacaacttgcgcaatctccatggcaattcgagcaaacctcgttggaaagaaacgttgcggctggacacgatgtcacagtacacgaaccgttgtaggcgactttactagagtttgatgggcaggtcagacagtacgaagatgaatattgacatgtcccacatgatgtatcgcaagctatcccgcgagaagagatgagtatagattcgccacaagaagaaacatgtcaacaacgttccttaatgagagccaaaagaagcggatagaagagggcagaaagagaccagatgtaccagagcaggtcacgttggcgcccacttcgttggtgaactctccattcggacagctttctacacacttcccctcgacggacagagcccatccggaaatacaacctgtctcaactagttgagatctcacagatgtagatgcattgtatccggggatagcgcagctcaacgatttggacggacatgcttcaagagcggacagaaaataaccagtctcagtcagctacatcatcactatgtcttctcctattctcattctcctctccatcgacagataggacgataaatactcacagtcgcactcttccttactagaatcatagtagaagcttcctttgacgatcggactatctgtatcttgacatatacccgtggtctcatccacggagacacaagtcgaccgaagcagcttttttgaacctgggcaagccaagcaagagttttgatctgccgcaaagcatccatcgcagagtggggagcatctacatggaacgcaagtcggaacagggtgtcaagcggaggtttagaaattgttgggaaggacattgagataggtcattcactcacggttcacacaactttgaggaagtactccagtagttatttccttcacaaactgaacccttcccactcggtccgctggccctgacacactcccccaactcaatctcccatccgtccacacaagctgtcgccacacttggagacttgcagctaagtgaatttttcggacaggctacacattgatcactagagaggatgaatccggctgcgcaagtcgagcattgtagatttgtgagattataagttggagcggaagacgtgataatgggcgaagtccagccggcggaacatctgcaactggatgagagagaggagccttggcattcgccattcaggcagtagcaagctgttaaatcatcatatcagaaactagtttctacaaggagccaaaatgggtaggaatgaacacgatgttggacaaggaagagacgaactagtggtggagttcacggtcgaggcaacgcaattccctgtaccgttgagtccgtcggagcaaactccggatgtacaagacccggcacagtcttggcaatctttcccaaagtatccaggggagcatagatcacaaagtgatcctgtgaacccgagtcgacatacgcaagccgaattctcgccggctggagacagagagacgcaagagcctccggaagaacaggttatgttgcaagcagctttggaacaacaagaaaagatcgatcttgatctggtcagcgactgcctgattgaccgaagggttgacgagtataacataccagactggatgtcgagcacttcgacggatacagtttctgatttgtctgtggctcttgtgagaggaagttgtttgacatgaccgacagaatcccaactgacaatctcttggttgtttactttcaacttggcccacacgttgttacccagtacccaactgcccactcttaccgtctgattttgctcgatagtagcacctgtctgaaacaactgagtattgcccgtgccaatcgaggaactatagaagagtacgccttgagttggaaagagtctaagcgagaagggcgagactctggtggagacagtatagttttgaaaggccgttatgttgtaaagaggcgcgaggatgggaagatcggacgagctgactggtatggtagaattgttcagcagtccttcaggtagagaaatggtgtaagtcccaggcaggagcaggacgtctgtttctggcaagtgagctccgagtgcaagctgtttatacacgttggaagagacattcgagcaggatgtgggcgagcaaatggtgtaggtcgattcggccgaggcttatgacgattatgggtgtgtgtgatgagagaacgaggttgtcaacagcttaacgaggtaagatgagagaggggaattgacctacctgctaagatggtcagtgcaacgacggccgaccggaaagcgagacgcatatcgatggaagacgcgacagacgggtatgtacgagggttggtcaattttcagctttgctggctagtgatatcttgagagtgcgtgagaagaggtcagtgctagtgatatggttagtgcccaaagactggagttgaataaggaaagatgatgggaaggaaggaagaaataaagagaaaagaagagaggaagagaaaacatgatcaaagggaacgttgttcagatgtatatgtcagtttcacttcgtgctggtcagcgcacacgtgtaggtattgtgtgttgcatgttaggtgtgcgattagcatgtctggtcaagagtcagtccgaatcgaacaaacgaggcaggcaagaacgatgagagatgagagaaagagaatgagatgaaaggatttctgtcgagacaaaagaacggacatacgatgacaaaaggggagccggctgaaacaaagggggatttgcccatgtatgagtccaaatggacccggaccggcccaaatccgctttcccaagttttcccaactgcccccaagtgtccccggggaaagctgaccagataccccacatcggatcgagaatgttccaccggtctgcccagcaaatcacacgtcatccctgccgcggagattaaccaaacaacggctaatcgcggggtccccgccggtacctgaccggattgacgagccgaacgattcatctagtatcaagtatcactgtgttaagtcatattaagcccacataagcgtatctgatttcctcatcgcctacctcgactgccctgtacgggccgtgatgggccaatcgatgggaaagatgagcgaacgatttgccccagaaaagtgaagaaaaaggggaaaaaaccccaaaaacggtctgtccccgcgaagtttccacactttttttttctgtcatttttctcttgccacctcgtccctttttttttctttcttctttcaccagtttctgtgttgtcatcatcatccattcgctttcctcttcttcttcctcttcatactttataaaggaaaaggttagttctgcgttcggaatcccgctctttcctctctccatcatcaccaatacaccacccgaacagcatctgatatcttttctttttttctttttttcttctttactgtttccatctctacccactgtatctcttcgttcttcccgctgttttcttcgcgcatctcaaaactccatctcttgaaaaaagactcaagctcaacccaacactacacctaccacttagttttataaatcatcatgtccttcactaaagaagacgaggtcgctgttgccaccatccgaacccttgccgccgatgtcgtcgccaaagccaactctggacaccctgggttagttcatcaacgattttttttctccagcctttcttttattggtatagttctatctcactaataccttgctccattcgactttgaacgaattttttacagagctcccatgggaatggcccctgttgcccacgttctctggaccaagtaagtgcttttgttctcgctttccaaccgagacagtatgctaggatgaagcgaagagagggaagaaatattaaagaattgagattcatgcatgtgtctgtcggaggaatatgccaattcagaccatgaactgacctgaccgatcttactcaatttctaggttcctcaaggctaaccccaagaactccaagtggatcaaccgagaccgatttgtcctttccaacggacacgcctgtgccctgcaatacatcatgctccacctcgctggttacgacctcagcttggatgacctcaagtctttccgacagctcggatccaagacccctggtcaccccgaggttcacgtcactgacggtatcgaggtcaccaccggtcctctcggacagggtatcgccaacgccgttggtctcgccatcgcccaggcccaccttggagccacttacaacaaggagaacttcaacttgattgacaactacacctacggtatgtgtcactcttcttttctgtcttggccatagcgcagatacttactcgtcctctttcatccatcttcacagccttcctcggagacggttgcttgcaggagggagtcgcctctgaggcctgctcccttgccggtcaccttcagctcaagaacttgatcgccatttacgacgataaccacatcactatcgatggggataccaacgtctccttcaccgagaacgttgagcagcgattccagtcttacggatggaacaccctccgagtctccaacggtgactctgatttggattccatctccaaggctatcgagcaggctaagacttccgacaagcccacccttatcaagctcaccaccatcattggtttcggatccaagctccagggaactcacggtgtccatggagctcctttgaaggctgacgatatcgccgccgtcaagtctaagttcggattcaaccctgaggagtcctttgccgttccccagactaccaccgatctctacgccaagcgagccgaggttggagctaaggccaacgccgagtgggacgcccttttcgcttcctacaaggagaagtacccccaggagggagccgagttcgctcgacgaatcgctggtgagctccctgagggttgggagaaggcccttcctgtctacaaggccggtgattccgctgttggatcccgaaagtactccgagatcgtcctcgaggctctcgcccctgttcttcccgagcttgtcggtggttctgccgatttgaccggttccaacttcactcgatggcagaaggccattgacttccagccccctgctactaagttgggagactactctggtcgatacatccgatacggtgtccgagagcacgctatgggagccatcttcaacggtctccatgcctacggagccatccttcctttcggaggaaccttcctcaactttgtctcttacgccgccggtgccgtccgactctccgccctttcccaccaccaggtcatctgggtcgccactcacgattccattg

SEQ ID NO: 1614 - DNA, 24038 bp, Xanthophyllomyces dendrorhous
gccactcacgattccattggtctcggagaggacggacctacccaccagccggtcgagaccgttgcttggcttcgagctacccccaacgttgccgtctggcgacctgctgacggaaacgagacctctgccgcctactttgtcgccatccaggccaagtccactccttccgtcctctgcctttcccgacagaaccttccccagttggagaactcgaccattgccaacgcctccaagggaggttacgtcgtccacgacgaggagaacgctgatatcaccatcgtttccaccggatccgaggtcgccatcgctgtcgaggccgccgagaagctcgctcagtctggtgtcaaggcccgagttgtctcgcttccttgcttcagcgtgttcgaggctcagcccgctgactacaagctcaaggttcttccttccggagctcctgtgatgtccgtcgaggcttactccaccttcggttggtcccagtactcccacgagcacttcggtctttccggtttcggagcctccggaccctacaagcaggtctacgaccactttgagctcaacggagagggtgtcgcctcccgagcccagaaggtcattgacttctacaagaagaagggaggacctgtcgtctcccctcttatctctgctttctctggtgtttccgagaactagatgtctttcttaatatattctctttctacatacaatcggttctctttccatgtcttccactcttgatttcttgtcgatcgccaggcttctttctgggatctttactgtacagatgaaacatgtttccttaacgctctgagttataaaagtcacgtgaacgcgtctcggtcctgttcgtcgtcggcctcctccgatcactcacttcctccgtctcatcttgcctccggatccgctccaccttgaccgctgcctttttttcccttctacttcttccatccgacattcatctgcaaaacaaattgtcaagttacggcagcaggagaaatacagtgatgtcaaacacacaatcgcaaggtccatatgtatgttgagttgatctttacggggctcaagatccgttttggccaaaccaactagattctgattatgctttccgttgttgcgtgtcccatcagttcattgggttcgacgtaaggcctcttgattttgccttcatcttgcttcttaaacaaaacacatcttttaattaagcgtctcgttctcgtattctatcctgtctacaccgttcgtcttttggttaactggacacatcgttcactgtaggtcggcaccggatccgccagagctgctttgttggatacatccggaaaactcttgtttgttctttcttggtatctttgccgaggtaatatgcttgatactccaagatcttgtcactgacccaaggaattcgccttctggtttcctggatgatctaccaaacagagctgagtccacccatcagactatcacattcagagatccaaaagaccacacaatctttgagcaatctctgacggatatctgggatgccatccgaaaatcctctctcgctgtcctcgaatccagcggtgtatccaaatcggatatcagaggagtcggcttcgatgcgacgtgtagtctggccgttaccgatctcgagggaaagccagtagaggtctcgaagggcgagaatttggggttggcattagaccatggaaatcgaatcggagaggatagatcgatgatcctctgggctggttagttccatctcgtctatagtccgtttgcattccttctaacttacggtctccgcctcgggttactatgtgatagatcacagagcagaagaagaggcaaagttgatcaattcgaccggacatgtcgtcttggactacgtaggtggtaccatgagtgtacgtatcttcatccatcgcaactttcaaagcctttctgtctcttggtcggacttttcaaaatagaggcgccctaagcgtatttgatgtcggcgctcagatgttctcgtagaaggaaactttcatctccatctctcattctaccctgtcctgttttgctttgatccagtctcggggaagggcttacatgaagcatatggagtatccgactggctggaagttggggttgaacgatgatgtgagctttcactcacatcagatcacagtgttggggatcagatcagatgctctgggatcagtttatctctcgcagcgatcatctgctgtgtagacttaagaactgaacgctcaataattttggtttctcttttgcgctggcccggcttgggatgcatagctcgaaatggagattccaaagacgctttggttgaagaaacatatgaaagcagatcggttcaagaactgccagttctttgatcttcctgattatcgtacgtactgttctcatgcgccaatcttatgggtatcatttgagaggttgtagcttgacggctcttttgttccatctttcagtaacctaccgaagtaccggttctttagctcggtcgtcaaactcgctagtctccaagttctcatacatcccgccagatgcttccgagtccgccccttcctcgaaaggacctcatccaaagtcagatggctggaatgaagagttcctcagaaacattgggctggaaagcgtggtcgaacgagggctcgggcagatcggaggaaaaaccggcgagagtctcgatgtcaaaggtgatggaagcgacaacggggaaagcttggtactcactgtcagtgtccatcttgaaaccttttcaatgataattttacctttcgtatcactggcattggcttagtggattttttttgtctcttttctaatgaataggctggtcttccagtgggtaaaggactggataagcgggccgccgaagagctagggttgctcgagggtacggcggttgggtctggagtcatcgatgcttgtatgtttgaacaactcgtcttattctcctctttgtgaatcatactgatcccgctgatcttcgtaatctcattcagacgctggctgggtgggaactatcgcggctcgatcaacggacatgcatgattctaatccagacgtgactctccagaatatggctccgccgaacctcgttgattctaccatgagattggctgcagtagcagggacaagtacttgttatatcgttcaggtatgtgtctgattctgtctcgtctgatctatctgaacaaaaaattaagtctgaactccctaatctatacagagtccagaaggtgtctttgtggacggagtatggggaccctacaaaaacgctatgtacgttagtctttatgtctttatgtcttttcttcaaatttactaacagcgtttatatctgattttttctagtttccctggatattggatgaacgaaggtggtcaatcttcgactggtgagcttatccttcaagaactcacacacatctatcggcgcgctcgaattatactcatcagctgtcatcttctccttttgtctcactaaacttgcaggtcaactcatcgattttatgatcaccacacacccagcctaccctcagcttctccaggtcgcgaaagaccaaggaacgaacatccatgaggtccttggagacaagctagaagaactaagagtcgagcggggagtgaagacacttactcatctgacgaaagatcttcacttggtgagcctttcttttattggattatgtcgtgatcgatatcctatactcaagtgcggggagaggtgccactgacgaagcaatgagtaacggttgacaatccatcagtatcctgatcttcatgggaacaggtcgcctctggcggacaaccgaatggtacgcgcatttcgcttctccatcgttcatcataaacatgactctatgatgctgaatatttcttgggtttgaacatttagaggggaagcatcgttggtctggcactcgacagtacgctaggagatctcgccttgaagttcaacgttacgctcgaggtaaacaccgtctatttcgtctcgtcgcgtgagccctccctatatgactgatcgctaacacgccttgattgatcataggcaatcgctcttcaaactcgacatattttagaggaaatgaactcgaaggggcataagattgatagtatctacatgagtggtgggtttcaatatatttagctcatcgttatcaactctgccaacaaccaaactcaacttatgttttcatgcttttggtacccattctctaatgaaacaataggtggtcaagtcaagaacaaacgattgatgtccctcctttcatccgtctgtaggatacctgtcatcctcccaccttcatcttcagcggcagtggtctccggctcggcgatgctcggtcgatttgcggctgaagttagtgaaaagttgggtcaagagccgatcagctcaatggagatggccaagaaggctggaaagggtatgaacgaacgactttgggagatcatggttcgtttttcacacctctccttcccgtctgtcctctccacttcctcacaaggatagtgcgttggtcgtatattcctctcacatttatgtaactccaatccttcaaggtggaaatgaccccacctggggctcgagtcgaacccgaggccgagaaggacgagatggcgctcttggatgtcaagtatgaaatcttcagggagagcatcgatatccagaagaaatggtctgttcttctactctgtatttcactcacttccttcttcctcttttcttcttctcttcatttgcgccccgtcttactgatttctccaaacactcccttctctctgtattttaccaacacaggcgcaagatgatagccgatgtaaccgaggcttagtggttcaagaagtttcccctctggctggattcaagtttcttcccattcattctattctttcatgtaacatttgtgtagatacggaccctgcaggaacttattaaacagcacgatatttcttcttgttagcgcataaatgatgtcttgagagttacagtcaatgtatagcgggatcaatgctaattgagagaagatctcatgaaaccaggtagccctcttctatactatttccctttgttccaatggcagatacggtggattatacgatacgggatatcgtccgaataagtatgtgtgagaaacaaaccaagcagaaaagagttacaatgatacgaaaggcaaagaaggagatcaagaggtaatgcgacgtaaaagagaggagatgttaagcaagaagagaaagggtctactctaatcctaggcaaatgaccctcacgaagtattcatgcaatctctcatccccctttccttcttcaaataatccaactccatcaattgtccctccactggttacatcctggttcatactcaattctggatggaacgaacaagccatcttctgaccttgtctgagcgcaacgacgttagattctgggtatgcagaagacgggatgaacggtagagtcgcgagaatttcgacaggcgctgacgtcgtcgtcgtaagaggttgatcaaaaggactgaaggacgaggcctgtgaggtagggattggaatagatgtcgatgcaggtggagtggaaggagtagctgggctggtttgggtggacaagaccatcttagagggtaattaaaatcagcattaagcaaggctacataagaaaagaagagaaagttgagataaaaaagaactgactggagctcgaatgaatactccgcaaaatggaatctctgggttcttcaagcttttcgaggcaaggactaagttggactcgaatgactcaagctagaagaagtgcgtttgattttaaaatggtctcgatcagtccttccttcttttggatgatgcaaagaggatataaacgaaagacttacctgattgccgaaaccattccgaagcacggtcgttgacataccaccaaacaggttctgaccaccctttttggctccttctgcctgatgggtaaacacgtcgtgataacaaatgaatcagtacgtcgatctacgctagcatatagagcgcggatgagtcacctttgacgacagcatgatcattccagcgcatgtccccaacacaggctttaccatagacatgtattaaacgacatcgtgttagaccttcctgaaaatcttgaaagtgaggaatcgattacggaccttctccgggtgctggcagaacgcgacaaggggctcgagaaggtttgacctagcagcgatcgctgcaattgctgtagattcacctatatgaggaagataatatgagcgagccggtcagttatgtaaacagaaatcagacaatttgctgtaagggacatgggcggacttgcctccagggatgacaagagcctctatagatgtacagattgaaagatttcgtcagtccacatccgtgttttcatcggtttctcttcggaattcacaaagggtttgtacatgaaggcgagtaaagactcaaagaactggaatcccggacggtaaaaaaaacctctaggtacatctcgaacgaaaccaagagaaacacttactgcatttatcgagatcgtctttcgtccgaacagtaacgacctcgatctttcgttgctcaaacttgagtcgctcgagaaggatgatgtgctcgtaaaaagctccctgaagacctggaggtagtatatgaagcatggccagttcaaacacatgttatctccgtattttgattgatcaagcaagaggccttaccaagaactccaatggtgtaagtctggtattcgtccatcttggtcatgttgatggaagtaatcggtagatcggcgatagaaacatgttaaaaatttctgttaaggtttggccttgatattatccctcatctaccatcacaattcccaacgtcaattacccttctcacttccagacatgcagctcacgggacaggccgaacttccgtctgtgggtagatcgatcaggaggatatctatacatcctgatgacctcaaagccaactcgcttctagcaggagatcttctcaaactgacaacttcagcccaaccttcggtgagtcctttcctcctaggtctctttctcctcaaggattcctcacacctaacacattttcttttgtaatttgactcgatggttctagccatgtatctttcttcaagcttggccttctcttgagaccgaagtaggaagtcagcaattttgattcttctcaataattattcatagaaggctaaccctctaccgctgtcgaatttttaatattagttgcccagctctcgctataccatatcttcaaccttcagccctcgttgcctcactttgtcaacagtcagctaccctcatgcagcttagatatcagaaaagtcaagatagctaaggcagcgatgagagaagccaagtctatcgaattagtggaactcaaggtggaaaatgtggacgtcatagataaagacgacgacgacggacaagagcaagacagtagggaaagagagagcggatgggttcaagtgtgtgcaaaggagtcgataggtttgtctctgtctttgttgtcagttctgattcaggattcaataaaaaaaacgttccattacgtacgctgcccaatgtatcctctcactcatgcctacgttgtggtcctatctcatgcagttaacctcaagcatatcacccctcagacggtcatatatattccactcccgaattcgacgagtccccctagagcgtttcgtatcaagtccgtcaacaaacaaatcatccagaccacctcatctgaatctattgaggatgccattgccgataaagtctattcattgaatttgggagaggaagatgaggctaagtccttctgggttacaagttggggaaccgaagttacagtagatttggaggccaaggaaaaggacattgaaaagtctaaaggaaagatagtgtctgcagcaaagaatagacagactactaaaagccaggagtccaaggaggtaagcatacttgacatgtttgtttgcattgtggattattaataacgcaatatcttcttgtgtgtctgtaagggtacttcggaagcgtcatacatgcgcgttcaccctcctgcttcaaatcctacagccggctattcaacattaggtggtctttcctctcagattcaaaaggttcgagaaatgatcgaactacccctactccaccctacactttacacccatctgtctctgccaccacctcgaggaattcttctctatggacctcctgggacaggtaaaactgcattgtgcagagcaattgcgaattcgactcccgactgctcttgtatcatcatcaatggttctgagctttcatcctcataccacggcgagaccgaggagaggctacgggatgtctgggatcgagccaaagcgcatagtccatgcgtagttgtgttggatgaggtcgacgcgcttgctcccagaagagacgaaggtggtggagaggttgagaggagagtggttgcgacgctgctgacattgatggatggaatgggaaaagatgacgattcggcgagagtcgttgttgtcggtgccacaaataggccgaatgctttggatcctgctctgagaagacctggaaggttcgatagggagatagagattggtacgcacacgccacgcatatcttgagctgacgaatcaagcctgatcaaaattccaaaacaggcgtgcccgatgctgctgctcgactttctatcctccaggttcttctctctgtccgtccaaacgatatcacttcagactcattagctgaaattgcttccaaaacccacggatacgtaggtgccgatttgacgtccctcattagagaggcaggcaattttgcaatttccagctacctttcatcttctcttgccacatctacgtccactggcatcgatgattccataccgacaggtcttaagatctctttcggcgatatgattcatgcgctctcacaagtccgtccatcagcgatgcgagaagtctttctcgaaacacccagcgtcaaatggtcagacatcggtggtcaagatgaggtcaagcagaaattaaaggaatgcgtagagtggccattgctttacaaaagtacatttgatagattgggagttcggccgcccaggggtgtgttgttgtatggtccgccgggatgtagtaaaacgttgacagccaaagcgttggcgaccgaatccggaatcaactttttagccgtcaaaggtcccgaggtgtgtatggtgtttcgatcacaacgatcacaatctctttctgcgcatctgctaatgagcctgctatgtgttcaacaaatcattacgtgctgtagctgctaaacaaatatgtgggagaatctgaacgtgccgtccgggaggttttccgaaaagctcgagtagcttctccgtctattatcttcttcgtgagacataatctcgttgtttctctctctttcaaatggctttgaatgtcaagactgatcagctgtacgcaccgttcttctgtgatcatcaggatgagattgacgcgttgggaacgtctcgatcggatgatgcttcgtcaacccatacgagtggcgtattgacgtcgattcttaatgaaatggatggtattgaggaactggttggagtaacagttgtagctgctacgaataggccagacgtcatcgtgagaatattctatctcgagagtctcgacacggttgtaaaactgacagatcatcaaattgattgaacgttctgaataggattcggcgctgatgcgaccgggacgaattgacagaattctctatgttggaccaccgtcgttcgaagctcgtattgagattttcaatatcacgctgagaaaaatgccagtagaatctgggctagacgtcaacgaactggccaagatggttagtctcttatattttcatgataagccctatatcacgtcttcgttcttacacttgtgcacttatttgtatcgttctcatcgaaagaccgatggttgttctggagcggagattgtacaaatctgtcaggacgcggctttgagggcaatgcaggaaaacatagaggctccctacgtacgttcccgttttcatggacgtaatatcgtattgaagcatgattcgatcgtgaagactgatgtgtgttctttggaatcttgaattggtacagactcgagtggaagacttccacgtagtcatcaaggcgtgcaggaagagcatcaccccagaaatggtggagtttttcgaggaatggagagatgggcagattgtgcaaagtgcttagatatatacttgtcaatacatcaagctatacggagatgagaatgcagagaaagagagatgttgagaacagctagaaatccgaagagaagatgtcatttttatcaggttatttttgaagacccatcgatgctttcaatccgttcttctctttgatttctctatatctggcgatgaccctctccctctcttccgccaaaattcttgcctggccaaccgaaattccaactctcgcgcctgcactagtctctacactacctgcattggctttgatggccttggaagctagtcgaggaagcgttaatgtaggaggggcttgagcgatatcattgagtctcttcggggcggatgaggggacggcgcttgcaaactcggtcgctcggaccttcttgggcttaacggcaatagcagtaggggtgacagtgattgatggagtagatttggcggtggtagtaggggtgagtttgccgttagaaggatgggcagccggttttgaggttgaagacgtcgcgctgggtccggctttggctatgattttgggtttagactcgctttcttcctcgtcatcgaaattatcttcgttttgagaaccctcttcctcagcctcagcttccatagcttcttgttcggctttgaggcgttttttctcttcccgctcagctactcgggcatcatgcttctgctttcgctcctccttttcttgacgaaagatctcggtagactgttgggagcaagagagtgaaacaggagatgttgtcaatgtggggacacaacagagaaagcagtgaaaaaatgaagcaggagcgcacatgagcttgagcttttttggaggcgacggcgatgttcgctcgaagagaatcctcgactcgtctgttgaaatgagcaagtgattccccagggacgatcttgagcgaggaagatgggcccaaagcgtcattcgtagtggcctgtgagtgatagttgatgaaggaagcccttgtcagacctgatgatcttgatctcctccggttaaatttactgtgtttgccagactcaccttagagtttccagtcttcctctctgatggcgtggccagagcaactttgttcttcttctttcctcctccaggtccgctttcggacaaacccattttgttttcccgctttcgtttcctgaaatcatcttgagtctgcatcgaatttaggattcgcattgctcccttcggcaacccttccctttctagatcttgagctccgggagcttggtcttttccactgttatccgagagaggaatccagaatttcatgagaaaaccaatccactgttgcgtatgaccgaagatcatcatgacttactttgtctttcgagtcgcgtctctaacgctcttcttagcacctgttgagcagcattgaatgaaacatatcaatggaccacacacatcaagaattgttaatcatgaaaacatatctacgtttgtgaggcatgtcttccgaatcgatgaaggagaaaccggtggtggtggttgtgtagaacgagagagcctgcaatttttgtcattattatcttttcgatattttgagtgataagataaagaaccctatacattccgccagaaaaccttcatcttggtaacttcactcactccttcacctccaagcaaactgttgctgactcgctcgagctgctgctagctactgagcacatccatgctaaccctacgaaagtgtttactaacgccatatatgtgtggcctatacgcaagacttttctcgttgaatgatctcgagagaagaagagggacggaaaggacagaaaacacgggaactgatccgcctaaaacgcatcccccttgttcttgtctaccaagctcacattttcccctcgtttctctttccatcctcattccctcacttactcgttcaatcacatacacccgtccaatgagctcgttctcagatttagtttattcaaatttaggtaaacccaatccaacggtcctcatctcggatggggatcgttctagtaacggctcaagtctggatagctgggacacgttcgaacaactcggctctctcaaactcaacctcagcgggagtaaggcagcccactattgaacatatcattcaatctgtcttcttgaacactgactggtagctctttcttctgtagactttacgttgccctcgatcgatgatgtgctgagtagtcatcaacccagctctgaagccagccaatcgacccggctcagtatagccagcttccggtctgattcaccgtccagttcccattatagctctcaatctgtctcccttccttcctctgagaacagtccgtgcctagcatgatctttgtttgttaatctctttgacttgcaaagtacttgacggctgatccattcgattgtattcgttgcagcttcccatacttccttacgcgttcgaatacgaagagagtttaccacctacgatgtggatcattccagccgggaaagcatattatcctttcgatctaccttttctcttcccgaagaaccttccattgactccatagccacgaatcttcctcggagatccgtctctcgctcttcccggccgtcgacttctcctgcttcttcccgacctcaaagctcttgcccacctttgagtccttcctcatattcatacgtatcaggcaaaattagctccgctccatgtgagacccgaagagctcgagcaagctcgacccctcagttaccagcttcggctttggtctcaaccgctctacccacccagaatgaagcagatcaagcgcagagatcgatctcactcaccaagtttgggactggactaaggccgaagttgccaagatcaaagacaacgagtctaaccagcttgcttgaatatttgtcggccatagatcgtggagggcgattgccttcctcgtcggataggccactgggcaggtcgaaaaaggctagatacgttccttcggagaaaaactcggctaaacgagagaaagttgttgaggaaattctctccagcgagcaggtctatcttgagggtctaaacataattgtggatgtcagtctctcttcttcatcactgagcaagaaaagttgttcgattattctgacaaaatctctcccatcttcatatagcacttcatgcaaccccttttggactcaactctagccgataacaatccaatacttcctagagaaacaatcaacacgttgtttgctaatattgttgatattcagctgttctctcaagccttcctttccgctctgaaatctgctactactccttacgctcgcctcaaaagtaaaaccaccctcgcgtctagctctagctcgaccatgactggattcaactctctcaacgatcatgtatcccgatttagtcgtcccttatcaatgccgatcaaatttgatcccctagatattgacatcggacctcagatctctctcacccttctcaaacaccttcccttcctctcgctttaccatcctttcgtttcatctttctcagacgcgtccacattgcttgcaaaactgaagaaggagcacaggccattcagaaattggctggcagaaagagaaagagacgaaaagtgtagacgcttgagattaggagattggttgttgagcgttgtgcagaggtgtccgagatacctgctgttggtaaaagtgagtaagcaattccacgatggatctctttcatatatttgctcctgacatgaggttggttccaatcactataatcaggacttgctatcgtgcacccccgtagatgatcctgaacacgatgatcttctcaaagtccgagatgtggttgagaatagtgagtgtagttcttcctgcgaatatcacgctctgaaagaaacttgaacgccgcgactgatgatcgattcatggcacatgccatcggtttggaatcaagttaccgaaaagatgaatgcacgattacatgatattgttgctatacaaaaactcattgcgcttcatcgatctttcctaaacataccgcctatgttctctttcgtggtacccgggcgacgacttctgaagcaaggtgcgtctccttgatgcgctcgtactccttctcattgaacttacttaataaagtctgccgttcatgtgaaaaggcaacctgttgaaggtttgtcgtaagcgagatgaagataggtcgttctggttattcaacgattgtttggtctacggtaaaaccaacacgatgttcggcggatcacttggagcatcgacatctctcgccagtctgagcagttggcttaatcttccgagttcagttgcgggacttggcgaaaggaaacccataggaagacaatctactcagctgtcttcagagggtgaaccggggaaatacatattttcgaggttcataaaactggacgaactgacaatccttggggtagaaagttcgggaacggaaggaaagtcgtttgaactcttcagccctgaagaaagcttcgcactgattgctggtatgttacactctttcttgtccctatgacatgccaaggtccaactggctgacaagcaatggtttgagataaattgtagactcaagagcagaaagaaatgtctggatagaagccatacggggagcaaaacatcagttgaacgccgatttacgaactctcaacacagtagaagagcataccatgcggcggcaccgaagacgatctgtccaagctatgccagtgttctctaccggtctgcacattgggatggggctcaaagtcggaagtctttctttccttgcgactaccttgaatgggtcaaactcaatggaggatgacgattcctctcgactgcacaagggtggagaagaacccatcgagaatttcacagccgctgtatgggtgccagataagatggcggaagagtgcatgcgctgtcagagacaattcacggtgttcaggagaaagcatcattgtcgactttgtggagtagtttgttgccatcactgttccaccaaagtacgtgactcaaaccttctgtctgatgtttgagtttgtttactgatattaatactgcatgaacattgtaatctagtctttcaaagtcaatgattctacaaacaactcgtccctattacccttgtctgctcccgctcaacccgagcgcgcgtgcgatgcctgttttcatgctttgttcagcacttctatcagcccgggagcaaccatacaacacaagcatgaacatgaacatgaacctggtatggtttcgatcgatcgatctcggtcgtcgatgaattcttcaaccacgactatatcgacctcggcgtctagtactccatccatcaaacctcaatcaagtctactgacaaaatcgtcatcatttgatcgactaccgacttctagctctttcatcaccttcccttcctccgggattcctaaaactccgcctagtacacctcgtcagactcaaaaactgacaatttcgcggatcggaatcttatcacctccgaacttgactgtaaacgtcaacggaaacgtttgggtggaaagaggcgaaatgatcaggggtgatgaaggtagtccgaggaatggaacagcggcaaacagattgaggagtgtgttggaaggctaagatctttcaacacattcctcagtcttgaatcgaggatgtgctcctacgcttgactcttttccgttatcccaatcgtttcccttctaagcctcatcagacagctgtttttgtgtagtttacgttcacttgtctcttctttcaagattttcgatatactctgtacagtgtcctttcctcataacttcctcgaatcggataatctatatacaatgacccttttccaaggcgatgaatggggtattgtcttttctggcttcatcagtagaatacaatccaacatatgatcatgagcacgtagactcaagtggctttagctttgacgatgactggtatgagtgctgacacattcgcaaacgaggagacagaagcaaaacagtggagaattagctttgtttctcaataaaacacgagacatgattgtgctgagatacgcacatccagtaggagcttcacaatcctgtattatgcacaaaagagattagatctcaacgtaggtcaaccaagaacagccttgaaacagacaatggtggttaagacgaactttatgatcgacaagtttgaaaaatgagctgatggttcccccatggccaactagagaaacaactatagattttggtacaaaaaggagtcatcccacaagcccgtcctgtcagcttttctctgtgcttattactttgtgtatcacacgatagatgttcagaagagacaaaatgaaaactctcaactgacaggtctgatccgaatattctctgaacaattcatcaacaactttcctcgttctctcaatttgactctgctcggactctcgctgatcaggcttccaaagtatatcatgtgtctcgaacgaaggttcaaattcgaaccgaattgcattgtgcgggttttcgagggtaccgtatgtagttcgaaggaaatatgctgagtgacgaccatttaagcagacgacggaataagtgacgaatgagaggggaagatttgtcgaaaaaatgacatacacgtcgaacgagcatcacacgtatggagtccaatactctcacgcagattcttgaaaacctcagacaacggggtaagccagactattcctattcatggattgaggccaaagacacaaacctctttaaacattggtcgaacgcctgaagaaccgttcatcgcggtatcttgatatgtccagactaacgtgctaactccccgagggtaatcaaagcaaggcttattagctatccgagtctttgacgtatactcaagacgaatggaacgacgacctactctgcagctcgcctaagaggactcgaccagatgatttctgggaaaggaggagaaagcgcaagttcctctttccacacggcgttaacatgcttagcttgttcaatccccagtgaggtgagggacggatctggaccccaagtcaagtttccgtcggtctttgaatccagtcaattcccgataaaggcaatatagtaagaacaaagactgaatttaattgcaaaatcaggttcacatgaacgaacataaagtttagaccagtagtcattccaagactgtcgtcgcgtatcatgtaagattctatgtcgaccattcttcgagaaaccctatcctaggctgaggagtaaacttacatcggtcccatactttgactccgcaacctatcatgttaagacaaacagtcaaggaggaggaccaagcatgcagacggtgttagtagtagatacaaagaggttctcgatattgaacgcacattgtgaaatccttggccatgtctctggaggtaaaaagctttatagaacgttcccctgggagcatcattctgcaattctttgacaacaaacaatcataggtatgaatgaaagcaaaaagtgccaaatgtcagctttctccaatcattgtcagcgcagatagacgggtctaaacaacaaacgaccaactcttgatagtttttcgaaaatcgtcccatcgcgtaggcgagtcatctatcaggcctaaccgaggtagtacctagtccagcacgaggcgtttcgaagtcagagccgtacgcaatagcgtaaacaggcacaaatgtcgaagaacactcacagccgaggcaactttacctgtcgagggcgcatcttgtagaaagaaaccttcgactacctgcgcacaaattgaaacataggaccgtacagattgacgtgtacaacgtgcgtcggattcgatcaataaacttgttcgagaaaggggcaagtcaaattgaaacttgtatgtactgagtaatcatatgttcttccattggtactcgacctggcacacagcattctcatcacgaaccatgcagatcccagaatgatgagtatcagcatgcagatgacaccaacgtgttcgaattgatgagccatcagcttgaatctgttatgagttcgtgttcggatattgccggtagaaattggttcagcgtagatgactttgtgaaccgatgtgttctgctttttaggaataagggggccgacaagttcaggacaagatgtcatcctgagtatttcagtctacaaaaagctcaaggataatttgtctatcagtcagatagatgctgagtggatggttggatgattaaatgatggtaagatgctgagaagagaaggagttgaccggccggatggaagcgaaagacaacaccgaacatggttactctttgtttgttactcgtttactccctcgttgttcagtacagggataagaataggcaaagaaacaaacgatcctgacttctacatgcgatgtgctcattattatcgtcatcatcatcatcatcatagtcctttgaaaaacacaatagacaggtatgaaagcgagaatgggaaccaaaaacaaacatcaagtgtagattatcgatttatttagaagtatattacatcagaatccaactccaagcggatccagcgaaggttccctttctagtcgaggtctttccccttcctgctctttcacaattctcccttcttttccttgatcttctcggactccatttttgataatcgttgaactagtgtcatagctggaaattggactcaaaggatctcttgtcgagatcagctctcggtcgaatgatccttgtctaccatctgaagccacatcttgtatggtcaatttatctagggacctataaggcacgctcgtcggtgaggtcgttccaaccacagatgatgatgggtttgcagaagacaaagtaggaatcggcgcagaagatgatgttgacgaccaggcagaagttgatggcgggagtgttgagaacgaattagaatgtgacaatccagcgttagagagagaaggattggaggaactggaagcaaaggatgcggatggtacaaatcctggagctgaagatgaagagacagatggcgaggatggcgacagcggtgaagatgaggaggcagcggcgggagccagaatccaacatgtatcaccacctgcgcgcaagacagacggtgtctgatcttcttccgaccaagggttttcctccaccgttgattggccgagatggccattgtttgtcaaggaattcatctttcgaggaattacagagaacggacgttcttcttgccaagcagacctactagaacctctgctggactctcttcctaatggaccagtacttcctccaccacttgcaccgcttccagtactgtttccggctcctcccccgaccgacgcagcctgattggcaaccctccctatctctttggccgcgcctgatagagcgctcctagctccagatgagaactgggcccaagtaccaccccaagaagaagttgaattgttcaactctcgagtcgaagaggcagaagaatgaggataactactgatggtccgagaggaggacgaggattgatgtctagattcgaatgttcacagttcagtgttggtcaaagatgatgcgaaacagagcaatgcttcataccctgtgttcccttcttccgtttgaagatcgacaggtggagagcctggcgaagctgtcgggctggacagtgacatgacaggctttttgtttgacctcggccgataagggaaggaagctcctgtgataccatccaaaatggagagtttaccgtcctggatcgattgactatcctctaccaccttcttgacaactggatcttcctttttctcatagactgccggtgaacccgctgtaggcaaaggaggctcttccgagacaatcactggccggccattcatctcctcatctcctctaccaaacacatctgcccagaacctgacatcttttgggttcggaaacaatatcccggcgtttccctgttgagctagatcctctgatttatcatatctagcgttcaaaaatctctcttttgcatgctcggatgatacccaatcccatacgctgactgttcgatcctgcggcggtttggaacctttcggtccgaattctggtggcattcgtctttcgcgttcagagttgaacaagaatgtaccgaactgacaggtgtaaagttgttcgaggagcattcgaaggaacgtatcgtcgaactcaaaacgagtaggaaattgtcgctgaatttgccagacagtgtcgaggaactgatgaaagacaggggacgtctctttgagatgtgagttggacgaaaactgtttttgtacggaagcgaaccaagcttgagccgaggaggaacccccgcttccaccaccaccgctgctagaagaactcaaagaagtggactcctcctggccgttggttgttaaacttgatggatcaattcctcccccactggtctggtttgaatagtggaaatacttatcggacgataagtgaccacatcggtccaaaaacttgtgtccaaaactgagccaatctttttcaacgagtaccatgaatcccttgattgtcctgtagaacggatctagacagagttgcgcaacagctgagagctgagcggtcctatcccagccatcagaacaatgtatgagtacgtgtgacgaattgatatgaatgttccggacaatgatggtagagccctcgaggattgatgtcgtatgcttcaaccaatttgaccgacggagagcctgtctgtcgagcggtggaggctgaacaaagtcggttgctgagtagtgtcctgcactgcttccaggaataggttcactctcccgaagtgcatcgattaccttattcaaagaatccctcctgaggcaacatggaaggaaaagcaacatcattcaatgacaagacttcaattggaggacagatgaaacgaagcttgagaaagagacgaacatgacatggatgttctcgatgttcaagtagacctttcttgccagcctgtaattgtccatgttttctgttcctgcgcctttagccacgtttgccattgcatttgtcgttggtctcgcatcaacgatcagattggtagccgtcgctccgtatatctgttgagttccggccgtttggccttgagggctcggcgtataggcagagtcattgaacaaatgggtttgaaaaatggcttcaatcaacttttcatcttgaatcgaccgagcttgctttagtccgacgagcggttgggatgatcgagtgattgtggcctgtgatgacccgtcaagcgattggcgaaacagcaatcaacgttaatttgaaaaatgaaaagagaacgcacatcagagctcaagagaaacaagaaaaagaagtaaaagagaagctgattatttacatagttcgcccagtggagatacgtgagcgcagggattcgttctttgctcctgtacttggaagcgtgcgtcaatgccgaatcactgattctagccggtacagccaattttgccggataggtagacgagaactacaaatggacaacactttcgggatcagcagtagaacatacaaagaaaacttgagacatcaagaatctgagaaagaacgcaagtggacaaacagaataatctttatttatatccgtaaatcgccaggcttttgtccgactgcctacgcccatgcgagtaaactcttccctgggagtaaagacgttccagccgtcacacttctccaggggtggagagggagagtatgtaaatgcatagactttctcgattgagtctgttgttttgtccggtgggtgcaggaaagaaagattgttagcttcatagatcttgaacgagtcagactgaaccaaccttgaaaaaaagaaaagaagaccatactggaaactgttagatccttgatagtctcgaatacgtccagacaagttgactcatcctcgaagaagaggacgtatgtttgaaaaagtctggtccgaatcaagattggagcacggccgttgaacgattgaggaagtttattcacttggttgatcaaagggtacgatatctggggttcgaattcacagtcagatcgtcttttatattcagctatatgaagaagaacccagacacacccaaagctcaggagacgaggggcactcaaagatgagatgatgaagcgtgagatggagtgtgcctgtcgaccgaagacctttattttctagctggacttcttcgacctgagaaagttgaaaacatcatattggatgagaatcgaccgaggaatcaggaaagatttaaattcgaggaaaaattagataaataaatcaaaagaatcataagagtcagaggaatcttttggaagcatgagatctacactctcaaccgaaatagaaacggatcgttcgaacgacagagacagaaacaggaggattcaggtagttcactgaccttggaaattcttatgacatccatcgctcgcaggtacgaagttatgagagtaaactaagagcaaacaaaacgaaaattttgcacctagaaagaatcaagagaagtttgaactaaaagaatacaaacaggaaaggaggaaagagggacaaaggcgcctgatgatggtcgtggtgatgatggggttcaggcggcgcaaatgacggaatatgtttgatccagatgagattgtcggcctatcagaaataattcatcgcctaacaatcaaatgagctgcactctcctatagcactcgttgagctcaacgttccttaattgtccttgcttccaaataaaagtaagatttcttttcatcttctggtctatctcaattgtttttagtgaagtccatcattctcagttatgggaacattgcaatcgttatacattttatctgatgaaagtttttaaaacttcaagactttgccattcaacgctctgatctcagcaattgggcattcgagcacctcatcctcgtccactccattattcgactcttcggtgtcataatcatgttcaagcctaggtcgaggtttcaaaatatatcggatcgagtttgaatcagtgcagacaaaccgaacaagtgcgacgagaagtgtcagttcgggtgtgtatgttttcgggttcaacgttacgtcctggaatatgaaatcgagaagatcacagaacaggtattgagtactaggcgcaggtccacgagcaagacgaaggttgacagaacagattgaaaaaatagaaacgaacattccaacctatgacactaccctgcttgagaccacttgatttgatgtgagattcgccatctagacttccccaggcatcttctaacgcagcccattcactctcccaccctacggtttgttctgatactatgctggaagcagaaggaagagtagaagtagaagtagaaggagctagaacgcgctcaacaccttcttcttcgtcttctccataatctaagaagacctcggtatctgtgcgagtccgacttctggggatggaatcggcctcagcttcgggctcgggctcaggttcaggctcaccgaaataagatgcccaagcaccagagccaacgactctggcccaagaatcagattcaacatctacgcttgacacccacatatttccaggaaggacttctctatcactcggtgcatcaaacctgataaagctcttgttgtgattgttgttattcgtcggagtggtcaccgaattcagttttgcaaagaaaggctcaggacgtgtcggtgtagcgctgacagcggatgcggaaagagaggacgggggagggacagaattgtaagaaattcgagtaggagccgagccagctgcctgcttgcggtacgccgaggacttgtttcgattagaggacgcgttgaatgcgatcgaaagtgggacaacggactcgagtgatcgttgagttggcagcagggttgaagcagctacccgaggagaagaaggagaagaagaagaagaagaggagg

SEQ ID NO: 1615 - DNA, 26528 bp, Xanthophyllomyces dendrorhous
aagatgaacttgagatagattccacgaaaggagatggggatgcaggaggaggtagcagagaaggaagcttgggaactgttacagcggctgaacgggcagctgccgcattctctgctttgagcgcagctttctttcgtcttcttcgtatgttgcgctcttgagtagcggttgagcctgcgccgggtggtaccggtgggttagctgggataattggagtcaaaatgatagtggagctgatagaacgagaggaacgagtgggaagattttctgaagcaggcgtcacattcgaaaatgattttggagcaggttgaggtttcttagacgattgaaccgaaggagctgaagatgatgatgaggatggtgatgaggatgatgatgaggaagaagaagattctgaagaggaagagtcttcgctctcacttgactcgaccggaacagacttcttgattgtacgtttatgttccttcctgacctttctctcggcctcctcttttatctgtctctccttctttgccttcttaacttcctttctggcatccttagcattcttcctcgccttcttttttgattccctttccttggttgtcgtgccggcggaaggggggctactcttgcgcgctcgttttgaagctactggtgaggactctggtgaggatgctgacaaggctttccgtttcgttcccgacgcgatcaaggcggtttgtgagattgaggcaagagtgactctaagatttaggattatacaaagtcgattagtgcacacacacaacatgaataggcctaaaggagactcaccgcacgacatcatccggggcaatcacgttgatagacgtgtctgctaacaggtcgaacccatcaatagacaagcgtagtttaggcttggttacggagcctcggtcatcatcagctctgcataaactggggaagagatcgaccaggtaagattccagatgatcaatcgtgcctgatggtagtaggctctcaggaacgagtacccatgccttgagcggacctgtcggtgtgtcggccgagagcttgaagcgcatgcgttacagaaaagagggggggaaagacgttgactgccggttctgagacggcgatatcaaagcagaagaagggccgtaagaaggcagtgcaggaacgatgtaaaagggcgtgtgtatgtgtgggtgtgtgagtgtttgtaggaaaagtggtcgaggtgactgaatcagggcaggtgtttctgaggtgaatatactttgaaacggtcgatctattcgaatttcctcttgacattacgtaatcgcttctctcctggattcattgccggccatctctctcgcagttgggccgcttaattcagggacatttcatcttgtactcagtcgatcaccagctcacccgctcacttgttcacacctgccaggtacagacacccacagatggcttcaccacgggcttcggcctcattctcgaccctgttcccttccaggttccacaagaaggaatcgcagtcgtctggaccgtcatcccaatccgtcggcggcaacagcaacggtaacggtcgttcaagagcggcctccagctcgtttgccatagtcggtaatgcttccaatggtggaggcccaacactcgcccagagaaggtccacagagcctctctctgcagagttcctttcgcccagctcggcaatagggccggcctcgactgtgcaatcttcgttgtcgtcagcctcggtgctgagagtccaaatgggaggatcgttcagacaacaacctgggcaatcgggcgatcaggacgatcagaaggtcgaagacgaggattcccttcaaacaccagttgacgagaaacgacagcgaatcctgcccacagaagtttcggcgtcgcccatgttgagtttcgccttaccggtaccagcctctgcacaggcaccgtcactggcatcaacttcagcacagacctcaccggcactgtcctctttagcaccaccatcatcaccatcacaatcacaactaccagcgatgaccaagtcaaaaacgaggagaggctttggagggatcccaaagaaggcgaaaccgtctcagggagtttccggtgcgttggtcagtatgtctaaagacctgattaacccaaccaacgggctcgctcccatcccggcttttcgttcaagatcaggctcttttgtgtctgaaggcgaagaaccggttgcttctgtcgccgctactaccgccactgctttcatgcccacggaatctcctgttcgaaagaaaggtcgaaagagagggttgactgcaacctcaaaaacaagcgaaaaatcggaaaacacgacctaccctgtctatcctccggtcgcctctccctcactgaaaccatcagtctcgaacagattgtcgtttacctcaacagagaatggggtaaatcggaccagagcgagctccatctacgcgacttccgatcaggacatgtacgttcattcaagttctgcaccagaatccgaacggactgatggcgaagatggcgaaggctggagtgagggggatcataatctcgacggttacccagctggcgacgactaccactcagtcggtcctacagacagaacccggtctggctcgatgggttcaggaaatttctctaataactatactcacaacaacgaccccaacggtaaccacgatgaagatgatgatgaagatcatcacgaaatgtccggtagcgagagtggaggtagcggtcaggcagaatacgacctcgatgaccttccagtcgtgggctttgctgtcgctagtgtcaagcgaaactcagactttcatgccctgtttggaaaagtcattcctgaagatgattatctgattgagggtgtgtccaggcttttcctttcctgccccttccatcaatcttgacgttgcttccccaaactgaaacgaccctttgctaaatagattatggatgcgccttgcaaagggacatcctgctccaaggcagactctacgtctcagagaaccatatatgcttccatgctaacatctttggttgggtcactaatgtatgtctgggtgtttctcatatatttcttgttcagtgttccttcgcgctctccttaccttcatcaatccaacatcgtttcctttttctatcagcttgtcgttccattttcggaaacgaataggattgataagaaaatgaccgctttcgtcattccaaatgctattatgatcaccacgtccgacgccaaggtaagtttatcttgcctctctttcctcatttttgctttttctcttcttacgctctgtatcctctttcttcttacttgtccttcagcacacattcgcatcgtttctgtcaagggacaccgcattcgatgtcatccacagcatctggcgcttatctactccgatcaatcccatggctgccaaccgatcgtcctcatccatccccgatgactcgccccttcagagcctcacctcaaattctcttgctaccgattctaaacccgctcatcagcactcgccctctagcccgttaacgatgggcaagaaaaagattccgagcagaaaacagccgactacgtgccaatgccagctaaacggtggtcactactcggagactgcactggatagcgtgttcccaagcacacctgaaaaactgtacaatctgatgtttacctctggattttcgaaagatttcatgagtaataatcagaaacttatcggttagttcggacgtgatggattagccttctcacaaccaacatatactttgaactcttttcttcgtccgtacgcttaccttcttgcttcatcctttttctccttacagacatccagatctctgattgggcacctcagtcgtctggatcacatcttttgacacgctcgatgtcatacatcaaaccgctccctggtggattcggaccgaagcagacaaagtgcgaactggttgaccaaacggctcatgttgattttcaagactttgtctcgatgattaccaccacaagaacgccggacgttccttctggaggttcttttgcagtgaagactaggacttgtttaatgtgggccggagcaaacagtacgagagtagtcgtcaccactcaggtcgactggaccggcaggagtttcatcaaaggtctgttgctcatattgttctcgtttgtcgtcgccgttgataagcgttgaaaagatcttcttttaacatcatctcaaaaaggcatcatcgaaagctcagctttagcaggccaaaagtctactcacggcgatttggagatcgcaatgaggacatatatcgccgaccatcggactgaattccatacggaaggggtcgatgacggggacgatcttcaagaatccactctcctcaccatcgatccaggttccaattctggaccggccgactcgagctctgccgttcattccaataatctttcttcctcaggaaacgattcttcgattcagaaccataaagatcaagaacgcgcattgcttcaatactcctttgatctttcggttcaatcggtcttcgccgctttgagggcagtatccggaattgttcagtctatcctcaccgctcttacggatatttctgtcagatccggcgtcatgggagccatcgtaggtatcttggtaatttcgaacatatggactctggtctcgttgcgtggcgcaagagatggcatcccgaacgagctcgcgtccaagtcaggatacgaaggtacaaatggagccgatgcgacaggaaggattagaccaagatcggtcctcagacatactgggtttaggtgtaggcaaagcggaaaactgtccgtcgaacgtccggcacagaacgtggagcagacacaagtaggaatggaatcaccagactcagtcgcagaggccgtcagacgtttgtcctttcctgccctctcctcttaacaaacttttttcctttcttcattttgttctttcattgacaggatgatgagattatctgacctcacagtgtttctagaagactatctcccttcagcacacccccaatctcgaccaccgacataccctcacttgcgctccttacccagacacgaacaattctcagccctctcacctcaagaagaaatcgaagaattaagaaactcgttagatgatatcgaacgttggttagagagattgagaaaatcggtcgaccatgtcgttgtcacagaaggtgctgaggagggggttggttcagccgtgggtcacgatccaatcggtcaggccgtttgagtcatatggaaggggcgatcaaatgaggaaggattggcaggtcttcatttatagtttttttcttacttcatattatgttattctgtatacccctcgttcatactgtaccttctcgtatatgttacaatgacaacataagtcatcccattgaacgtgcagtagattatgccttgaacatacgatttgattctttctcctgatgtaccccactgaagatatatcttggcaatgacgaggataatgttatctcgtttatcttcaaatctaactctcaccatatagttttttatgtctcttatagaatgaattgtgataggataattatcaaggggacggaaatataaaatcacatatcaactaacttctcccatcataaacgttgcctcgcatttctaaaacttctcggatccctcaaacagctcggcttccagcccatcatccaccactgtccagtcaacatctctggctgaatacaaagcctcataagccgcagaactggcgtgcgcaaagaagggttcaagctcagatatcgaagagattttctttaaatgggatagacgtggtcttctaaatgctgttgttgatgttgagtgagatgattcgagcacatcgtcaccagattctggcgggtgaagttttccatcattctattcatacaagtgaaagggggtgtcgaaaagaaaggtgtgagtgtcaagaatcagcaaacgatcacgaagaattgatggacaaactttgctgaaatgaggactgtctcgaatgagttcggccagatgatccatcaaggaaccagatatatccccttcgtctgtatccaacgataaaggagtatctcggacgaacgcccattgatgactatgtttctcacgaagaaagggaagaatatttttgatcagaaccccaggttagaaacaatagagaagtatttgagatgaggttgatacatttggaaatcttcggactggatcacgagcagcagatcgaggaacttgcaggccccgaggatctctaataaaagctcagagttatttggtggtaactcctccattagttgttcaaacacccgaagctatcaatatataaaaaatcagcaaaccatacaaacagacgaaacagcctggcgcacaacagacgtacaagctcagtcagaatgataggccacaagttggtgagatcccgggcggcgatccgacagattaaaattcgtagacaaagatagacctcagcccgaacagtcggagataatcccgtcattcttaaaatctcgaccaaactttcttgaatcgcaggcagttgattgagaaaatggttcttttcggcagcaaagaggacaaatgatatccggcgaatattgagcgaacggagaagcatctcagaatctcggttactgaatatgttggctgaaggggccgcaacagctcgagcttgagaacggtaccgagataaatgtgttagtctgacaaacccaaatggtagactcaagcaagataacgtacaaacgagttctgtgaaccgctctttctcgaagtccactagagaacagactagaggtttccatctggcccctgaggaaggtgagccattgaaaaatctcgaatcgttcataaaagcttcagtgacaagagctctccaaaccttgatcgagttgggtatccgagtaatccccacaagaatgctgagagccgtgggatcgacatccagagacctattgagatagatcggcatcagattgtctctcgatgaggaatctcatgaatatattctgactcacttggttcgtacacggagtgcaggggcgacgacctgctgacagagtgtactacaagcggctagaactttatcgctatcggccaagaaggatcgaaggttgggtacagtttttcgggacataaaatcggcaatctaaaacccatagttaacagaggatttatggttgagttggggtatcatagttgagcaaggcaacagaactcaccgcaatatacgacacctctgtttgtgtattgaataccgctggcttttcttccagaggtgtcccggctagatggcaagctcacggtcaatgcacaactcaccatttgacagtacaacatacgacttgatcacttacgaagggcaggtgaaaccattccgttgctgacgtcccttgctcgtcgacggacggaaaattgtccatcgaaagatcgcagagcccaggcagcagtagcgtcaagcaatttggaataagtgtcctgttttggtttgcatagattgtcaatatgttgagcaagacaccgtcgactacaacgatatcaattgctcacctgcagatcacgacgcattctcctgtcttcaagcgcgcttgtggtagcaaccttctcggccaatgctgtcaagcacctgaggtgatgaacgagtgcagggagtcgttcatcaggaggctgacgaaacaatcaagaatatattgatgtacactcacttgaatgagaagaaaacctgtatcttggatgcagtggttgaggctcctacaagaacatccttagtcatagcaaagaatgtcccccaaacctgaactgcaattggaccctcaagtcgactcaaataagcttcgagaaagccataaacgatcgtgtcgttcctttgaagagagtagatgcaggtagtaagagtcatttgacatcagcctgatgtcaagtcatgaagtagcttactcttcttctgtaagatttcctttgccaagtgtattcgttcgtctggttagaagctggcacatgatagacacagcggtctgagcacttgaggctaatgtgtccaaaatttcgaaagagtactgttgttgatgatgagatatgataaaattgattcatcagcctatcttctgaaccatatatggtcaaagtaagctactgacacaattcggattctgatttgaagcccaacaacttgctaagattctaacaacgctcgaaggttgcaatctatagaattgctctaatgccttccgagttcggtcttgaacacgattgtacagatgattcatgccagctgcagctgctgtagaagtggtcaagataggggaagaagaagcagtccaaagagtgtgtaataaagacacggcatcatctagacatcgcagtccagctgatttgggctacgagttatgatagagagtttgattacggatcgagagtgagacatctgaacgcatgacttgagtcagtcaaagaaattttacttacaactgcgccaccttctggagtcgatggtcgagcaagatctgactccgtgaagacgttagaaacataaccaaacaagcctgtggtgacctccgtttgccgcttgtcgagattgggagacaaggagacaggaacagagccagcaggcgccgccagggaaaccactttctctaatgcgttgagaagcatgactatctctgaacccgctgcgttgtgtacggtcgaatgattgatatcttcagagacaacgacatctctgatcgattcagcgagtaggtatagctctttgatcagacaatcaccaagaggatagagaagaggtcggagatgcccttgaagctggggagcagtcatgaggatgaagtccacccaatgttgtagaactagtcgattggatttgaccgagacacctttcaccaacatctgaagtaacagcggactcaaattgtccgatatagagagagagtttctctccacgctaggcttttcatcactaaggtaggccgaagtttttgagaagtcgctattaccagacgagggaagaccttgaacagagatcttcttcttgtgctgggtggacgaagcagctgaagagattatgttttgtaagacgtgaagaagctggttctggatgtcaagtttcgcttcgtgtatacagtacagtagtttagcgacaatgacagtttctgtggtcttgtgactgatggctgagatgtcgccgcgtgaaaggatagactggataatttcgagagcgttgagttgcagtaaaccattggcaggttctagagaagaagagagcgctttactgggttcagattgaacaaacctgaagtagttgaggagtaccagaattcgacacaacacgttagctagcgtgcgcacttcttgacgacaacaatttttttagagataggattgcacatactgtagtaacaactcgacgaggacgtccatgaatgatgcttcggcatggaaaatcttagctgttgtacggaagccaatggcaccaaatcaacacaaatatcaacatcatagatcagacgaaacatttcgcgtgaagacgaacctttggtcgccctttcacgcaatctttcacttccttggctgattggtgtcgccctgatcactcggttcaacgcctgacctccgaatcgactgagactagccaaactttccaaaacgtaattgagccgagcatggtcaatcggccgatcatatcttgatccttgaacctctttgccagagaaagtgaaggttgtcgttgtccggcatatagatggatctaatagaatgcacatgatcgggtctagcattctgtaagaaattttacagtaaacaacaacaggaacatatggactggtaagaaagtttcattctgtttccagctagaaactaacgagcatgggacaaaccgtgtgtatgacttgagatcacacctcaaccaagtttcgcctgctcggcgcaaagacacatttgatgcgttcaaagtatctaaaatgataaagatcggtccatccaacgcatgattggatagatctgaatcctctacgaagcggacaaaccggtgaataaaatttagtgagactagtatcagcctatcaattcgttgaaggtgaagatattgacaaagatgaagctaagacataccgcttagtcgccaaaggactccaaatgcatggatcgcatctaatcttttctcaatcgaggtggacagcatattttggaagagtatagcatcaatatgcttgaatgaactggcatggtgaagctcccacataagatgaacggccgggatatgatagagttgagtgctcgatgtcatgaaacgcaagacctgtgattgattggttcaataggaaacgttgagcctgtgtgatcttagatatcccaacaaaatcttttgtttaggtttcgacgtggttacctacattgttcatcaatgctgacattactagccgactattggtcttcaaagggggttgcatatacggtacccttcccaatcctagggaaacgcgaatcataatctccaacgtatcgaatgaagcggtctggcatataacgcacgaacaaacatctgagcgccaaccaaactctcgaaagatacttgaaagttgtaacacacctggtttgcttgttccctaacttcgttgaaccacgcatcccgatcccattcaatagttccgatatctccctccaaccccacctgtcccccgagatcgatccaatccttcaaaatttctaaaactccacaggtcatatcctctatctgattattgccctgtagagagttactgagggatcttctcgataacgccagcaatttttgaaacggccgtttgaagagctctgttcccgtgaagctcgagcttgtaatctccgaaggaggctgaaggtcagtagacgacgaataataggcggtagcagactctaacggcgtgattccagggtcaccagatgatacagaggcagaaggcaagtgaaggaagacttcaagaggaatctgggggagaatttgacggacgagatccagagcacctgtgatcttagttttctggatatctgtcatgagcgattctgaaagagcgaagaaaactcggtgaagaagctctactaaggtgacaataatgataggtaggtgggtcgtttggatttcttcttcttgttttgaaaaagaccttaagatgaaagcaatcaggtccagagactgatcgtaggttcagaggaaggcattgttagtctgtgagttgctgtaaaatttcaagtcggatgagaggaatgagacctcacgtcgcaaaccagatctggcgattcgaattcattcagtaatccccagaacaagcctcgccagactagatagggatccaccgtttcatacagcgtgcttccagtcatcagacgctgttggaatccaagtcgtgttgaacgaaataagtttcaatcgttctctatgtttgtgatccgagagatacaattaaacagacttgactcacatcactgacaatctcatgatcatctccatttgattcttttagggatctaagcgcgtccaagatcaatacgtcggtaagtggatacccgatttcccatttgtccaacaaggagataaatatccgatagggccgttgaggttctgatagactcgatgatacatcattcatattttcctacgagtgcgttgttgattaggacaggaagagagagacattttgatcagctatctgacttctttgctggaagaaagaaagaaacaaaccttgagcgtattctttagaacgtccagggaccattctcttaaataagcaacctgctcatctgagcttccctctgggcccaatagccatccgtataatcttctacttaaagacaagtctcttctcatgacaactgtcaaggctgaagacataaggattttgcggtcggtctcagtggagaaactgaaagttgtgatccaggtggtagaaacattccgagacgatatcagatcattaagcgcgtacaaactcgcttgtcttcagtcgcgataaacttactcggaggatgcggcgccatctaatctcaaccctgtcactaaaaggtccaatgtccctctctggacaagcagattatcatcttccaacgcggctgcaaacgctcgaatcatcaaccctatgtcagagcctactatcggtgtaatatcttgaaaaatccaaacataattttaatcgtcagcagaacatcatctaaccatgattttgtatgaaatattgaccttctcctttgccaaactttggtaatcgcctgccaagatagcatagaacgtttgttcttgcccctggtgtactgatcaatatcatccagaggttttgaaagaaaatcggtggtgataccgttgatgatacaatatccatgaggtacatgaccttttcgaaagcttctccggcttcctcctccagacctggaagaagggcaagtaagaatgccttgatcgctggaagaagggcattcttcagagggacatagtgtacttcatatatattgaggagcatgggctaagacatgcgtggcaggcaatatcagcgattgattcaaagatagataatctggatgaaggataagaaacgtactttggcggatgtagaagcgtattggaagaatggaaagagaccagacgaccagatcaatagatctctttttaagccttcaagctaagaaacgcgcaatcaatcaacggtcagcgctcaaaactctcgatgtgtctccaggcaggaacaatacgacatgaaacacgatatgattgaaaggtctcatgcatgaactcactccgatgacactcaggatgtgtccgtaaacatctagagctctctggtgaactccactgggcaacgccggagtaagacattgcgctagtctttttgcaatcaacagcttccttgggatttcattgaatccagggaatgtttgaattgtcttcagcagtttggaaagaaaggagataaagtcggcccattccttgatgctctcaaatgattgtagagagcgatctatctgagtctgatatttcttccattgagaatcgtttgatagaagcgagagagcggctgaaagtttatcggcgggtacaagtttgtcattgagtcaatacagagaaagcaggaagacaaatgctcggagaatcagacagacacgaacctttctctgctccctttcctttccatatggacccagttctttttccgattgatcccagctcacccttcccatatccaccgggctgattcgtaccaaaggatgtatcaaccttgggactaacagccgagcgagggttactgatggcaagatggtctcgttttgttgaactctggctgctggttgctgaccggatactagaaagagatggctgatgatgaaggctagattccacactttcagggaggtccatgtggtggttcaattacttctacgtgtattcagatgtagtatatgtgatgaaggcctgaagatatgacaatgacctgtgattatgaaagaaagaggatgtgtctatcggggccaacaggaactggaagccaacggactgaaggaagtgatgaaagagagaagcgtgtatcgaatagaattacgtaatgttcgatatgttgattcatcccatcacactctgtttgaagaccagttccgattccaagttgatacacctttgcgcgcccgactatcacccggtaacctttgacgtagctatgaatcctaaagtacatatacctccatgcctttagcagtctgaagaacagcacaaggagataatcgcttgatagataggattgaatgtttatggaaaagttcagaaactgataatcttgttgttcctcgtctttgtttattgtctgtcttgacagaatcgacatcaaacccaggatccagaggatctttacacccggcagaacattattggtctgttcttatctctctttatcactctaatcgttatagcttcgttcaaatgctcatgacccattcgaatcggctaaacggatcataggcaaaggttctttcggtcaagtatacaaagggtcagtttcattcttagtcaattctgttcgtccattcaatgtttatataaaaaccttctacaattcaaataccatcctctagtatcgagaaacgaacaggagccttggtggcgatcaaaataatcgatctcgagaacgccgaagatgagatcgatgatattcaacaagaaatccaaattctttctcagttggactctagtcgagtaactaagtgagttctgtaattttggatttcaatagtataagtgaaaatcatgtgtctgggctcatcaatcttgtcaaaatcttgatctactagataccatggatcctttctgaaaggaaccaatctgtggattatcatggagttttgttccggaggatcatgttcggatcttgtgcgtgtgcctcttcatggaagtttcagcccacggaaagcgcgcttgttgacttttctcgatttgttgggtcattcttctatttcaaaaactacttgctgaaaccacttggatagttaaaatcaggagtttttagggaagaatatattgcgatcatttgccgagaactgctcaaggggttggagtatttgcatcaggagggtaaacttcatcgagacatcaaaggtttgttctgcttaacttttctctacttggaaactaatctgacatatagttttgtcggattgaacgcatttcctcttacttgtttctctttgacacttattgaatctatcatgaaagcggccaacatcctgctaacttcggcaggagatgtcaagttggccgattttggagttagcggccaactcacatccaccatgaccaagaaagtatgcttccccttgattcattcgaagtttctgagcttctgtcatagttaatgctcatcattatctattcatcttgtctggaagaacacgttcgttggaactccctattggatgtctccagaagtcatcaaacaatctggatacgatttcaaggcagatatctggtcgcttgggatcacagcgatggagatggcaatgggagaacctccatatgcagaattacacccaatgaaggtttgtttcatcttttgttgtcttctgacgtatgtttgtcagagagttgttcggaatttttttccagatcaacgttcatgttcctgttttctgatttgcctatatttgtctttttttctcgtctgcgcgcgaataatctcaggttctgtttctgatcccaaagaacccgccacctacacttggaccacagtttagcaagccattcagagagtttgtctcgctttgcttgcagcgggacccaaaagaagtaggcttgttcttgtatcctttccttttaggcaagagagcgatgttgacttcccgaatttgttcgaaaacctttctagcgaccaacagctaaagatttactcaaacatcggttcatgaagaccgtcaaaaggccaagcttcttgaccgaactactagatcgtcacgaagtgtggaagactgacagaagcgacaaaaagattgaggaaaatgagccgtcaggctacgaagcgtacgttctctcaagtctatcttgctgtttgcgcgacgtatcctcaaaccatcgcttacaccatacgttactcatgtgatattatgttgtttgtgattcatagaggaacgatgggtgacgttggagatctttgggactttggaacgatccgacgggatgttcctcgtctgggtacgatgtccaggtcgcaacctcccccactccccacttcgtactcgtttgccaatgatgactctgtgtcttctcaaccaaaatacatcccccagaaaggatcaacccacataccttcctcttcacctgtggattcatcaggaacctacagctcgctcaacgctcaaaccatcagttcagtatctcgcacacgttcgtttggcatatctcaaggcgatcgagaccaatcggtttctgaaagccaactgccgtatgcatctggaggttcgcctaagaatacgttagcgagatatcaatcgttgaatcccacgcagttcatggagacaaaaacggaggtcaaatcggttccggtggcgcagtatgaaatagaccaggatgctgaacacatcagccattctaatggacaagaaagattgagtgacgatagacagcctctggccaaagtgggccaggacgagggaagagggcccggacacgagtcagagaaggagaaggggaaagcggagtatgatagtgacgaagagtttaggaacgatagagagatcctatactcaacagaatctgagaggatcaggaaagaggaggaaatgagtgattcgaaagcaatactgatggatgttgtctgtcctgtgattgatatggtgggtcattcttatgctgtcatgaacttatttatgcttgggagaattgataggctgacaaactgaaatcgtttgtttcatctcagatcgcgtcgaagataaatgacccggacgcacgacaggctcttgaagttcttcgacgtgcctttgagaatgcagaacgaatgttagtctgttatctccctcaatctttgtattgtgccgttgaagcaggtgtgtgattcaagcaagtcccgatgactgatccgttaacaacgccgtttgacacagtatccctggtgtaacatcggccatcgtagctgaggtttgtgacaatgttgagcaagctgacccagtagaagatgaacagtaaggtgtcaattaaggagattagaaggattaacctaacgactactggagagggaacaggtgaccctccgtaaccttgcatctacaccttttctttctcttgcttttccctatttatattactcgtgttcttttttccttttctttttttcttggctcttcttttctttttctatatacctgcccctcccaaccctagtcatgcataccgtagtgaacacgtccttgttcgttcttttttctcatcttctcttccctcgattgacatcttttgtctagcacgacacactccatcccatacatccattttcatatttcatgtggttttagagaagcatgtttggcacagctgtcacttgacttacagcctccttttcttttgtgttcagcacgaatgtgcaactgtatctcgcttcagttggaatgtgattgttcatcaatgcagcagagatgaaacagcgatccgtttacgattgagatgcttcgacaacagcacagtacacacacatcatcaagactgccatctcgtcgaccgactgaatccaagaaaaagtggaaagcagccggtcgacacaaatgggaagaaggtagaggaggtccctgacaacacaagccggcagtgcagtggcaaggtcatcgtgtccggccgtcgtgcaagcagaggatggccggacgggcaaggcaaaaagaagtaaaccagatgggtccggtggacccatataagtggttaaacttataagaacagatactacacatgatctaagccaaaaggccagagaggatgagggaaaagaaagaagacaggaggaacgctggcagggcggccgggctttatacgtttggtcgaccccccctgccggccggagtgtgaaaactgggggaagggacggcgggctggggggctcacgtgacgtatggaggatcgattcatgttgacttttgccatagtctttccttgtattcagactacaacatgaatcactacacatcatcatctacgatgcgacgtgaatttcttataggaaatatttattgaatcattatgtacaataccatcatagggacgaccctattaagaattcgtattcatacgcatacgtaagtccatagacaaagtacaatcagcacagccctggctctttttttctcccatcgatctcgcctcctcgtttcttgttccccggtgtcgtttcttgtacaccttcttctctctcttcatcatctggaacaacaaacacctttacgatatccatccatccattcatcctttccttctcgcctccactcaacttcaaatacagaatcaacaccatgagtgacaccgatggtacgcttcacgactcagtcaacctacctcgcctatgctgtctttctttttcgctctcgcttctctcttcactctcgtcgacctagaccgtctcgtctttgacgtgtctgccatctgaaagataatctccaagtgaggagaacaaatcagaagttgttcatccatctattctttgtccttcaaacggcaacaatcgctcccaagacagcctgcttgtcttacatttgtgttcacgacttgatcgagctccagctgatggtggtccagagagaatccatcttaatacacgcgtctcgtcatctatcaggcaccctctgatcgttttacctgctgtcaatgtgttggtttcttggtcaatggatgttcaacgattctgacacacaactgctctctatgtcaagaaagtcgacatgccgtttgctcaaccactccgactgctctctactttctctctccctgtgtatcctttcaaaatctcaatcttcgtccacttggccacctgaccgtcttttttccacaacgcttcgattcgtctcgtcctgacactcattcaccttatctctatctgtatcacgctcgccttgcttttattctttccttccaatcttccacccttttcatctgctctcttctatcgatcagaatgggcaacccgagatgagcctgccgctgctcaaccttcccacaaggacgactactcccggggtgggacccctcccccccgaggtagggacagacgaagtgcttcgccttccggagacaaccgaggtggaggaaggatggatgttgatcgacccgacagagggcggggtgatgggtaagctcttgtgtttgacatcctcttatttgctgaattttctcaagagttgactgtgtctactctttgtctcgttcttatctgcacattcgcttggctcatgaaggcctcctagatctggaggagatgagaaccctggaaacaatttgcatgtttcttcgctctcgccccgagtagaacaacgagacttagagactgctttcagcaagttcggtgtggttcgtgcttgtcatctttctctgctgaagcaatcagaattcttgagattgttctcaattgttaatctttcatacctcctgttatatgtcacctttgcggaaaacaatgaattttatatgggcgtctcttagattgataagattcaaatcatgtacgaccctcactctcgagagtcccgagggtttgctttcgtcacgatggccacccctgaggaggccgatgccgccatcgccggattagatggtgttgagttcatgggcaagcccatgaggattggcaaggtacgtatcgcgtatcgagttcttcttaccgctatgcttctacagatgagacgcatttagttaacttttcgtttaccgaacattggcacaaaggctcgacgaggacgagctcgaactcccacgcccggtcgatactttggacctcctaaggaagacgataggaggcccccccgaagggattacggttcccgagggggagagagggagagaccctatgacccccagccgtatgatgctcgatacagctgtatgttccatccttctcattgttttgacaatcggtgggacacagaatgtaaaagctgatgttcgccccgttcttctttactcaatcagctggtcctcctgtccgagctcgacctcctccctatgatgaccgacgaggtgatcgacgagacgaacgatgttcgtatctaaagtcttaccttgtctcagatttttttgatttatctattttcattcgtttgcttattctcgatttcttatttgatcttttatagacgatccccgaggaggttaccgatctgagagagactaccctcctcgagattatgctcctcgagactatcctcctcgagatccctacggctacccttcctccagggatagatacgaggaccgaccgtacgtgccttcttccactcgatcctccggaccctccggaggtggaggaggttactacagcgcaggacctgattatggtgcacctcctcctccaccggttcctagacgggacaggagacaagacgaactgtacgccacacctgctgctgggtatgaccgaagagatttgggagatagggatggcggtagaaggtggtagacccatcctttccttcgtctacctgctcgattgatcttttttgtcgtataggggctgtctttgctcttctcctactttctgttttacaaatccaaccattaaattcgttgtcttttctttctcctttcttcctccttttgagagataactttttcttttcgctccatggatggatgattgaaaaagattacggatgatgaacgctggcgttcgaaacgaaagccagtttacagatcgtcatacaacatatgaacaccttcataaaactatgaagcctttgcccatacctctccgaaacaggaacgagagagtgaattaaagaacgaaagacatgtcgtgaacaagagcaaaagatacgaactgtaacagatacggacgcaaagatcaagatgtatgataaattgatagatgtcaaaacaacgagaccctgaatgataagtgatagatattataatttcacgaagcagtagagctggacgaacggaacatgagcaaagatgtttggttttttccatgttgtgatgcttttcattctgttctggagggcgaaggtaagaagctgaagaaagaatgtacagaagggaaagaagattgaaaagacaaaggaaagagaaaagtaaattaaaaaggaaggctagaaggaagggcgcctatatgaacacgataagaaagcattcgttgctcaaaatatatatatactatcctagataatataaacaacaatatgaatcgagaagagaaaacacgtatgtccagatgaaaagagaacttgccaacaaaaaaaagacatgaaactacaaggtaggcacaagttgggaagcaaccattccaagaggaagacgtgagacctctgtttagaatgcagacccagctgcgaatgaccaaagccatttcgagtttattcagttggagagatggtctcgcaaagagatgaaaagagaagcgagagccaaagatagagaggcttacctccatcaagcatccaatccaggtctgaaagacccatgatctgagtcatcaaatcgccactacttgattttgtaacgaaacgatcaaaacaaagtattctagttcagtgcaactgtttttggtcgatatcggatctaacagaaagagaaaggaagaggagagaacatactcggtgtaaacgtcattttgaataggtaaaggcggctggaaggtcgcgcttgacgcactcgctatcggttgaccggagcagccattccctaagaacccgttgaaaccgtcttgatcggacatgaacggtccttccgtaacagagtcgaaaaagtgttggaacggttgactggtcgcaaaatttgatcccacaggtggaggtcgcattgcaaattgttgttgctgctgtagcaactgttgctgttggtaatgatgaagagggtgagatgaaggaagttggttttgaagatttggttgagtatacgatgatggaacctgataaggcggttgttgctgatactgctgggactgctgctgcacattctggccggtcaagaggtccatattcatcggtccaagtcgctgattcgacaatggtgatggcaaaatcggctgactgagcggatgataagctgcgaggcttgtagtactcctcaaatccgtcgtcgtcgggcgacgttcgtcctgctgagaatttatcgtagaaaatgtcatcagaggctggaggggtgatgcctgatgatcagtcgaagaaaagggcgctgttggtggcgaggtcgccgtcctcaccgctggcattgcccccgtggacgatgagggcgtcagtgcaatggttgatgaagcagaagatggagactgagccccggtgatccttgtagacgaaggtacagcattgttcttcaccaatcgacgaactgctcgttgaagcgcgtgggtatcgtctgagctcgagacagattctatgctacctcgacgactaggatcagctcctaattcttgcggatgtgagctgagcgcctcaagtaggagagcctcaatgacccgaatacttccccttgctggtgatgaatgtgtttcggatattctattgaagacgacgataccaaaaagcgagaggaataaaattagccaaagccgtgctttatctggatcaaaggataccaaaagatgacgcgtacttgaggaatcgcaaagcggcagaaacagactgaagagtctcctcccacttcgcgtctcttggcgtatttagcatgtcgattaggcagacgcaactcgcaaagaatgtttgaagcacgggaatcctagaaaagccgaaatgagtcaggtctgcttgtcccctcttcctctagcaaaatgagctttgaaactgatgaacgtaccaccatcggtttaagaaggaactcgtccgaccagaagccgttccagaattaatcaactccagagagatctgagccgccttgacacattgctcggtagaatatgcatattttttgttcttatcaaagccaatacaagagagactggtcgattagaactggggttgaacagagtgacgatgcggaaggaagggcatacagtgtatccacggctcaaatacggacgatggagtctttgttaaaaggtaaacccagagtaaacaataatgtgcatcagatttcagtatcaacttgatcaatttgctaagaggaacttgaggcgcacctcattcttctcgtctgcaaagataaatgcaacacaattttttcccaatgagccgcttcgggattagacacggagtccggagagattttcatgtcggggcccgtgtttacttgataaaacgaagggaactaaaaaagcaaaccgaatgcaacccgctctcacgccgttaacggaaagcattgatggaatcaggagaaaaacgacagtaccttgagagggatcttggctagctccccgtcgatagccatgatatcttcataaggtgggtgaaccgaagtattcatcagatagatcgtctgatacgctgtctggatggttcggagtcgagccagatggtatgacattggtgtatgaaccgacattggacgcggtcgaagaggttgaccgtcaaccagatcttcatcacaaatctacatttacaagaaagtcgaggatgcatgggaaaggaaaagtggaccttgaacctatgattacgacaaaagggcgacaacaaataaaggaaggaaggaacatacgttggccggaagcgcggtagacatttgttccggatgaatactacgagaaagaaagggaagacagaagtattgatttaagtttacgagggcatgtacagtcaagaaagagaggaacggaccttgtcgcatactgaattatgatcaatcagcaacccaaacccggatatttagatgtcaatagaaacgttagaacatgagggaatttccgttttggtcaagacgactcactccataagaaggagagattgaggcatctaagaagaccatctgccaccagatccgtctagcagtttctcgagtaataatcgactcccatcgacctgtccatttaagaggctgatcgcctggcttgagttcgccttgctccgcgcctaatctatttaaacccatcatttgagcgatcttcgggagattatcgtcaaggtagacgatcagcaacgattaacagttacagagaccagtatagactgcataaatactcaccttcacaccactacccaggataccccaatgagcgtcggcccgatcttgatttatctatttcagaccaattcaatcgaaagtattgagaaagatcagacacaaaaatgatgacagcacgtttgaataaatattaacatgaagctgacagaaggacaaaataacatacaaggtagactccacaaagcacgatgacttgaaggttctcgagcgaatgattcgccagaaagtcactttgccagagggaacctctagcaccggcgaaccacatggaaggcagaatttcttgatcttctttagagaaaccaagagattcggccttatcagagtccataaacgttagactcaactggaatgaggtgataacgtatgacaaaatgaaagagaggagattttagttgtgagctagcggaaaaggcatcagatctagataactccgaaactcacgaggagaagcatcaggaaaagcccaatccatgaaggcgcacacagcgcggctcgcttgtcatgcgggatgtcccagaactcgtggcactgccgaaggacagtgggcacgtctgtgtaattgctcgaaaactagattgtcggttgaagatacaataagatatgagctgatctagaaagcaagtactcacgaagacagtggtggaaccattctactttggcaaagtactatagacattatgagatcaaaaattgtcaataatattactcgatcaaaaacagagatatacaaatgaacagatccaacatacgtgttcaatgagcgcctcctctttctctcttccaggcaaacaagacatgaaagcctccatatggagcctagaaacaggatcgagtatgtcgaaatagagggttagtgtgttcagttttaggtttgattcattctgagcgcgtacgcttactctgatcgctggaagaaggtctcaaatatgagtgtcgggttccctcctttcttgcccaacagtacattcgcgatttcttgtcgttttctcatgtcctcctgcttcgcccgctcctcgtccgcttcatcgttttcgccatcttcttcattgtcttgttcgggatcatcctgatcaccctcatcctcgcgctgaccgcttaaatcagattgacgccttcgttgtctactcgatggagcgagtctgtctttgaatgttgggccaggcatcacgccgagcttattattctgaggtatcaccattgcacccaatgggccaccttttgatatcattggtggcttttgacccatagaggctttcgaaggcttgttgacaagcttgatggccatcgatggggaatcaacttttccagaatttggagtacttgaggcatgtccggttgcggctgagcctgaatgagtagtgatcggggcagaatcttgggtgaaattggagggtgaggacgtgagcacttggttaattgttgatgttgcagcagaaggtgtccggatgggagcagacacggagctcaaactcggctgggtcggctgagtggtcgaggatggttctgttgaatcaagaacggaaacctgggctgacaccgaagacctaccttcggcggcagtcgagcgaggagatttgagtgcggacgaagatgagttgcttccggtgaaatgtagattggtgacctgatctgaagataccggggcggcgacctgggtaggatcgtctctccgtctgccaaaggcaagatgttcgagtgtaagggcggcgccttctgtctctgaatcgattcctgcggttccttctcgactggttccctggccgtcgccctcgcctagatccatggtcgctcttcgtttttttttctgtcgaacctcggaaggaagccgtttaaagtcctcttcgtcttcactatcatcgtcttgctggtgactgctagcttggtcctgtcgatgttgttgtgttgatcgttcttcttcgtctaagtcgtcttcttcgatagcaaattcatcttcatcggcggcttcttcgctattttctggcttatgattactgtcacgacgggaccgaggtttggtgggaacgtcattttcggtccaagcgagtttttcttgaccaacctgagctcttttccttctaggccggtctcgttctaacctttgaacgagggcctcaagcgctatgacccgatgagtgagagctaggagatcgagctgagacgcgcaggccgctgattgaggtgcgtgtttctcgacctctctacaaaccgcagcatctcccctggcgatacatggttggcaagggaacttccggtcgcatttgatctttctgaagagagggagttttaaattgagcattatgattgaaatcaggacgcgtgtaggaacatgaacgggcaaggaaaaaacgagaagccaacagacatcagaaaggttcggaaatcaggatgacccgtttgcgttattcatccgacaggagagattcaagacacaagaaaagaacagagaacagaccttcttctgcactctgaacaactctggacagctcgtttctttcctttatcctttccgctcgtcgtggtctttcgatctttatcgtcctcgctctcctcctcttcgatctccctcctcgctctctttttggcgtattgatcgtcttgaagcgagctgcgtgcagcggtccgagccggtgctggtactgatgcagacgcagaagatgaactcatcgacagaggtgcgcccatcagagcattcaaaggaggcaacgtcgaggcggagaatatgggatgggaggtgcgact

SEQ ID NO: 1616 - DNA, 12149 bp, Xanthophyllomyces dendrorhous
gtgtggatgatgtggtggctgtggtggctgtggtggctgctgtggctgctgttgatgggagacatgttgagattggttgtgtggtgggtatggtatcggatggtaagaaggttgctgctgagggtctgggtgctgccgatgttgttgctgatacaggtggggttgctgacccggatgaggcggctgctgctgctggccatacatcctgtttccctcagtgaaagtcaagaactatgcgaagagaagatcagagagggagtgtgttaaagagcgaaaggaatgtgttctcagacagattctgtgaatgcttgttgggtttagaactcttagtcttccctaagaacgttgaacgatcgaatatcggtggatttggccgaaattagttttatcacgcaccaaccagaccagagactaccaatatatgcatggctctctcatcctgtttctttggtctctttcgtggttattacagttgcttgcttcccagctacggtcgtattcgcctccgttgagatgttgtccatataaggaaagaaagagaatatgtaaaaataaaacgttgtataaaggaagcatcatttcacacacatccacacaccctgctctttcacatatacacactctactctagttcgtccgatctgatgtcgacactagtaaacaaaaaaaatcaatcgtcagaaaaacgcccagaaggagatgacaggcagagaaagagatataaaagagtagacacaacccataacacaaacgttcgacggacacttacagatcacccgcgtaaaagttttggctaggttgccaaatcatgactatggttcagttcgggtttttgagtcgattagaaggaaggaaagttcagtcaattttttccatactttatgcttgatactgaacaaggaatctgaggaagaaaaaagagaacgctcaccgatattgtcctctgatgtactgctcaggccccactcgacgttcgggttccaactcagatcgctcggcttacttgtgtgaccaccatggacgaacaatagctctggcgggccatcgtccgcgtcttccggtgtctgttcatctccgatcttggagagatcccaaatattgacccgacgatcggaggacgaagacgcaaaaacagtttcgttatgaggcgaccaggccaactggatcacctcgtccgagtgggactcgaaagagtggagtttgacagataactttcggagatcccaaagaccgatcgtcttgtctccagaagccgtcaacaaaaggttagatgaactcgggctgaacgctaccgcgttgatctcggcctgatgggcctcaatctggtgtctcggcttgaccgagccgtcctctctagtgtcccagctggtgcgcgtgggtgtagttgaaggatcgatgttcaggttctacactctttctaacaaaagagtgacaagatagatacaagactccatactcacatcatcaactgtcgatcgtctccacaagaagcaaaaaggtaatcatgctcgttatgccacgcaacatcctggacagatcaagaattaaaatttgcacaaatattttctttagagtagacatcgaacacgagagtgacagaaattagagactcacctcaacgatagaagtatggcctcggtagactctgatgggatcgagcgagttgtttgttttcgaatatccattgatgtccctagaagaggcgcacatacacataccggttgtttagatagttagttcttcatttccgctgtccatcgtcaagcaagtgtctcgacactttcccacttaccaatggcaaacggtggtgtcctctgacgcgctgagcacgtgtccgctcttgacaggattccaacagagcccgtaaccttctttgctctgtccctttagtcggagatctggccggcttactccatcggcactggcctcgcttgaatgctttgtccggtcaaacacacagacatcccctgataccgtctttgtagccaacaagtttggattctggggcatgtaccgagcccggtttatctccccatcatggttgatcgtctgaatggccgtgactctggcggaaggtccagcgtgtgagcctaattctcctcgatcttcatcgtattcggccaatccggacgacagagacccggacgacgcgtttgggatctggacctgggcaataattagttggtcttgagcctggccagaggtatgcgtcccgagaagaagtcgatgcagagtatagtctgcgttgggaggcctagagacagaatgagtttcaataatattattttcattcccagcagggatgtatgtgttggatcaaggaaagtgtaagagaaggaacgtacgactcgacgtcgggaaaccattggcaggtgagcgatggccaggtcatcgcgtgggttaatacctggtcgtacaagaacggagtgttcttcttccaaatcttatactcctgttgaatgagtaagatggatagagaggacatgttcaacatcttccgcttaatgtctaagaccagaacagaaagatgcggtcccatggtgtccatctctctgtattcgcctctctttagttctatcctctacttgatctttcggggctctccacgttcatagacatgccctcttatttctcttgatcgcaagacaaaacggccgtcgcatctatccagacgagacactcatcccccttgcgtccaactttgtattgtacacgcttcggtcacacaaatgcacaacgtgcaataaaagctaggtgatgcagaaagcagacagaaggtaattcattcaaaagaaaagtttcgaaagggctccaaacgaacctcattgattacctggttctccccagaaggatcgacctcgtcatcgtccacctgaataggcgcaagggaagaagccatcgtgtggtatgtatgtatatgtgtcgtgggtgagggatagagtgatgttgatcgactcggacgcgccgttgttttttccctctattagtttttttctattagacaattgccagatttcttctaatcctaatctttccaacttttcacgaccttcatctcttttcacccaccttcaaccatcccataaccggttccatctttcctctttcgctctcctttcttctctctcacgtccaagcaacatggactcagacgaagatgatgccttcctatatggaacccctacagccgttgacacgatctcctcagctcaggttgcggcagatgccagctctaccgaaggaacgaccgtcggaatcacaacgtttaactctgagaacaccggagctggatacaaagggagcacagagacagccgaagaagacaatgaagaagaagaagaagaatacgaggaaggaagcgaaggggaggaagaggaagatagctctgatgatgtacgtcgccttttcctctcgtgtctcctctctggatacattctcatcggtcttcttacctcctcgtcctctgttcgacatatctgtttcatgtttatatcgacatgtgctcaatggcttcgttcgttttccatcctataggatttagagattatcatggatcctaccgctagtcggacattggatcttcgaaaagcgccttcaaaaatggtcaccttaggccacggtctgggggcttctaaggccgttcctcctgtcgctagaattcgttcgtcactcgctcttcatccatatttgtttaagatagtcttcctccgttaattcatgagcagacctcatactcatgactgttcacatcgcttccctgactgaaacgcaacaacagccggagactctctcactgattacacaccctcctcccgaccgaccgtgacatttgcacctctccctccaccttcgacacaatcgaccacgcttccgtcctccctgccttctcagagctcggctcaacctcaacagacggctcatctccagccccctctggcggctcctcagccgacgccgaacaacccgttcgcacacctacccccatatcttcagacacacatgaacgctcatctacctccttcacatacagcttcgacggacgtacctgtcgatctaaacgcccctccgttcttgccagatggaagaagtgtttatgaaattgacctcgaacagatggagagaaaggactggagggcacctggggcggacgtgagcgattggtttaattatgggtttgatgaatttacctgggggctctacgtccggcgcagacgggaaatgggggagatgattgagagtggaagcttgatggtaagaagtttctatacctctgtgcaattctcatctatgattctgagaaagacagcatcggaaagaacacagagcgtatgctaatgggttgatcatgtatctcaacgggctggtaccaatatcttgctgcaatgtagcagcagccccttttgccgacgttcaatcagcagcaacaacaacaattggagcagcagcagcagcaacagatgatgtcgatgatgggcggttttggcaatgggttccctgggatggacgccagtgggatgatgggcggaatgataggcggtggcatgattcctggaaacggaatgcccgccggtcctagaggtcagtatcttttcttttcttgttcttagagctcaagctctatatctgtggatttacagttcttcgtttaacctattatctctgtcgacgccaaaaaaacggggatgtgttgaattgcgtatatgcactctcagatctccaagcagaacaaggtttcatccccgaccaattcaacacccaaccagatcaacctcatcttcaaaatccgaacgtgatgcgtcatggagctcctaactccaccatcagcacccgaggcgcgtacgccgcctctcgcgggatgcgtggcagaggtggtgctcagtctaacggttctttccgcggtggaggaaatgtcggtcgaccaggaaatccaaatatcccgaccgctccttccggtgctggtgttagtctggctacaaaccctcatcagggaccaaataataacttgaatcctaacttgaatcagaacgtggcattcaattcgaacgtcgctccaccaacgggcccgactgggtcgtcaaacataccgactgctccttccggtactggaaacgtgacaaacgcaaacaccaatgtaaattcacccgctaggggactagcccatcggccggttggtccgtctggttcctcgactgtcaatatcccgaagggtccgagaaatgccggagggagaaaagatcttgatagagatcgaacagagaatgtggaaggattggactatggtgctattagtggaggagcgccagcgccggcaccgacggcaacaataccgacagcaacacccacagtgataacgacaacgacaggaggaacgacggacgacaacagtcctctaagcggcagtcgatccgaacgatcatcctccagccgtcgagaatcttcttcaaaggacaaagaccgggaacgagaccgagagagatccgatcgggatagagacagagatcgaaacgatcgggatcgatccgagagagatcgggacagagatagagatagacattcctcctcctcctctagacgcaggacggaagaagaaaagtcgaaggaaaagacaagtagctcgtcgagtagtagtggtcgatcttccaggcgaagtggagaccgagcttcaggttcaggttcgagttcgagggataagccatcaggaagctcgggcagacatcattcgtctaggaaccacagtcgggagagagattcgatcagagaggaaattacagaggatggtgcttccaacggaggagattccgtcaggttcgttcttttactctcttacccttccctctcgttcatccgtatcactcttcgcttggttctctttgtgatatcatattaactttttctcttttcttcttttctaaagcagcagtagaaagcgtcctgcatcacaagaaccagaaaacgagaacgactcatcatctcgaacctcaaaaaggcgttaaagaagactactttttcttttctttcctccttcttccccatctcaattgtatctatgatcgcgtctgttttggagaagggagcaaatctctgcaaatgattgattttaatgaacctcatgtcgacatgatttgtcttatgcacatacaaacacattctttctctgatcgcagtcgatagaccaagcatagcgacggagggtggaagaaataaactcattatgggacagaaatggacgaaggaaaagtaaagaatagagaatagagaaagagaataggtagatcaggatagactgtaatggcactcgatctttgtcagtctgatcaaatccgagcaccaccactgcttatatcgattaacgccgctcctacttcctgttcgtcaatcaacaaaccccccacaggatcacaacgttctacacccgacgtcatatccacatccatgtcctctctctctcccactccggcttcgtcttctacttctcgtcgatgttgctgatgatcaagctggtcggtcatctcaactggatgatcaaacgggttataatcttctcttctctctctatcctcatcgtcgtccttcttctcgccgctcttcatggttcgtccaaccccattcccgtcaccatccggcgggatcatggcgattgagatatcgttctcgggatggacatacgagccgcttggtgcatccgatggatgatcgacagattgagattgagacaacggttgggaatgatgacgtcgagaagggttggctgacgggtcggtagaagaaggcgttcggtctcgtttggcagggatctgaaattaggaggaaagtgatccgcaaaaagaaagaaaaggaattactttggaattcctttgtgaaacaatacatgtggagataagagcaaaagacgcactttgatggcctctaatgactcgggcacgctctcgcccaatcgcttcatccttgtcttgatatttcgcgcccgatctttcaacgccactctgttgtttgaatattcagaaaatgtcacattcaccgcctctatcaatattctctgtcttgtgtgggagagcttgtattcgagacacgaagggacaggaaccaaggggaaatgtatatgactcacgcatttcggttagagagaatttgggagaccgacccgttaggaccatgtcgatggattatcgaagcccatgggagcgtcttttcctccttgtattccttcatctcgttcagcagacattcatcttcctcggccgtccaacggatccttccagtctggtttcgtccggtaaagtacgtatagcctctcccttttcttgcttgcccctgtccttcgcttgaatccggattgacataaccttcagtttcaccttccatcgaagctcttgtcgttcgttttcttggttttttgacttttacttgagatgatgatgaagatggttcaggttgtgtttgagattgagggtacgcgtgatcaaccgtaggtgaacgtccgggtatctgctggtaagatggtatctgtttcgtgaataggcttaagcttagtcaggtacacgttatcgaatgtcaaaagtacacgaaagatggcaagaaaagaacgaacttgagactgaagaaggctaccgtctctttggccggctgtaaggtgacatctcatggtcagtcgatatttctactcacaacgaaataaagttagaaatcgtgggtgaagatccataagctaacccaaaataaaagccacgttctcaagtatctctctagccaccgctccttccttgtcttccgcgtcccagccgtcctttctctgagtatcctggccgttcaagtctgacgaaaattctgaaagtttttcttccgaaaccaagactagtcggtccgaaaggaggttgttctcttcttccgtccgacctagttctccttcctgttgatcttgttctccttcttcgtctgcatcctctcggtcaaactgtgtggatcgggtagaacttggcctattcttcgagtgctccatcatgattgaatcctcttcactctgattctcgccattttgaccaaagatgaaagtctcgtcccgcgaaagagctctgccctgataagaaggagatggcgtgcctgtcaggataggtgctgaaggttgggtttcattgaagttgaacttgtcgactggcctgtagaagagaatgagaagggtgtgatgagtggcagaaacaatggttacaacgatataaagaggtttgagaaaggcaaaaggaagacaagaaaacagagaaagagtggatacgcaaccgagtgaggaatggcttatagattgaattttgaaggaacgtttctaaacgagaattgagagcatccagcgggaacttatccccaagctcgtccggatgattgatcttttgtacatatgccggttatcaagtaggacattaatttgcgcgctttctcggatagatcgttaatcggacgtaccaagatatcaactctgtccgctacattatcctcccagataccacccatggtttttcgttcagcggtggagcggaaaatgccttcagccttagcatattggcctgacgaaggcggtgggtcgagtagcgcggtagaaaagaacgtttgaatgagatcttctccctccatcgtggtatcatctgggcgatggatggccgactgtcatcaccattcgttagtaaaaagcttccacagctacgtgaccatttctccccttgacttccgtttgttcggaaggaaggggagtaacagttttgattggaaacgaaagagacaaacctgggtacagatgtcaagaagcacatccaaccaatcgctcaacacctcttctctccatgccttttctcttctaccccttactaaagcgctctccacgccagccttttggttgacagatgggtccatcgacgcgtccatcgacataggtcggaggggacaaatcgaatgaaggaaatttgtcgatatggtctcgaaaggggacgcgtcggacagaggcagagacaggatgaggagagcgagggaggttggatgggccgtgcccggaaggaggggcggtaggggtacagagcggatatctatggagatagaggggccgattagttaggaaccattcccttattttataacaaaagatagaaaatagactgaaaaacaaaagggagagggacatactctccaacgcttgttgaccagctttcatgagttgctcgtctttgtgaaaccacccctcaaggatcatgctggttgggtcctggttatgtttaggctctgctggttctaccgattgggactggcgtgattcatctggctgatctgctattgagggatccacgctatcacccaacccgttttgtacgtgttgtttttcatcgtcatggtgagcttggtgagagcctgaagagccagatggagaaggaggggcaggaacggtgttcgaaagaggaactctcgcggtcgaacgggtcgacctagacgaaggaggagccgctgtgcgagccatggctgagacctgtctggactggatggcaatgagtgaagaactgaagggcagaagcgtaggaaagaccaaaagaacgatggatgtatggtttatggctcaagaaggaaacagtggattctgccctctcttgttctttcttactctcttgataagattacagagctgaaggaaacagtgaaggtgagaacgaggggaggcaggtagggttgagcgccacattgggaagaccacgtgagaaacagggtaaaacaatttggacagccatgacatccgattcaagcacagccacactgaaccccacgcgtaatcatctcactccgacacttatatccacctggaccgtatctcatccgtcgtcaaccatcattcactcaaacaagtacacactctcgctttcacattcacacacaaatacacacactataatgtctcaatcagccaaactggttctcttaggcaagtctttgtcatattacattatgaaaggagctattcagaagctccttagtctctctttctccttctctttctttattccccttggcagcaagctccacttgcagtatatcttttcattttccattcccaactcttctcatatccttccactgatctactgcatattaacgtctgtctaatatacaaacacaactctgagatattgaaattctttcgcttgctctgctgcttccttgcatgggcggggtccttatcttcataattgctacattgctgattcttcatccactcttgtattgattcatatgtcctcttgttaattctgttaatttcatcttgtataaccatacaggagaatccgccgttggaaagtcatccctcgtccttcgttttgtcagagatgagtttagtgattttcgagaaaggtatgttgtcttatatccttggcttctcatcgtctggctcgtgcttctacgacgaggccgatcgatgactagttaagaccgggcaaataaggcgcgtttcttccgataccacagaaacatttcaactaattagtatctctctcttttctcccctcttctcttctctcgcccagtaccattggaggtccgtcgttccttatcttgtagtgttcaccttccaacgagatctgccctttagttaacctcgatggacgttccttaaattatgttctcaacacatacccatcggtgcttaactactgccgctgcaacaaatcagccgctttcctcactcaaacacttacgttggaagagggcaaagtgatcaagtttgaaatttgggataccgccggacaggaacgtgagtagacaagacgctccggttcaagattatgaacgacttggtctcatagagcatgcgttaatctctgaaatgtcctctttactgttcttggttgaaatctgttcaggatataaggttcgttcatttttcggggtcggcgcactgcgagaaagaaagattctgacacaaattgttctctacagagtttggctccgatttactaccgaaacgcggctgcttcattgtatgtacattcttcagcacaagatctctcttttgtctaatatgcttactccgatgtcacaaattttagagtcgtatatgatgttacttcgccgattgaccagagttttgaggtatgctccttctgtcatgttgtttttgcaagccgacgaagatggtggtagaaaggtgcatgcccgattatctctagttctgacgacatcgccgctcttgggtatcaatctacattttgtttgcatcttcgctctcattcttgaaaccattttgatgggatgatcgccaacagaaagcaaaatcctggattcgagaccttcgtcgacaagccgacccatcactcgttatcttactctgcggaaacaagtcagatctcgaggccaaacgacaagtcccgaaagaggttggagagcgatatgctcaagaagagggtttggtatgttatttggtttgtttgtacgcaattgtgacggatgaagcccatctcatttacgtatcccttgtatgtttttattttattggacagctgtttgcggaagcaagcgccaagactggagataacgtcgagaatctttttagagagattggttagtcgtcttctttctccgtcttgaggtgttgttcgatatgcctgattcttcgcttcctgtcttacatgtataaacagccaagaacttgccagcaccacctcagcgagtcaaggcgggagggtcgggaggcgtaggaggcaacgctgcacgagctggagttgatttgaacgggaaagacggcgcgggagatagcgcttgttcttgctaaatacatcgactcgtctctttcttcttcacatatttgcctcttccactagatatccctaactcagcacgttcaattgggaaccttctgaattacatcctctcgtctttcactgtctctatgtctcaatgaggtggaatttcatttgttcctcttgtttctatcttcctcttctcatcagcagtgcggcttcagccgagatctgttttgtatcttttgacgtctcctctcatgctttatacactcttgcacttttcttggtcgttttatgtcttctccgctcatcgttctttacgctttcatcgttttatcatggctacttgattcgttgtcaatttcgtctcttttttttttttttttt

SEQ ID NO: 1617 - DNA, 19680 bp, Xanthophyllomyces dendrorhous
ggttagggttagatcaagctggtcatcaacacgtcagttgcaagttgcatcaaacgtcgaccgtctccgcatactctctccggatagcccttctggtgatgccggtactactcataccacttctcttcctctcagtgtaccttctctccaagagcattctggtcagataccgtcgaaaagtccttcgacagtctgccataaaccttcaaactctcctttcgtcaacctcctcgtcatcatcactcggttctggttcaagcatcaatggacacacggtcgttggtctcttccacccattctgtaatgcaggtggaggaggagaaagagtagtctggacggcggtagagtttatgcagagagttagtaagaaagagaaggaagaaggaaagcaaggaggtctacagattctgatctatactggtgactggcctggagttgcaaaggatgagattttagaccgggcaagggtaagcgaaatattcattctcgaggcaagactgataaatgagaagaagagaccattaaccctttctcttctctctttgttatctcatacgtattagtctaggttcaatatcagactcgacccagcgactgttcacttcgtacctattcggtccagagcgatgatcggcgattcttactggcctagacttactcttctcggtcaagcttggggttcgattatttgcgcttgggaaagtctagcaggtgatcgagggattgtgcctgatatcttcataggtttattcttttgttctctcttttcaagcgaaaataaagcgatcgttgactaagaaagaaggtttatgttctatctcaagatacaatgggcttcgcttttgctttcccagttgttcgtcttctgtcgggatccaagatacccataggcgcctacgtccactatccaacgattaggtcagtttcttattacttcatgccttgagaaactgtccatcaagatctgaccgaattaactcgattgaaacttcttgtttcctttgggggttaaagtactgacatgcttgaacgcgttcgaacccgtcaagcgacacacacaaacacccatgttgcatcttcctctatccgatcgaacttgaagctcatctactaccgctttttcgctctcctctacacatttgctcttgggcttgtcggtcctcaaggtgtgatctgggcaaactcgacttggacaaaagatcacttagtaaagcttttaggagaaggaaatgatgtaaagattctttatcctccttgtgagacgggcgcactgagtgcattggagcttgatcctgggggaaacggacagagggagagagtgatcctaagcctagcacaattcaggtacccaagcttttctacttcctcttccaaaaggttgatttgcagggggttttctgactctttgtatcgtctcttttttgtattgggacgaaaaaggccggagaaggatcatccgatgcagctacacgctctagcagaattgttcgctcgaaaacctaactggaaggagaaaggaaaagaccaagtcaagttggtgatggtgggcagtgttagggatgaaggtgatgagagaagggtgcagggcttgagagaattagctcaaaagttggatttacaggtagtgtgcctttttacatgttgttctaggtttcctcctgtctcgatttgaacagaattttcttgatttcaatcgaattacacgaaaaacgacaggacaacctggagatagtggtgaacgcgtcataccaagatctgttgggttggttaggaagatcttcagttggaatagcgacaatggtggatgaacatttcgggataaatgtcgtcgagtttatggttcgtcttttccctttttttactctgttttttgagcgtgtctttgtgcttactcgtctacacccaactgtgcgcgcacaacagtcagcaggtctgatacctctctctcatgcctcagctggtcctttactcgatatcatcataccctatcacgaccttcctaccggctaccacgcgaggtctgcatctgagtttggtgatcgtctcgtcgagattttcgaattatcgcagaccgaacaacgagatctaaggatacgcgctagagagagtgtcagacagaggtttgggagagaggcgtttgaggatggatggatggatggatgggagattcttaggcaggaactgaggaagaggcaaagagaagatgaacaagagaagagacaagagaaagggaaactagattgaatgacgatttgatccttaactcatttctgatgcttcgcgtgaaagaaatctcggactaaaaaccaccgctcgaaaaaaggaagaaggacacagtggacgtgctgtacaaggatacgacaagaaccattattgagacaaatggaggggagtcattgtaaggtgatatttcataatggtcttttgatgttcaaaataatcacagtccaatccctcctcccataccggtgatacccgtcgtatccctggcccttgcaacttcgctctccgtcatcctacttttcaaacccaagaggcaaccttcccagaacccttctgcgtcctgttccttttcgaattgacccaatccaaaggtgtgaagagcctgccagaaagccggatctgccaagcgctgtacgagtggtaaacaagggagagatcgaacgaatctggtcagtgagagaaatgatgatagaacaactccgttcgaatacaaggcacatacagcatggaaagaagcttctgcaggatggaggtcatgcgccgatgccgaaggttgcgtggtagttggcagaggaatcgctgtggatgaagtatctgtcgagattgtcaacgttggaatcgccgatttagccgtcgggtcgaccgggggctcctccgacttgatctcaccgctcgctgctgagctctgtgcggaggagtctcctccagggatccaacctgctttgatcatcaacaccaagctggctccatcgacgatatcatattctttcagcaacttcgaatctgccaaggcttttcctttgaggagaagccgttggtgagatggcggaggagcgtccggctgggcggccaattgtgatttcagagaagagatcgggtcggaaagtgaaacattggaaagatggtaaaccaaagcgggcttgagtgacttgacagtcaaagtgatggagtctgtcgttattggttcacaaaaggttggtcaatcatagcggcacaattcggtttggaaaggaagcaatttgatgaacaagacaaatccggcatgttgtagatgcagaacataaccttcctagctgaaacgaaagagtcgttcatcttgacgacatccaaccccgatccttttaattgcatctatgaccgtgatctttctttgcgttgaacacactccctttcccatacaatatatttctcatctcactcaacagagacacagagtcacggtgatgccttttcggaaagcgagaaagagaacacgacgataaggagcaaatgcgaagagtaggtccaacgaaccttgcgccggtttggaatctgaaggagcagcttctacagactttggtaactcggccacgtcgatagttacaagcggtgcctttctaggttttttctctgggggagtctgaaagtcatcagggagggcgatcggctgagaagcgatcgtgtcgatataggatcggataaattcgcgttgatctatggacatgatgtcaagtaaggccaagagaaaggagatggtgtagaaggaaggaaagagagagctagtggaggattggcaagatgatagacagcggatgacaaggggacttatataacatcaactcgaataatatataacagcacatgctaattttttcatccattcagttcctcatacccaactcgtccacaactcgtccacaacatcgatcgtatccagccaaatccagagagaacaaacactctctatttacgccatatatcctggaaattgaaacgcgacacgttttcgagcgctcgattgatgagaggagtgatgcgcgatgcgcatctcaaactgtgacactcttcttgtcagagcgtatgtatatacggaagagagcgcatatgattgaagaatccgctgatgagtctgcagattgaatctgacagattcctaaattcctagccagtccaatgtcttctgggcttgttcaggtttcccaggatggacatatactcaaagcggccttcagaggtttcgttttcagacttccgtcagctgagaaagacattacgcacatgcacacagtcaggacggaaacttctttgagtccttcctcctacgtctgctgtaggctaagaagagagatggtaaattctgacatatatatacctcatgataaccccggaagcaataacaaaacaatcaaaagaagcaatatacttggtacagaaacggagagaggagcgaattgggtagatatacagattgacgattatatgctcaagggcagacgactttcagatacatcaccatcctcatcttatccattctcgtccagtgaggtcacgcttgaagcactcgatgttattggcgtcttctctcgtcgagtcgatggagtcatcctgtcggacttttctagatctttctcgaacagagttcttgtcgagcttgagctggacaatctcggatctctatcttgttgagcgaacgttgaaggtggagactcggaggattgattcctgcggatgttccagcgccgatagagaaggtatccgattaatgctgaaagaacaaggcccgttatgatggttgagatgatcacggcgattagcaccgatcgcgataacccagaagaggtagtcccatttttgattgaagcatgagtgtgtgagctcgaagcaaccaagacggaagatgatgccctaggcattgggtagatagtggagaatggaaacggtcgaaaaggtgctctatcgaccagtgtggctgcaggaaaaagtctattcggacaaattcgatcagccaagaccgccttcgtaagagcagctggcaggatatgataattgaagattcaggagaggaagaagcacatacggtgacatgttgtttaccttcgttccaaccaacagaactgtcgaaaagtttgagtggactagggtaagtgagctgaaggacgaaactgaacattgggaaaggcttctgaaggttgatacttataatcgtttggttggtagacgagtgagaacctttcttaaaggtctgctgtccatctgtatacatacaccaagtcccggaaaggtctagatccatgcactcgagaagaggaacatgccgggtttgagattccaggagatacaataggcaaggcgaggcgggcgagaagagtgaggtacatgctttagtgcgacggcgtttcgggctagccaagcatagaaaatagagtgaacggacgcatattcaaacagaagataaccccatccgagactcagttttgtccttcttcctttgactgaccagacggaggtcttgagagttgtatgaatggtcgatccgatattcatgccagagaaggaaattcacgtgtgactatgtatcctgctcccttccctcgacttgtgaagccgagaaaatctagcagatacaacgacatacttgggcggccttgtttattatccactcgggagagggatctttatgattgccatttcatcaccaacagagatgtatacactccatgaaagtctttctcgccgtcagcccgataggttttagggaccgattagtatgaatgtatgttctgttcgtgatcggttagggatagaggtccttcggctgagggatgataagataacagcgtgaatcaaaagggttcacctcagatttacgtcatgagatgaagaacctttctcacctacaccgtccactttcccaacagatgtctctcaattggactcagatagatcattcttcactcaggccaatccctctgccgagtaagtccttcctagttgtcgggcttggtcagattgctcttgactccctgtatactgtgtctacagatgaaatactcttggaaagcttctctgggatagaccttgagctgaggcttccggtttcgctcatgggacctaaggttggttcagatcagtcttagtcttgtcagatggctggacgcttaactgtctttgggcctaataatctgtctagcgaaccactcgatcctctggacagatacatctctcaaatcaacgtgtaggacaacctcgacaatacttgagatgtggcaaagatgttcaccatactgatcaacgcctatcttctatcatcgtccaggtcatctttgtgtcatctacagcaggcttatcccctcctgatgctcctcctccttcgacatcatccgcttctgatactctcggatcaagctccagcccagtggtaaaacaaccttcgacagatgccgttgggttgcctatcttcttgaagagtggtgtagaatagtaagaaccgtctacttaggtttcgggcgatcgaaatgtctctgaatcaaaactgatgctcaaatttctgcctggccaatatttgattgacaaccaagtgtatcctccttcctgtctattcgtcagccttcagacacctctgctgctgaccctcaaatatccacgatctctattcctcttgctcaactactcgatcgcaagttcaaccaaaatctttttgacagtaacacggtctacatttcatttcgtcctacctcagacggaggcttccccagttctcgacaaggtgtagaatcaatcgagatcactctagcattcaaagagggccgggtatgggagctatggaaggcattggaaacttgtttgaaacgcgcttatgccgatgaacttgagagaagaaggcagaggcaacacggggaaagcctgcgtgagcatcttctctttctacttgacccaactctcttcttttaatcttgcactttctaatgttttcacttctgatgtcactttctagccgcttatccaggttctatataactagctgtttctctctctctctctatatctttccatatatgcttcttcagaagaattgcatactgcacatgtatatatgtacaaaatatccaagctctaatttctctttctctttcctccgcccccacctccagctccgtccttcctctttgcgaacttttccaaagcgccgacatcggcgatctgataatctcccgtaccgacgacccccaacacacctccgctctttgtaagccgaccctgtcttctgacggcctcttgcattcgcttctccgcgtctcccttcccttcgtcgtcgtccctgtcccacttggagccagccggtcgaacagcagtcttcttcgcggcagacgaacccggcaaggatgaaggcgcatctctgagggcaaacgctttggcgagatgaccaaggtgaaggttcttcaagtggaagaaccgtttctcctcggacggatgggtcgagtatgatcgaacgtaagattggaatgctttttgagcaagcgtggcattctaagaaataattcgagaaagaagaaaaaagtgatggaacaagaagaaacctcagtttctaaactctgaacaaaaggaacccgaaagatatagaaagatttggatagaaccggaaagaacacgaaccttggtctcccctagaacccatcgttccatcgcgccctgaacctctgtagctcgattctcccagttctttccacctcccaacccaaccttgaccacaccctcgactccgacaggtttcactctgaccccgccacccatctttccttcgatccagggcacccaatcctcttctggcccgtttccaacgaaacaccatgcttcacctccttttcctactcgagctgttcgcccgactcgatggacgtactctgtgacacctccttctgtcggaagatcatactgaacgaccgcacggacgagcggaagatccaatcctcgagaagcgacagacgtacagaacaacaccgctgacgtaggcgaaggcgtggcgaacgatttcaatgaggccaatcgagtctgaagtgggagcgatccatgtaatcggtgaagtgttgtttgagggaggagtacagatgattgggtgattggttcggatttgatcgccaagtcttttttggatgtttttggcttttttgatttctttttggaagtcgtctttggttcagctatttctgactcggaggatgagactgcagcaacatcttcttcgtctttgccatcctcatccgagtcatcaccgtcttcgtcgcccgatctattctcttctccatcttcggtctccttcttgccacccattccaattccacccaacatcttccagtggaaatcaactgagtcagtcgtgctcagaaagacgatgactttcttcccgacaacctgtcctttggcgtccttgatttcctttttaggggagcacaacgatcgtagaagtgcaaccaaagtgacgagtctcaacttgggaggaacgacgatatgagattgcatcagttgagaaggaggagtgaacttttcctcttcctcttcttccacctcgtcttcctgcgcttcggtgtgttcctctccatccttggtaaccgtggaagattcgacatccttcttcttggaagcagtcttgacagccgacaccaatttgtttggattttctgccactcctcggaacaccttgggccgcacaagtgccacacccgccagcgcttggacgtcctctctgactgtagccgaacaaagcacggttcgtcttcttatatcccaatcccatccaccaacggtacctcctcggcctccatccttgagactctccaacgcgagctttcgtcgaccgtcgagagatttgaggatacccttaatggtttcctcaaagccgagatccatcaatcgatcggcctcgtcgagtacgagccatcgaagctttgatacgtccagtgatgtggtattttgcaagtgatccaacaatctaccgggggtagaaacaatgatgggcagtccttttcggagtcgggctttttcatgggttcgagtggatcctcctgtaagaagaccaggaatcagccatcgggtcagcctctgttgaggtgcggcgacgggggtggccaatccggtctcgtccgaggaagcagccgtcggaagggaaagattcatcgatagcagaccctcaaggacgtcatagatctgtttagcgagttctcgagtgggaaccaagatgatagcaagcgtaccgatagatcggtcgatataactctgagaggaaagcgggaggagagaatgaatgattggaagcaaatacgtcagtgtctttcctgaacccgtttgggattggatgaacacgtcttgaagagaagcgggtgaggttgaagaggcttgaagcatggaaggaagagcagtgcgttgaatcatcgtcgggttctcgatcgacatcttggcagataaatggtgagccaaaagaggggataatccaaggtcgaggaacgaggcggaggcagatgccgagggtataagagaggtcgactgggtggttgtcgaaggattagaggcaagaggcgcattagaaggttcttggaagcttgaatgattgggtcgataatccatctccgaatcttcttcgacgtaatggcttttggggtttgaagtgaacaaagaagaaatgatctgtttcgggttaattgctcctccaggagcctctgccgactttgtggcgcctgccttagagaccactctgtcttcatagtcatcctcatcatattcttcgccggcgtcctcattaaagtcgaacttcggtcgcttggatggaggagcggcttgtttggagagagtaccattaggtttgtaggtcgatgtggtagctggacgaggagcaggtgcgggtgcgggcttggaagcaacagcagtggtggaagcggcagagatgggcttatcaaagcccaagctggacgaaggaccagctgaggaaggtttgttactcttcttgggaccgttgttcttgttggctttcactctagaaattaaagtaggtatcgatagaagcataaaaaattagtacaaaatagaaatgcaacggtgtacaagaattcaatgaaaggagaggaaagggaaggaaagatttgactgaccggtctgtccatcggccacctttttgctttggcgccttagcagctgattttgaggacgctgagggtgcagcaaagttgagcacgaagtcgtccatgatgatgaagtttggtagtgtatagagaagagagtgtagagagtttaacgaagaggaaggcaaacagaaacgaagatttgaatttgatatttttgaattgataagatctacgtaaggtagaagaattaggcctcattatcttatctatattgtaacccttcgattgaccgtaaccgctcaactccctactttcttcgtccttccggtccttcaaaggtagactatcctagaacaattcaagaagactatccaccagctcacacacacacgcacgtatatatcaggagtgacttttcatcatgtccctcaaagggaaaagccgtcgaatattcacaccggatgaagttccgtcaccttcgcctcaaccgagccagccgccttccatcttggacaccgttcctggtgaacttgttcgtatcgtttctcttgtgtgtttcttgttctcttgcatcctgcccatccgttcatctcttgctgatggtgaccgttactttctgttgggaacgcttcttccttctcttttctcgcaggtgtttcttcgagcattgactcatcatagacccctaggtctagaccgaaactttcacatggtaggccttttgacaactgtcaatagaggcctagtggggatggatggagctgaagaaggcgtgacgagtgaggagctttggaataagcttagcagtatgtggaatttagagagactacaagaagctgttcgtctgctcttctcactttctatcatcttggctagggtcgataaaatcatgctgcagacgcgtccaaagtttgctcaacatgcgccttgtctttctgaaaactcattatcagaacactccaccacaagtgccttctccgacggaatcattccatcttcctccatttccgacatttcagcccctgatggatgaacgtcgcgtacactctgcaagctcggtttccccgcctagccggtcagccaaggcagcgttgaaccgaaacaagcgagctcctagtagcgatagcagtctgagcggacctgaggaagagccagaagaagaagaagacgaggatgatgatgatgaagaagacgaagaggaggaagaggaagaggaagaggatgaagaggagatccctactcctgttaaaaaaagacggaggaggtaggataccactaccattctttgtcttccatggattgcaaggtagatttggatcgtgttgtactctttctgcatatatttgtatattatagaaccttcctcttaacctctatttcatcttgttgaaaattcagcaaaatgagtatacggaacaagaaacgaaggatttgaattcagctgaaaagatcacttgtgagacgtatggcttctctagcaagaaaaaatgaaacgtcagaggtagatgattctcggcgttcatctatttgactttcctacacaatatcacctctgcttcttagtatcattgatcactcacacacacatacatacatctatcaaccagaagtatgagctccacgcctgcaacaatcatctccaagatctggtctcggatcgctccactcaagttagcgggctcgtgggacaatgtcgggctcctcatcggttcgtccgacgttctgcttcgtcttgccctcctctcagatcatcattccatgcatgcttcgttctttctgctgatattgatctttctttgttttcatcttttgttgctccaatgctttgttagaggctccaaatattactcggatctccaaaaagattctcctgacaatcgatcttactccggccgtttgcaaagaggcgatcgacaaggacgttggtctcgttctggcctaccacccccctattttctccgggctcaagttagtttcctttagctcatgtcgcctttcgtctctctgtataaaatccgtcttgtttctgaccataatctgccatcttcctctatactttgggtatgtgactcgttctttctattcaccatcaggtcgttgacactcgcgaatccgcttcaagcctcgttgctaagactagcggcttctgggatatctgtctttagcgcccatacgactttggatgccattccgaacggaacgaacgactttttggtatctcctttcaaagtaggtctttggttcctttttcttcactaaaaaaaacagatcaacacacaggttcaaatcagcacagagttaacgcttcgcttcgctacgttgggtattgggttagccccatgctgatttgagaccctgctcgccgtgtggatccccaccttccggatttgaagatgctggcgttggtcgcatcattgaacttgaggagggtctggcgatcgaggaagttgtcaagcgggtcaagaagcttctggatctagagttcggttcgtcatcaatctcgacttttccgatttgttgccagttcatatggactgactatatttaaatcgttctgtctttgcttcttcaccctcgatatcttttagttcaactgtcaaaatcccccgatgcacccgagcttattaagaaaattgcagtgtgcgctgggtctggagagtcggttttgaacaaagttcaggcggatttatatctgactggagagtgagttcatcattagcttctcttataagatgtttatcaagcttgatggccctcgtttctgctaacaattcgactcatctttcttatcgttgtttaagaatgggtcatgtaagctaatatttgtctcatctacgagaacgaatagagtcttgagctgattcaatagcgccttggatcaatcacatcatagcattccttactggccgccaacgccaagggaacatccgtcattctgtgtaagtccataatcttcgtacatcacccctatcatctagaccaagaaatgcccgtcttgctctcaacatctcattctgtttaatctgggtttattcttattttaaatttgggcacgcgtcttccaacactgggactcttcgcaattcaggcggccattccaataccgagagaccttatctgagtaaagtccttcaagctatgttggaagctgaactagaggctgaggatggagcgggctgggagatattggtgagtgaggaggacaaggagccgttcatcacagtttgagtggccactgaagagggtgtccctctctctttaattgtggatgtgtaaatggtgtttctcgttggtgatagagggatataattcaaagcaagaaacattgtatatagtcaaatattttgtacaacagctgatggtcacacactatgggaaaatacgcttgaatgatatacaagcattcccgttttacaactggtgtgatttacaagtcaaacctacagccgtctcgctgccaactgctgattccctctttttcgagcacatatttcaaagctttgactcgacatccgtttgtttggcgacttttctcatctgtcccttgttggaccagatgtcaaccttggcgtgagtacccgaagcgacgagttgtccagtatctgcatttcggatctagatgtgagttttccgtagaggagaaggtataagctagagaaaggcaagggacgatcagatatggaaagatgtgatacatacctcacagcggagatttgatattcgtttcccgatattcatcgtgatcgaggtgatgatcaatttggttccactgtggtttaattgccacaccacacaaacatgtagttcatcagcattaagtatccactagcctctcctggacggtcggggacaagtcttacgctggctagttgtacgaaaggcacatacgtgagagagcgccagataaatcagatatatatatgcaagtgtgagctcactgacttgattcagacacagaattattctgaagaggaagggaaagagagagtccttactgctccagcatggaaaataacattcagatttgcgctcactccagaccaagcccatcgatcatccgacatgataagcatcatcggcatggatgtgcatctgttcaaggtgcgtccacataatccattgtttcgtcaatatcaccagcagattgatcgagtatcaaaatgacccggctgggtacaaagataatcatgattcggaggctcacacgtccacaagaaaagctatacatccaccatgaatagatgcacccgaattgcacatttcttataacccatcggatgtttccgagattccccgtttcaaacaacccaatggatttgaatcagtcctcaaatttgtacgactcggaggagtggttatacccgtccaaaagcttcaggactcacttgatgtaacttcaagcccacagacaacctcacatagctctaaacttttccgtccgatatcttcatcctgtgacactttttcctccggtatctctacaaaggcggaaatgatttctagacgagaagccacgtcttcgaacgcgaacgaggggttggcatgaacgagatgaagcttttcgatcaagtcctgtttatgatctattcgcatggttagactaaggaagacccgaaaatgataagtaggatgatggtgatgatcaaaggagctggtcagaacctccgatgaatgcgcatatatatccagtgatctgactactgattatattctaaacctgctccggctatggtaaataaccggctaagtcaccttagataaatcataaataatatagtccgtctagttatatttattgtgtaagtcgatcatcttcaaatcagaacatggcctatcgtattttagagaacaacacaaaaattctcaatgagagagacagaggggagaaggaacaagaagagacgctgataacacagagaggcatgagtctgctacactcgtatgatcaatcatccttcccaccctttcctgatttccttccaatcgcacctccttcaagactgacctcagcagtcgtgcctaaccctcctcgaggggaagattcagacttgaaaaccccatgatcactaacagccctcctgggagcgtttggcggtgttaaactcagtaagttgatatttctcgcattcgagttttccaactcttcccggaaagcgtttctgccaattagagagctcgatcccccaggcgtcatcctacttgggctttgaggcggaggtgacttaaacataggcgccctcatcggagaagacggaagcgaggtcggagctcgctcaccccatggcgagtagacagattgctgatttgctgagggggtgtagggacccgatggtgccgagggcgcaagcagaccttcagtgctccgggacgagctagatcgagagagagagagggtggaaaagagaatagaaaacggggtgaggattgtcttgccaatcgatcgaccagattgaaggtcattctgcgatgtcgttggtgcttgcgacgtgcctaagatatgatagaaagtttagcgttaaacacagatagagaactagcggcgaagtatatcatgactcaccgaatgaaggaagtgcgttatcgttggcgcttaagcttaagaatagatagagaggcataaaccatacgcagattcctatcaacaatcgaccgtgaaggtgattcagagaaggtaacatcagtatcaaaagtggaaggacagcgaaaaaaaaaaacaagtaagaagaatcacccaccaaaaaaggtaactacgtccatgaacccaagtccttccttcccgtatcctcgcatacctgacgtattagagtacgtaggtcgatggtacccgccacttactccgagccctccttgatttaccggcttgacatgttctgagaagtaatagaaccagaccaaatggtcgacgagcacgagcagacatgacgctatgaatgagggcgatgatagagaaatcagaggccatgttttggagaagttttgctggaagagttcgacggaggagtcaaaggtagatagaatccaaagttagaatgaggccaggatagagtagtgtaccgaaagaagactggaagaaaaaatcgaacaaaccagataaactagatggcagaagatggaaaagaagatcagcagtgccggcagcttgtcgaccaccagaaggatgagatggaatgctatgatagcctgattatcagcgtgtcagccgttcatttgaaggcataacgggtttagtgacaagaacaatttatctgacaaaaacaatgcaagctcacgtagaccgaccgcctcccgacgactttggcaagcttcgtgtgttcttctatgacctcggctatccacaataacccacttgctacagcaccaggaaagaacgtgtgtctaatcacttcagccccaacaaaagttcacagctactaatactagcaaatcaaggacaagggtgtatccagagactaaccaagactcaaggtgatgaacaggaacccagcgatggcggccacataggatgctagtgatgttgcggagaacgaagagtgaatagttttagagccaaaacctccagtcatagctaggagcaacgatcagccagagttttggagttgacgaaccagtatgaagggcggtgatcatgctaaacaataggcgtaggaaggcctacagagcgaagacaagttgatcgataggtatcgaaagatgaagaaattaggcgtgagtgtcttgaaggttagaaccgaataccaaggacgcgttggctttgtttaattcctgccttcatcgggattgtttttttcctgtaattatcatcacgatcatctaccagtaggccttttctttctgaatggaggatacataacatatgtttttgatcaacacagtcctttggtacggggtgtaagttcacctgtatacatttgtgttgtcttgcagaaccacttaagaaatgctcaactttccttcgtaaacatctctacttggactatctgcaggtggtttttaaatgtccatgcttctcacaaagctctcaaaccgccaagaagggctagaaagctagttccagggagaagtaacgcggacagaaagcgagaagtcagattagtcgttgagggatggattgtttgggtgagatctattcaatcagctacatagggagatcgtgtatcgaaggatgagtgtgcttatacataagccgaacttgagtagacagcattcatctttgccgaaggcctgaccgaccggacgctctactaccttttacccttctactcggagaccaagagtgcctttatgatctatctgatcctgtccagaacgattgtgagcttaacactataccttctagagtatgacctcttgtagatcgttgcttaccatcatttaccatgtctgtagggaacacacgctatttacataaatttaatccttccaacaatacaccagttctctcatccctttggactattgttctctctcatttatgtcttgacagaagccatggtctctcttctgcctctcgatttactgtcttctctgcgctctacttcttacggtcagcgtccatcgaatgcgcctccagaggaacgcttatcaattgccgaggggaagaatcaagtgaacgagattgttcgaggtatccatgagatgcaagggatggttcggcctctatccagacgagtaaaccagtttgatgggcagaatcaaactgttggcgttcgaaagagaagaggcgagttcacagtaccgacccgtccatcaatcactaaaaacaagtggctcgccgaaggatccattcgccttgaaaccacgcctccttcaacgcgggttcatgttcaaacaccatcgaaccccttgacgcttgctccgttaaattcacagtctgttttcgactctaaaaagttgatgtcgatacctcggctacctcctgccacttatgcttctcctgcgcacaaccaggcgcctatatatccctctcttttgctcaaaccctcacctcatgacaccaacaaaaacatctctgtgaatatacctgcgccgaataatgtttcatcggcgtatcttcctagtatatctccgagtcacccctcagtaccgtcttctccttcttcaaatttctgggcattgtcaccctcaggcctccaacaaagctccagttcggttatccccaacgctccatcttcgttgtccaatgacgggacatcttctccgctgaccttgccagtcttagctcatgcgccactccctgcccaacgaacactccggaaaaccccggctcggaaggctaaactcaatcgcattcagaatgagcttcatcagatatctccacctaagttttcgttatcatctaaggacgaggctaacgcttcaaaaagaagcaggacaactaaggtggtcaaggacttcgagccgggatcaagaagaaagaacgtagagactttagaagatgaggagattaaggaagttcattcgagtttactcaaggaagataacgaagagaaattggagggtcaattcctaaatgaagtgaacgagggatcaagtgggaagagaaagagaggaggagtggttcgtacaaaaaccaaagtgatggagcatacggaagcgaagaatgaagagatggaggttgagttgagtctagagggcggtgatatcaagcgctaccttccttcaatccaatcaaccacccggtctgcaacccagcaacggccaacattggtcgcccccaacgaaaggtccactcgtttcgccccatactctcggcaaagtacaatacctccattgaaaccgacaacggtctccgccgcctctagacgaaaagcctctgtcactacattgtcttcacctcaacttactacttcaacgcgtaactctacaacttcaagaagtaaactgacaaagacaaatgcttcttcttcgtcccgagccatccagacaagtgttcctccaaaggtacctgaggtacctgttttgtcgactacgtcaatgcataaaaatgcgcatgtgctccctacccgatctagtactcgatctgtagatacagtatcgaaatcaaacgctgcctcaaccactttgtcgccaaatgtgttgtcttctaaagcaaatacgacgtccaaatcatcccgacctcttgttagcaagcctagagttgcctctactcggtctagtgcattaaagcgaacgactgatctaacggccatcgaagcgcctatcaacttaagatttcgaaggacaaacggaagtgcttagctagacgtcgtgctatccaatgttcttaatatagatactagtaactgagggtgacattagctgaagagcaagtgccttgaatataaacagagccccagaagggaagagctaggatatacactttgacagtatcggatcgtctatcgaaccgaaggaggatcggacggatgagatcgtcattcgccacgtccagggcggtgcccgttcatggctcacgtgtggcctctgctcttggtcacgtgtgcttgccgtcacgtgtgctcgccatcacgtgagccccccagcccgccgtcccttcccccagttttcacactccggccggcagggggggtcgaccaaacgtataaag

SEQ ID NO: 1618 - DNA, 40272 bp, Xanthophyllomyces dendrorhous
ctgcggtcaccttgtggtcccgcttgaagagcacgaccttctcgagctccccgccctccccatcctccccgcccgcaaagcgaagcgtcttcttctcgaccgacggcagcccgtcctcgcacggcgtcgccggctccgaccgcgcacaaagccagtacgcatcgtgctcgttcgagtcgttctccccgctgtccgacacggcagccgagccgggcgtcgaggtcgaccgccgcttgagcgacggcttcaccagctcgcccgactttttcctgatcagcggcggcggcagcggcgcagacatgaccccctggacggacggccctcggctgccaccgctcggcgggcttgggatgtcgacccggagaagggacgtggccgagccggttcgtctgttgagaatgttggtcgagggcaagccggcgggtgatgaatttttccgtctaggttgtatcggcccaggagaggccgaggtgggcctaaggtaggttggcgtagtcggtgcagattctgaggcgggcgtgttgggactgccgtcgaatgagagaccgaggccgctatcgcgggattcgacctcatcagtgcctactgtcttatctgttaccgcccgtctgggcaggatcgaccctggaggcttcggtgggctgagaactctgacggggctggacgaagcactgccatggctccttgctcgacggggcagaccaggcatggcggacgtgagaggtacagccgaatgatcgtccgatggagagaagaaatagtgtgacctgagggagggagatgccgaaggcgttcctgaaggcgtagtcgacttgttagacagattctgctttgactctgttggggtcgatgacgatggtgctgttcgagtgatcactggaaccgaatgaggagtcaccaagggagccttgggagatgcggatgggtcgagataaggcatgtatctaatttaccggttggatctgttgtttgaaatgtgtgtgtggggaaagcaagatggaatgatcgattctgtgcggaaaggaggaggaagcaagcgagaaaatcgatgaccgtcagcatccgagaccggctaaacattctgcgtagacttttctcagttctcccttcgttactcgggattcagggcgggttggaaagcagatggatggtattcaaacgccatgcagagaaaaatacgacagaacgaaactcgttagatcgtcgtcgatgacgagagaggaagtgacccaaggtattgagccgaggtataaattgggcggccgagggagagggaacagagaaaccccaaggttttcctatgcttccccacagacgaaaaccggttcaagagtggggtcccccattcgaccgaggtccctctcgcttgaccggaccgtactgagccgagagaacagtctgggctgatctcatccggtgatggctttctcggctcagacgtaaccgagaggatgggtggaggggagagaaagaagaaagcaaatgggaaggagaaagacttacgagatgttgttggaagcggtacgctcttttctctgtgcgtgtatgtatatgattattattttttttgatacgttcgacaattgcttgctagtctttgtacaagaaaatgagtacccttttgatatattatatgaaaccagcaggggtagatgtgataatgtcagtgttgtgtaggaagctcgacgtttggtgcgacaccaacgaagagtggcaaaaccgaatgaaaggaaactcgggaagagacgaaagggaaaaaggcaatataagaagaaaaactccaatccaagctactcaccaaactaaagaggtcccttaagccagccaggtcaaggaaaagcgagtagagagatgcaagaagtagcaagaggaaggggaaacgagtgatgaaccggtggaagagagcacacaaaagaatcgagtgagcaccaggcgtggtcgtggtttgtggtcgacaggtcaaagagaaagaagagagaagaaacccagagaaagaaagaaggatgaaggagaggaacgggatgagtgagcagagttcagcaccgaggtcagagacctcaaggcacaaactctggtcagggccgaggaactgagaaaggcaccagtagaggggcaggcggtagaggaggaagaggctggaagggagacctaaattcaaatataccttttttttattcacccagccaggcagccagccagacgaagcctcgcagagtgaaagatccattgggttgcctccatcatttattccgtcaatgcggtcgatcgcgtcttttcctttcttcctgtcgccgcctcctctgtcaccagatatactgcgggcacacttcactgcgagagtctgacaatctaatatcgtcctgcctctctcctttttccgtccccaaccccatcccccaatgggaaagacttgagagacatcctatgaagaagtctcttcgtcttagctgcttattcgcgcaacactttgctccggcacatttctcccttcttccttcaaaactgttcttgtctggtacatttgtttcatccaaaagtcgaattgaatagagaacgactcactgtgttgatacgtgtgtgtgcagtcctttctgctgttctctttttgtttcactcctcttcttctctctttggactatcgatggtggatgatcaacagtaaacgaaagaagacaagaaaacattttatcggttgtataaagagtgtttgatcaggtcagaagagacacagagtaactaactatgacgaagaagaccctggtctcttcggaagggaaggaaacgaaacgaaacctaacctccagaaacaggcagggactgaacaaagaataccttttgaggacccgcgcaaggaaagaaacgctaacggtgtatatgggtctttgtctgtccatgtgtttgccaataggagagaaattgtgtgaatgtatacgtgtatcattgtctgagaactgtgtactgagtttgtggcatccatggtgtgtccgtgttgaccggcggtcagtcggaccgatcaaagaagattcctgcacatgtacaaacacaaacacgaccgtgcttgctgttaaagactccaacaggtagcgcaaggtgaaacgaggaaactgccgggcggcaggcatggatctagatataaatctttgtacgcgcggcaggatcagagataacacagagatagttggacccgagtcttttttatcatttaaattccccgtatatttaaaattcgaagagaggaaaacaattgatacgtacgagggaaactcttcgattgttccgaccacagagttctaatcacaaaacctaccgtgtcacatcagctactagcagcgaaagaaaggcaagagggccttgtgtgcaacgttcactaagatttgactttgagtttctgtcattactaagagaaaagaaagaaaagaaaattgtagaccaagcaggcgttcaagctcgccttttcgatcaaatctggcggttagttgccgattgatcgattaacaggcgtacaaggtccccctccctcttacgccacacgacccaagacagttgacacatcgcagatgttttgataaacacacgcaaacaacctttttcaattttcgctattctctcttgctggacgttcaggccatagtcaatccagatttatactccgcgtgcgaacatacatctatatacactacaaagaaaattctgatcgctttgaccgcttgtctaatcaatctaatcaaacaccgctgaccgctggccgctggccggtctgatccgcttcaccgcctcgtcgagtctaaacacgccgaggtactcaccaggcacattaggctgtttggtcgtcagatcataagaaagggtggaaataataagctaccggcgttcgctgtccacccttgccttcttctgagtctgtttcatttcatttcatttctatttatcgactatcactttcatttgctatcatcatttcatcatcataaatgtcgaggaaacccgctagaggaccagattttctattatttctctgcttgcaccgtatgctcctttattatcatttttttctaatcctttgatagtttgcctctgacaaccaatcatctggaagcaatggaaaggaataaaaaggctggatccagccaaaaggcgtccatttggtattaatagaatgatcggacaaattcaaaacaagagaacgaaaacaacagaaggtgcggaatggagtgaaatgccagacacacaagtgaaacggatttaaagtggaaaagggaaaaaaagtctatgatagtcgaccgagacagaccaaagaacgaaagtaaagaaaaggggaacatagaaaagccgccaggcggtcgacgtctaggggaatgtggatgtttctcttttctttcagaccagtaagaaatgagacgacaggtgaggcaaggaaacaagaatagagaaaaatgtccgaatatgcaacatgaaggatgatcaatagtagcagaagtgagaagggaaaaaactagagcaaagtggtcaagccgatgagcccaacgagcccgacggtagaccaacctcccaatctgatcgacttttcggccccagaaccagaggcggtcgacccactgggcgtagcggccgaacttgtcgaactcgagcttgcactcgcactggccacagcagcagaggacgatggattggcaggtgtggtatcagtcgaaccggcggtgatggtagaagcagtaactcctccagggcagagagtaccaatgttcgccaacgggaggatcacctgaggttgtccgttagagacggacactaccgacgctccgttcttgtccgtcctccaagacgtgcatgtcaagatgtcaaccacctcggccgcctcgggcaaagacgcgttcgacggcacggtcacgctaccacttccactggaccctcggttagaaagaatggcgagcatgggcggcttggagataacgatctcattggcgtcatagtaagagaccgtggccttgtttgtgtaaaacgtggaggatgaatttccggcctgcttcctagcggctgttaattttttgaaaagagcgtagccaataccgtcagtggcatagcttgaggtccacatcggttctcggttagctggatcggcaccgccggagaagccctgctcttgtccgtagtatacgatggggaccccgtcggtgatgaaagggtaggtatacgcattcccgagcagagctgtgtccttgataagcgaggccaatctgggctgatcatggttgtcgacaaacgttccgagcaaggtggtgtcattcattgaggatagcaatgaattgtgaacatcgaccaaagctcccaggtttgcgttcacatattggaaagcgtacctaaagggaagaaagggggggggagggaggcaaatgagttgggtgttcacgttccaaatcgagaactctgaagaggtttgatatgattcaagaaaggaaatggacgaataaacatacataatctggtagtagagagggtagttcaacacactgtccaatacatcctggtaaggagcattgtatgcgactgagccatcgaggatctcacccatcgtgaacactccagcagacgaggcgaaaccaggccagaaatcttttcggatatgcttgacagtatcaattcggagaccatcaatggaatagtctgaaacgagcgtcttgatccaggtgttcatgtaagcgacaatgctcgtgctctccgtgtcaatatcggcgagagccaaggtcgaggttcctaaccaacattgttcaacttgtgtctggtttttgtcatcggtgacccagcagaagggatggaaatcggcgctggtatcaaactctccatagtcggaggtcggaacgaaggccgcagaaccttgagtggtggccacatggttgacgaccacgtcagccatgaggtacatccctcttgtatgcaacgcagcggagagagccttcaagtcgtcggcagttccgaagtgtgagtttaaagtagcaaagtccatcggccagtagctgtttcaaaaagataccgaaatgataagaaaaaggtgttcacaatgcttggtggatcaaggaaataaaaggaaaaacacacccgtggtaagcctgaccctcagtcgtgttaccgatgttggaggtgatgggagagatccagacagcatcgaatcccatgccttggatgtaatccaacctggcggctacaaattcaaagaagacgaagacgagccaaaaagaagataacaacacagcaagtggtcagaccgcgtcgagcttcgtttgagattggacacgagaaggaagaaaggaacgtttgcgcgaaagcaagtatatgtaagaaagagaacacatactgatcccagcccaagttcctccacaactgtacgtgttcggaaagaaaacaaaggaagaaagatcgagttatcagtaacacgcgtcggatcttggcgaagaaagaagagactgactatgctttgtcggtagtataacaaggagtggtgagagaaccggtggagaaccgatcagtgacgacctgatagatagacttgtctcgccactctgctgcagagagcgcgttggttaatctgggaaccaaagtaagagaagacaaaagggcaggaagaagaatcgaggcggccggcatgatgagaaatgttggatatcgagggacgtgtagttagatttttctattccgacttgtatgtcggtgtggatgatgtacctgtggataggttctatggggataaatggaggagagaagggaggaggaaggaaagaaagaaaaggaacaatatggaaagggggaaagagcaacgtgggaaggaagaaggcaggaaaaagagggtgagaatccaaaagcaactgtatttgatccgaagaggcaaaggggagaaggaagagaaggaaaaaatgatggaaaagtgcgaaaaatactaaccagaacaactgccctcttttcctccaggaacataagttcctacaggaaggccgtccgcgttgatccgcggtccgaacctaaaagattcttctgacgggcgcagtgagggttgaggtgactgcctcgatacttgccgacatccttcgccgagccccggttaatgtcttccggtcatcagagcgtctatcttcctccgattgatccgcagttgatccggatgagctgtgcgtaaagcatggtgagggttacctcagccgatggtggtcgatacctggccattttagacttgggtgccctcagaccatagaccaccaagatccccataggtcatgggcttagcttgtgccaatttcagcctcatcctcaacagtcatggcagtctcagcagcagtggcaaacatcagcagcaccgatcagtgctcatcccggacgcttgtcctcgtcactccgacttctttttgtcttgcaggctgccgagatagatgcctccttggtggccggagatctcgtttgatcgggcaccgttctggtcggtttgactggctgtcgattatgatgaacagcgcggtaaaggctctacattccacagacagacatgaacataaagagagataaagtggcaaagtggcaaagtggcaaagtgacaaagtgacaaagtgacaaagtgacaaagtgacaaagtgacaaagtgacaaagaaacagaaggatatagaaataaagtcggaatccttatttttgagtcgcataccaacttctgcttgtttcaccaaaatatgtgtctcttatctctttagtttcttcattattagattaaccagtggcttgactagaataccttctgataaaatcacgtacgtctagatgcttcctcgttcttgactcgtttcgagaagtcgaggcgaggcaagaaataggaaacatatattcggctactttctcagcgccatgactactcatcctcatggatttctctgatgtatttctcggggttcagatctgacggatgagatagtcaagaagacggagacaacccatccaagatatgcgcaagttgcaaacccggtacatttttgtcctttccatctcctcaaatcgagtgaacgggacgctgatctgtgagcggaaacgaagtaacggatcgaacacctactcgtataccgttacttactgtaacgcacttccgctggttaaatttcttttgtttgtccctctatcacaactttttctctcttcttcacgatcaatcgttctttgccttacttttccttcaaaggtgagcatttgttgttgtcatttattcgtttcatcttcctccattcctcttcctttgaaacttctatcttctgaatagaatgaaccaaggagaaaaaggagatggaattacaacggcagatgtagggttgaaacgttgctttaaaatttgaactctatatctgctgttcttttttcgacctccctcatttctatccacccaaaagatgtcttatggtaatttgcgactgaacccctaaccgggctctgaacgacacttttttcgccacttcgccgtggtttgctgatgggcacactagaaaacacacattctgtcttgtcttggttgtgtatctctggacatacgtactgactccttcctcgttgttgtctttgttccgcaatctttattcttgtagtactctgtatccaccttattgatgttcaactttactaaatgattagagttggcctcagacaacgctctcaacatgacatgtgcacataaagtctaggccagtaggcctaagattagatagccgacaaagtgaaaaacagaaacagacggacattagttaacaccgtttcgccacgtgcgacacagagaccatcggtcgaagaagtaaaacagcttgatccaaaaaaaaaaaccgaagaagaatcttcatcaaacaatatcgtcaaacattctcatcgaacgttatattctagtcagacattcacatcaaacaaccacaacggctcccagccatggtcaattgctccaaagcatagtgggtagttctcactgtagcctggctctttcgagtgaagagagcgtcaagatttgtctgcttactccacattctttcttgacaatcgtgatcgatagtgaaaaggccagagagggtgacaccctgtttgcagcgggaaactgggatggagctctcaagctatacacaaaggcaacgtcctcttccatctttaggcatcgtaccgacacatctcgttctcacattcttccgatctctcaatcccatctgttgctttaggccatcgaacttcatccacaaggactagatctagagtaccaatcctatctatttgtcaagcgatcagacacttttcggctcaagaatgacttgaaagccgcttcggaggatattgatagggtaagcctttctttagttcattcctttacgcgaaacgaattgtcttgaacctttgaatcttcatcttctcttctctcctgagacaggctctgaaactggatccttctcgaccagagtgagcttcctccgactctcatatatcgcctttttgtgtcgactcaattttctccaaaacgactcacgttcttactctgggttcttgctttgggttacacaagcttcgaataccgacacgggattagatgtttccagaaaaataatatcgccgaagccattcgtagtttctcagaggtgcgttcgtttgttctccttgcacatcgtcccaatcaatccgacaaactgctgatccgtttcgtagataggcgatcaaacttgatccttccgaaccgacgtattttataggacgtgcgagtgcgtataacgcttccaacgagcatcaagccgccatcttagatctagatcaggttggtctttcgttctttctatttctcgtcctgtttccgtccttctctcctttgtccataaaccctccgggattgaactgacttttctcatctaccttcccctggccgtgctcgacatcaaggccatcgaacgagcatctgccagtgatctttctagttaccaacacgatcgacagctcatccttgataccatctcacgcgtgtcaacccctccatttccctccactgtcgatgccccgtcctcacttactgtcgatctctcctcgtcccccacccatcagtccttgtcttcctcccgtcccgctcattcgagatcttcttcattcagactccagaaaccacaagcccttctggttcctacgtcttccacgctttcgtctccgacgtcatcatccggtaacctggctcttcatgttccaccccctttggccaaaccgacattccacgcgaaccaaaactatctagagttggtcgcccaaaggaaatcagacatcgtgagagcgagctctaggttgggtttcgtccgtcatgacctcaacaaatcagatggaaggctggctaggtcggcagattggatccaggcaggtgaacgggcggaagagatgtgcgagatcgtaaaggtgcggtctttcataccacgcgatggtcttacctatttcttgctctccctccttccacccgcggttacttacctaccttacaaggactttgtttcggttaaatccccctaagagcgtggattacagcccgcttacctcgcttcttttggtctcggaggcgatcagcgtgtttgtaaacgtaacgaaccaactggcaaagtatcactcatcgagcttgccctcagtcatctacaaggatcgattggaatgtattaccgttgagacgatctcacaactccattcgtacgttatttttctatcctcttttaaagctctttaatcaaagctatgttccatcagccttatcttaccaaaatttgccttctacatagagcgctcgaccaaagccggtccttgctttctaaactaaacaaaaaggatctttggcgtcaatgctgggatcattccacagatctctgtcttcttcttgacatggccatcacctttagaacgctatcttaccaatttttcctccgtctatctgccttccctgccgtcacactcggttccaacactgtgtcttctccccccgtagtttcaggtcccggttccagttcctcttcgcccatttcttcttctccaatatcccgtccttcttccgctacagcgtatggaccctcccctcgcatcaaaacggatgatagctcatccctcgcagctcgcacggaggaaagccaacaacaactggagagaatggccaagggtctagtcgaatttatggatgaagcaaaagctgtcaagaaaagtgacgagaaaggtcttgaggcagaggttgtcggactgatagctcggagtgatgctaggatcttggacgcgctgaagatagagggttcgtttcttccgtgatttctctttctcccttgtacttgtctcgtttgctgagccgtcgatcgttttgtctctctggtgttcagacaaagaacttgcagaagcttacgctggttttcaacaactgaaagcttacagtcagccaagctcaggatcagtccaaaatatgatcctcgaagccgctctaaaagcctcagaacgttctttcgttgatggcaagatccctcttgtgaagaatgtgcggccataaaatcgagacttcgttctgctccttctttgatgtcccaattatttggctgatatctgaattgatctgatgttttggtcgtgtagtggtcaatctcgaggcgagagatcgccattgactctgtgatttcgtacgttccaccttgagcgattccgccccccccccttaatccattagccttgtgcaaaaccaacatgatgtggatataccttatcgtgctttttctttgaaatcggtctacagaacagagtatgcttctcagttctgtcagggctcatatcgatcccaaaatgtgatcgttaggaagttcccgcctgttacagataaacgagtacgttacttctctttttcatagtatgttaagataaaagtaggggaagaagcatgagatggttaaacctcggtccttgggttctgttaaatagttgttactggatgaaatccgatcttgggtccaagtcacgcatccacatatcctaagtatgttgattaccttctctccacacgtacaagcaaatgttttcagctagctgatttatctctttgtccatttgacaccttcctcgtccccacccaagcaaccttgggcgcctcatcaaccacggctggaaagggactctacgtcgttacgaaatatgttgacctcgcgcgaacagccgataagtactttatggagaatcgatctttgaatcctactgctatcgtaagttcttcactcatcctgtttgaaagatatgtataaagagaaggatagcaatcggtgtacatgttttgactgagacttgtgtgttcggggcttctacttttcctcctgttggccgtgttaaaaagctgttggaagttgcgggtgcgatgcattatctccaccatatgaaacctgaagtccttcacgaagatcttagagtaagtgctctatatcttcgatctcaacggtgtcccatagaaagataaacgggatctcacttagtttatcggttatcttcctttaaatcctcgatcaggcgaccaacatatatatcacccctgacggtacgctagagcatctaattgactccttctacatcatgtctatcgaattaaagagaaaaatatttgaagaactcggtgtgccaatgctgatgatcgcgctaatctttacggtccgaacgatggtatcctcacaggtcatgcactcgtcgctaattttgggctacgaaggataaagcgacaactccgaaaagatattcctggatttccagaagatgaacctcgatggagaaggttcgtataaatccttcgattttcattttttcttcaaagagccgaatcctatcaagaccctgcctgaccgtgttatcattcggtcatatattatctccagtccagaggttctatccaagatagagaaaccgagccgatcatcagacgtatacgcctttgggatgacatgtttcgaactcgtcacccggtcaatccctttccctggtagagatgattattgggttgaagaagctatcattggcaagtctttctttgttttttcgtgacccctattatctctctgctcccgaaacgagatatttcttcatcgaccgtgtatccttattcttcctctcttggttcttatttctcattaaccgaattcttggcgccacggctcattagataaagacacccgaccgtcctttcaagggccgatatatccacacctccaagcgcttacccaaagctgctggaaaaaacaccctaaagagcggccttcgttctccgaaatcattcggattctgaaaactcagcgtagccaatcaggtagtcctcctacatccggtagtggtccgagtttgaacatggtcgatccgagaacgttgtacccggatttctgaggtttcatctcagaacggcggagctacagactggatgtttaatgaattcatggtattagaaaagaaggcttcttttatggtagatgtgtgtacagatgatgataaatatgagatgacgagttggacaagaaactgataatatcctcaactgtatcctccttgttggcttgaataggttttatgctctaagcatggtgaaagaatctcggtgtccaaaaagacgtagaacggccggtgggacgagagcggcaggagcgagaacaggcggaggccatgcccccgacgacgagtagtccgtctcgccacggtgtctcgggggccgtgttcctcgaacaaggtgtgtatccggtatagaatgcacatttcaagccaccaccaagccttaacgggcaaggccgtcagaagtagaccctcaaagatatcgtctgagagaaatctaaagagtgtttatgttgggccaagacacatgctggcctaacgatatcgtcatgagaactatggctgcgcgttcggcgttctccgtcggtgggatcatgagaaaatccttgcctccgatcaagtaacaaccgatccagtcatttctgtcaatcacctctcttcagctatctcttgcaacgatttctgagctcatctaaatatgggagaaactgagttgccgccgtccgatttggaagctcagagtaagaagtcaccggaggagacgctttcaaaggagtcagaaggattagtagatactagtttggaaggaaagaattttgcggtcgtgttctcagcgtaggtatccatttcttctcatttccttcccaagtatgagtttgtatgatatgcgctctttattgaaactttcttgcgtctacatgtcttgtaactgattggttctttgacttgatatcgtggtcgtccagtctgatcctttgcatgttcttggccgccgtcagtatagaatattcgatgacgaccgatcccttgtctcatcttagttatgccgagtgcaatccgatggctgacttaagctggattttaccatattcttgattggtcttctcagctcgatcagactagtaagtataaggctttgactgttagaggggaacctcagccgactcattactaatcacacagttgcatcctatctggtacagttatctcgacagcattgccctcgatagctagtgatctgcatgcaaccagttcccagtactcctgggttggcacgtcattcatgttgatgacaacaactctgacgccttgtgtgagtatcatccttcccagagtatataagtatatggccggacgttgattttgttcccggacccagtatgggagattgtcggatatgttaggaaggaagatcattcttgagatgagcgtcttgatcttcatgatcgcttctgccgtaagaccttcttcttcttatctatatctctttatagatacacccacgtctatcaggctagatccccttccttcttctcttcatcttacgctatctcgtttagctatgtggagcagcgcaaagtatgcagtggttaatcgccacccgggcccttcaaggaattggtaagccactataaatacgatccatacttatttctctgtagaccgcgctcaccctctatggtgacgcgatgtctttctgacacgctcggaatttgtgccaacttaggtgctggagggatcatgtctatgtgtacagttatcatcagtggtacgtatagtctcaattggttgctccagattaagcgcagaaagggtcgtattcatcaatttcgttccgtgattctttcaatgtggtcttggtcttgatatatcagatatcgtgccgatgtctgagcggggcagtaagtatcatttcgctctctgttccaactcacttgcccaacgttttgttcaaaatcacttatcctgggaacgtttctctcctcaaagaataccaaggttttttaggaggtgtctggggagtaagtttcggtattcattctcgttctcttctctttgattcatatcgaactctcatgatgatgacgactaaccgatttaacacgataactatagattgcaagtgtcttggggcatgtactgtttgagcagccatgcggcttatgttgagtttgcatatctactaaaaagaccttcatcgttatatcatgctacaggcctatcttgggtggtcttattacagaccaatctacttgtatgtatcatcgagtttgactagcttctcagtaagctgtgaattgtccagtcctaaagtgtgcgttcaaccttaactcttctatgaacatcagggcgttggtgcttctttatgtcagtcagctatgaaaactttatttgtctctacagttgagtatcctatcctcactcgggtatacaatccaaatgttacagtaacctaccaacatgcggtttggcgctcgtcgtgctctacttcttcctcgatatcaaaactcgaaagatggccacatggccagagtttaagaaagtgtttgactttattggcttgtacgttatttcttgtacttctctcgtatctcttttttaggcttgtttgaagcgactaaaagatgcgcaagctcaacttcttctgtgtatataatctcgcttcttgtctcggtgtcttgggcaaaatagaggattgctgatggtgtctctagggtgtatcgtcgtcggttttgaacaagctacagaccatggatgtaagttaccgagcatttttaaaatcttattgcctgccttcctgtccttcacgaccttccatctgagtctctggtactcttccttcgttcggttcgattagtcggtagcccagcttcgatagctttaattgtggtaggagcggccatgttcggagttaccatcgggcattttctaacgaccaaacggaaggcaatcattcctcctcgcctcttcaaggcatggcaatgtttcttatttcaacacaacatgttgaagcgcgatctgaccaacctttttgatgttatactgattctttattggctcctgtagaacccaacgacagttctgttgttgctgatgagttatctgcaagcattctcgttcttgtcttctacgtgtgtgcttttctctttgactaatccttccaggctcgtacgtggctgatcgtatcagttgttgctctctgcgctcagattttaccttcctattttcttccagggtattaaaggagtcagtatcatgtgttctgcttgtgttcatccaggaagaaatgctttggatgataatgcttaaccatattataatggttttcctggggttagacatctgctacgatgtctggtgtgcatctgctctctttctccttaacggtcagcgcagtcagtcgtaagtttttgtctttcttgctgtgtcctcacccttcgtcatctgtttctatgacattctgttgacgagattaggcgtctgtatgcttgtatgcagtgcctactggctggctgatctcccggtacggccacatccgaagttttatccgagtcggctacgcgatcgcatgcttaggttcgtttctttcgtgctctcccgaacatacagtcggcttcctgatcctgtaaagcatgcatgctgatcatgctctggtttaataggattcggattgatgaatcttatgaatgagagttcaagtacggcagtgaacgagatctttcctctattggtagagacatgcacacatactctcttgttccttcggctttttaattctctcataagccggcattctgagtatctgcaatttctgctttaattatgagtaggttggagtaggtatcgggatggtaagtttcctgcgcttgtccttgtaccttcatccttcttgaggctctacttaaatacatcttttgtgtggtatacggattgcactcgtcatgcagtctcttcaaccacctctcatcttgcttcaagccgcaatgccagtttcagatatggcagcgacttcttcttcattcctgttgactagaactctaggtgccaccactgggatttccatctctggagccgtcctctccacctcgctcgctcgaaggcttgatcggatagacgggtacacgttcactggtacgccaacgacgtcggatgattatcatgctcttcagttggtacagcctgcaagcgttcgacaggaagtccttcacggattttctgaatccttatctgtgcgtttagttttctttgatatctttggctctccacgtttctattccgatgttcactttttttttttatctcttcttgctctgcttattatctttcaatttaacagatgctgttcaagatctactgtcctttcttgggagcatgtctactgatgagcttcttcatccagcggtactcccttaaagaggcttacgtccccaaatctgagcgaccccctgcacaatcgcctgcgagtgtagctgaatcttcggctgcacctatacgcatgcatatatcgccggttactacaacctcagccgcaaccgcaacgatcgatgagacaatttggagcgaattgtccagaagaccttcggaaaccaccctcaaaagctcccaggatgaattccagaggaaaggaacggagaaggatggaaaactgagagaggagcccaggtcgatagagtagacgaataccgtggggctcttgatgtcttattccccctcccctctctccttcggttctcttccttccatcgtgctttcccttccatttccaaaagacttccatcccatatccattcgtataatcgccaaacaaccactagatacatagtaatacatggacaagcttgataatttaaccttgttccgtggcagcttttcggtagagtatacaataggtgaactccttgtacacaagactttgtattctgtaatattcagatgtaaattctgacatgcttactcgattatgtatgtccatatttgtctgccaatgatgcttaagaggaacagcggctgtggatgaagaacgatgcggaagtgtcaaccactctccgtggcgagtgtcgcttacgctcgcacttacgctcaatctaactgtgcaaacagcctttctcacctcgcaaactgccttgcccacctcggtatcgttcttcggcttctttcttcagaccttccttcagatctgccagtctcgatggtctccatgctgctctcgtctcgcgctatcagtccttctcttggctcgcggcattcttcgccgctcggcggtggagacgtctccactggggcgcgcacatcagccgcgagcaaacgtaccgcaaggtggccgtccgtctgtcagcaggacgtccacgcaccttcctggccttcggcgacggcgccttctcgtgggcaggctcctggtcctgtcaaggtgctgtttgccaagctgaggatctacctactgatccaggctcgcaaagtccgggagtatcggacgtcgagagtgtgctcgaagtgtcatggcgagttctctggaagaggcaaagcgtgggcgatctaggagtgtcgaagcgtctgtcgagtaagtgacatgtgttgtatggctcaagatgatgtgtcggttgctcactactctctatgtttgcttactgtgttctctcagacttggtggaacaggtatgtcgacgtatcgcgcaacatgctgcacctagccctgcatcaggaggagaaccagttggcaaggacgccgggctttgacgctgttgctagtgaggctggggctggggctgggactgtcatgactgctggggctggcacaagctaagctcgtgacccacggggatcttggtggtctgtggtctgagggcacccaagtccaaaagggccgcgtatcgaccaccatcggttgcggttgctctctagtagccaaagccatatagtctttatggtctataacctgtcaatgtataaattctaaacatctatagaattgtctagattgataagaaaaagcaagaaaaagaattgacatagtaaaccgacaaaaatggaaagaacaaacgatggaaaggaggaagatggggggaagagaaatatctgcaaggccagttcctttagagttggtcataatagaaaacaaaaaagagcacctagagaaagaagattgaggatgattttattctcactcatcattgtctgtcggtattcttccgctgtcttactgcccttcccatccgctcatgaccacactcaagactttccgtactctcctccatccggcaactgtccttctctctccgacgtctcctttccaaacgactttgatctctcggccgatcagtaggtagctcgcgcaagccgctcgcattcccgcttgaacctcggtaggaagtcggtcaattcccttataagaatgtttggcaagatcctctgcgtaggcgactaatggaagcgagtacgtcttccattcgaaccggaagctttctgaggcgtttgaagatggtaatgtggacgaaggagatagactgaggagtttgtcgaaatcttgaggccgaggttccgtccaatcagtcgggatcgcaagctttgattcatcccgaagaccaaagaatgagagtggtaggtaaaatctcccttctgttgcgtcccctttaatgtccctagcaatgttcaccaactgaagggcagttcccatctctcggcttgccactaacacagcttctctttcttctatggtggcagggacctgacttggtgcacttgcccaagagacatagaccaatagctcggcgactgagcctgctacacatagaccatagtccagcaagtcagctgtggtctcgataggcgtcttccgagcctggactgcctctgtcgataagggaaagataagatcagtggtgtatcctctaaggagttcgtcgagtgggtatcgagggatcagcccttgcaacttagcgagcaacctgaaggcgaaatggtattgaacgggaaccctttcggtaaggaattgaacgagctcggcaggcgagagcgaaggaggaggcgggaggggatacattcccgtgggtcgggaagggtgcgaaggaggaagtaaaggcgaagaaaggatcttgtcaggttgcgaagggtgtagcgggggcccaaatagtagggtaagaaaatcggagaccatgtcaattgtggcatgcgggttggaagatacttcaggagagtcgataagatcatcagtcacccggcagaatgcgtatctgttatgcaggtcccggatcaccaagaaaactgatcagcgaatgcacatgaaggtgaaagaccgaacaaacctaaagaatgcgtgctcacagtccaaccagcctctccctaacttcgctaggaaatccagccgaggcaacaaaaaagctccggctctttttctccaacaacttgactgccagttccaagtcacgttttggctgagaagagtatggtcggctgctaaaaaacagggagagcacaggcggtgtaatgaggggaaatgaagatggcatctttttgttgccataaatagttcgaccgtgtagcaggtatagggcctgagtatgatcgctacagattccgatgggtgagttcgcagcaatcagccaaacagcttttttcaccaaaggaagagaggatgagatcaacttaccaggcagacagacccagaacaatcattagattcgtcagtaagaagaacatagcttcctcaatgggtagtacacctccaagcctccaccctacaatcttctcatcgttgatcgaccaagagtcttgaccgacagcaacataatctacccaaatcagatacaccgtcgggatcatgattgctgcaatagttgactttgctcggccacttttccaatcgaaagcatattcgcctgataatgctgccaagagcatggtaggtggggtgatgagtaaggagagtgcccgcatgtagaagtagtgatctgtcacgagcgggtcgggcgatgggctggggtgagcggtaaataggtagataatgggcagagggatgagcgccttgagcgcgagagaaagggcggacgatctagtcttgggaagcgcgagagatgggagaaggtgcctagttgccaagacgtagaccaagccggtgattacggtttgaatgacaaagaaagcgtactcttcatatggaacactgttgatcagggataaattcagatgttaaatgtaatcgcggaaacgacgcgcggctaagagtattaacggtcgactaactctagaaacgttccaaacacgccttggccactctccgctgatggatatgtccatgcgccatttctgatgatccatgagtcccatggtgtggttgcactaaacgcaataaatacgaggatcgatattttgtagatgtcaaattttgtcaaaatcggggaagtgagcaggccgagaagaccaagaattgggagagtatagatcagatggctaagaagaagagcacggtaaagatgttagtcattgaaagatttggaaggacgcacacacatatgcacacatgagtggtgtgcaaaacgaagaagaggtatggagacaaacatctggtaatatgcgagagccgtcattgcgacaaaaactctatctgttggggatgatacgagttgggtaagatgatgtctatccgagatcgggctggaccggcttgctgaagttggtgatgtgcttcggcgcttctttcctttgttttccctttctggaatacaactcttcagcaaagatctctctgtgtccacttcttgtttccgaactgatctagacagttggagatggatgtcagtagaaagagagaagagggatgagaagatgaacaaaaaaagagagatcgagtttcgaccatcatcacatttccggccatcagccgatcaatccccggctggatgccgatcgacataaatcatgtatatatcttaagtagttaattgtcctcggataatgtcctcacgtgatctccaaccaacacttcatccagattcgcatcccattctcctatagggaccatgtttttgtctaagaactgttctttcagcgccagtccaactgagttgagcaataagttgagcgggtgattaatcaagagcgttagtttgtttgagctgttggatagtctcatccttctgtcacaaaatagcgtccgttgggtatcgagaaaagagaagacgcgtactcagcttcggaccgggtcgattcttgcctgcacagatcgaccgatactgagtgatgtatttatcgtaatatccttttccatggcccagtcgagagaacaaagaagaggccgtaggtgagaatgcaacacctggtagtaagatgagatcgaggtaatgagctgaagtagaagctaatgattttggggatcgcccaaccaccatagttcaaaagtcaaagtggaaagaaatgcattagcgtatcaaacatgtctagtaagcaacacattcaaggtggagaagaacgtaccatcttctctttccaacccagtgtcctttctcgtcaaaggcaaaactggaattccccatttgtctctattccacccatctcctttcaaaccactatcggtggacccatcttctgtcataggaacgtcctcctcgtatagccttaacatttgcatatccgtgtttgaaccggccgggatgaacggtacatatacgctctttccagcgtcaagagcatgcttaataagttcaaaggtttggatctctgaatgaaccgtaggcaggtacactgaaatcgaacgtgatgaccgatagacagtcgattggatcaattgatccgttaccgtccgggctttgtgcaagaaaaaggagtgagagggaagaggatttcatcatgttctgacaagtacgtcagtcaaaggagaactactagagacgacaaagacgtttagtgctcaaatcgggtcaaaccaaacacgaacactgagcgagaataccctccggcgggatggaccggaggatcgtttgaatctgtttccggagagctcgtttaacggagggtaaagagctggtcgacatgtgtcttagaaggtcggatctgtgtaactttctcgtcagtgaagccagttggatctaatctaatccagctgttagggttagcgatatggcccaatgaagattttcttcgtggttatagaacatatggccaactagacatgacagatatctgggcctgaattgtagactatattcaagatattcagctaatcgtgccatcgagctttctttctctcttgattgacttggtgtcgctcaactcgtgtgccatgtaattcagatttgcaagaaattggtgtggaagcccatgagaatagttgacaagagtagaaaagtttactcgtcgtcctcctcgtcctcggcggcgtcgtctcccttggaggcggcggcggcctctcgctttcgcttcactcgtccggatcgagctccaccgaagggggaggtcaaagcgaagtcgatgtgcttctgggagtcaagtcggacaacgaaagaaggaacgttgacaatctgcttgccgactcggatgtgcctctgtcggatgagaactcgggcgtggtggatggacttggcgagtccggacttgaagacctgggtctggagtcgtcgctccatgaagtcctcggtcttgagggccaagacgtaatcaagtcgcattcgggtctcatcgagcacaccgattcgcacaagtcgtcggatgagggcgtttccctagatcacatgagttgtcaaacaaaaataaggtaagcggcccgttctatgtaggtaaacgaaggcgaagaaaagcagaacacaaacctcgaaaagcctcttggggtccttagcatcaagcttaaggagctctcgagcggctcgtcggatcttggagagagtaagctgaattcgccagatctctcgcttgttcctcaatccgtactctccggcgagctaaccaagaaatgaagagaaaaactccgaatcaacatttcgcgtatcgacacagtttacaacgcggcagaagagaacgaaccttaagctcagcatcgagacgagcggactcgaaaggtcgtcggggaaccttgtaggctgtatgggaggtagggaatttaatcgacctataagcatgaatgcttcactccactcccctctacggggagttcttgcaacgtataaatgaatctgtaaaaaagggcatggtgtgcaaactaactcttggagtggtttcgaggagccctgataaagcgacatatcagcaaccgagaagaactcccatgacgccaacatgtatgacaggaaatccatctagatcaacaacgtgaacttacctgggcatcttgaggatatggtcgaaactaaagaaggcggcgggatcgaacgactttaaatttctctctcgcttgtggacttgacaagaacaaaccaacgtaattatgtaagccaaacaatcaattatacacattcatctatcgttgtctatcactcttctcagaagtcatggctacaagtcatctgacttttgctgatcgtaaccaagcttgctttgcgagccggccagccacgagcaggcccctgcacggtctgtgcgaaaggtccaactcagcagacgtagtcccagctcactcgacatccatccccgtcaaggttagtatcccagttttgtgtcccatccaggagaacagctccagcgttgtccagagtccagcagcagacagcacacaaatctctcttgtatcgatccgatttgtctggtcgaaaactatccacgtttcgttctttggggagaaaattctttggagaggcggaatgttgaatgtagccaaatacagtatggccgagcgattgtgaaaaaggagaaaagcaggaagaccgtgatagaacgaagtctggaaggtgtgtttgggtcgaggggacgacaagtgcaacatgttagcgagactcgaatgtgctgtgtgctgtggacccgtccgttgtgagcgtttctctaaatttgagctttcgggaactgatctctacgtcgttttttttttcttttatcattcctctcctcgcgatcttctctaccggcaaaaaaaataacttctttcttcaccgacactcatcctctacatcaaccaccctgaccttccttctacatacatacccaacccgacgcctctgtcttgtcctaattttccccgcctcaacatagtttcctcaagatgcctcactccttcggataccgagcgcgaacgcgccacatgttcgctagggacttcagaagttcgttcccttggttctcagactatgaatacgagagagaaaggacagcagagcattttgaatggcgaaagcattcgaaaaaaagggaagaaacgtgaaagttgactttggagctatcatcttggttaaacagagaagggtacgatccctctttctacgtaccttacgatctacaaggtcggagatatcgttgatatcaaggccaacgctgctgagcagaagggtatgccccacaaggtccgtaccacgtcccattccccacaaaacatcaaagccattgccctgacaaaacatatctctttgtctggtttctactgcttgtggtcattttctttccaacccggtcatctctttcgctccctcgaccaaccctttcacacgaacatcttctcttacgtcgctcttgaccatgatagttctaccacggaaagaccggtgtcgtctacaacgtctccccccgaggtgttggagtgatcgtcttcaaggttgtcggaaaccgatacatggagaagcgagtcaacctccgaatcgagcacgtcaagcactctaagtgccgacaggagttcttggaccgagtcaagaggaacgccgccttgaagaaggaggccaaggccaagggaggtcagtccactagtttcctccctgtcccgttcttgttccgattcaaccctcttttgaaaggtcaaacggctgattgatattctctactctatcttctatctgcagagcacgctaaccttaagcgatcccctgcccttccccgagaggctcaccacatcaccctcgagggcaacatcccccagaccctcgcccctgtccgatacgagacttacatctaagcaactttctcaagagggttggcttttttgggtgtcgtcttcagaaaggaaattcgttggatgtaatgagcatgtgacgatttttgacaagatgattgtttttagtacatggaaagaacggaaggttgacattcgacgagacaccggatagcagtttaggctggttaaactcaatcaacacctaacggaagagtttttgtcttagtacctctcaccaatgctttctgatccgtcccaggccaggataacacattcatagagcacgcattctttctaacaagtaaaaagagggaagctttcattcaatcgatacatttgctctcgaacgactaatctttcgcacctagatcagcctgatgatctttattcaagcttcgtcttcttgacgactcgttcatccttatcaaccacgtcgtcgaccaccggtaaggaggcatctttaggttcagctgcaagaggatcttcaagctctttctcagcaagagatgttccttcttggtcgattgtctctagaccatcgatagcagctcgtttggtcgaacgaggggctactgtcgactgtagtttcgtgcattaccagtttatcaagagtgacgatcatgcaaacaatataataagtggcaaccagtcggtcagctaatccctctgagaacagcatatgtctgttctttttgcaattttcgaaataagagctataagaagagtaagcgaacgaacctcctcctggacttgctctacctcatcctccgctccagaatcataggttccagcgtctggtccctgagctttcaactcatcatcatactcatcaccacttccagagtcatccgagagatcgtctccctttatttgtattcgtgcgtcatagcatgtattgatatacgtagggagagaccgtcttgagaaatgaatactagggctgaacaaatcgcaggcttgtatatgttagggttatggagatcttcgaaacgtacatggagcgtctcgaggcctggcccatcttggtcgacgaattcaccctcaaattctgactgttaatcatccgtcagagaccagggtagatggccagtcaatatggttccggaagacttgacagaaaggaaagaaagaaggaagagacaaaacaagagataagaacgcacgtcagattcaatatattgaacctcatctccatcttcatcctcgtcctcatcctcattcccatcttcatcttcatcttcatcctccgggtcgtccaaaacgaccgggtcaagatctgtatctggctcagaagacatcgtgttcgtttgtgcaggaagatggatgttcaatgtatatcgaaagaaacaagaagaagagagactttcagctcatctgatcagtctttatctgtctagctgttctctgttcatcgtcatttctcgccttgtggggatcaagagaaaggatgcacagctttttcgctttctctacacacaaacatccaacgactagaacttcactcatctttggatcactctgcacttgtatcatcatctacttaatcctagcttcatatctcttcaattaaagaatggcttcccagattctccctctcggtatgtgtcttctgttctgatacatttagtggcagatttgatggctgacttctattcattcatgtggttcgttcttcgtccgcccggccggactcgtctgggttggatacacagagctcattgatagatgtattggatccaagatctgggtggtcatgtatgttctctgtttctgctcagttcttctgttatctgtgtataacctgacgctgtgtgtgtatattcttctctgacatggacgattataggaaaggtgatcgagagtttgtcggaactttgactgggttcgacgactacgtcagtaagtcctggctaattcttctaccattcgttgtcgccatcattgctgtcactgccacccttggaatgctggagaaatagatgacattgaatttggaaccatctttatcattgcattgtagacatggtcctcgagaatgtcactgaatagtaagcttcatccattccatatattctgacccaatatcttgagttattgctagaagaggttcaagagcatcctggctaacactttgtctggtttaaccaaatatagtcactccactccagaaggtcgcataaagacctctctcaaccaaactcttctcaacggcacgaatatcgctatcgtacgtccttgtttgtatctttttgttatgactgctttcgtatcttatagagtgcgctttaactcgatcacgatgggtctgatttgacactctgtgatttgtctgtgattttatattaattgtcatgaaaccagctcgtacctggtggagaaggacccgaggcggcttcatgatcaatggacttctctttgtgtatatctcttgggctggaccttcactgctttttttttgctttcagattaattcaacaagttatctttgtattacacatagagaaaacgtatacattgttgaccaggaggctcgaacacaactgaataagacatgctaaaagccaattgctaacaatcagcagacggctactacttgacagaattgtggtccagacagacttatgcgggatagatcttctttgtctcttaccggttctcctgtctcctctttcacctctcccaacaactctaacttcgtctttcgatctcatcgatccgtccatatctcaccatctccctacatggctatcacatcttctaatgctctttctgagaaacatcagaaactacaaactcaattgaatgtcttgcaggcccagcttctcactatccttcatccaacgattgatcagtccaaaaatcacatcgatgtctctcttcctgtctcaacaagtctagatctagatcaagaagcaaagaaaatcgtcgatcgacatattcaaggattgcatatctacaacgaggtttgtcaatactttgatcttatcactcgtgaggacgcatacaccccacaactgtcagatatagaaatcgatcttgactgacaagacttctcaaaacaagtgtcgggatgctgtgcaagtaagtgagaccgctgacaattgttacaaaatgtatcaatatcatacaagatgatctagagaactcatggaatctgtttcttggttggattgggtttggccaaaagaatctgattcaaaaggttttacatattcttccctgtcattaatcttcacatatgtgtatgatcatacgatctgacccatctctcctacttatcggctctctgcgtttcatcttctctcacaatctatccctcgactcaactttggttacagtacgccgcatgtaccggcaaacaaagtgcggagatacttgagacacttggtctcgaaagagaggactagttcacatgaccgatcaggcgaacgttgggatggtgatgtttggttcttgagctcaagaggaaaggacagatgaagaggggggttgtatgcgctgagttgggtatatatgttcttgaagctcgaaacgacgcagcagagatatatcggtctgaagagcttctcgatgaccgggttgatggggtttataaggagtatgccgccattccttccttatttctcctaggtgctcctcttccccttatcttcgagtcagtttcctctttcagttgaaacacttgttgctcagattagaactcttctcaaggtttctctcgtcacccatccctctcccgatacaggatcggcctttcccttctcacccacttcgtcccaaatacacccccaacagtacacccagcaacccaaccggccagccactgttggcgctctccacgccagtccacacaaaggacacgcccctcgtttctttccttctaggagtcgagcaccttctaccgaaggcatcggtcttgggggaggaggaaggatcggcgtatgttttttggatgacgggtctagagaagaggaggtagaagataggagttggaaaggagatgttggggagtgataaaattcgagaaatttaagagaaagaagaagaaaagggagggccgagggaggcgatgggatacggtttaagatggaagaccgagagatgaatggtgtgaagattgttgggcgttttggaatcgggctctccttgagtttttcaaaatccaagtagaacgccatgtcagactacgtaagaatagggcagacgggcacaacacttacgatgtcatctcgggtgatgcggcctatgatatatccaaccatccaactctcgacacgccagtaagagcttttcccgaacagatagcttagactccaaaccagtcgaccgacctcggtccctaggttaatccaaggatataatatcaagaatagacttctcgccctagattttagatgttgtagacgactcggtggggaagaacttggatctgaagatgaggagaaatctgaagaatcaggtgagagaacagaactatcagctccccctcccatagagaggaatcgatcgtgtagcttgagtccaacatatggcaaaaccacctagacaaagatccatcgagatgaacatcagtcgaaacattcaagtatatatgtactgagagattattcctacgacatgatgtatactcacgagttctaacaaacttgtcaagatctgttgattactgagttgaagtcggcgccgacctttggatcccccgtgatcagcatcaaaggtgtcccatcgcgaagtaggtaataaactggctcgatttcgtcttaaaccatagaagtgttcggaaaatgaggcgcctattgagagggatcatcttgaaccatcagtatcgatacccaacagtgtgtacagataaggaagagaattcgaaaagaaagaagaaacgaactgtgtttgagaaggtgatgtctctccaccaagagcatcaagagcgcatagaattcctcatgtcgattaacaactggaatcagatatctcggataagaatgagcaagaacctatagagaaacacatttcaaaaagcgttgtggttccaagtcaacaagttacttgagatatagattcgacgaaagaatggaaaaaagtagagaggatctatacattgagaacatatcgaacagctggctgaagaagcgatcgaagctgatcttgggcaaggagctcgaacaatgatggatggttctgagctgagacagttgagtttggatccagcgcttccatctgtgagtgatcgaagacagacaaaggtagaaacgtagaggagctgaatggcgtgaacgttgtgagaatgaagagaaggaaggcgatcatcatttctctgttgattgcccggccggctatatcatcagccgcgctcagcggttactatcatgacacgtaaccatccagtgtttcatattgctagagctaatcggtaagggaagagcttgtgtatcatcatgccagataagaagatgaaagtatgagggaggacaaaaagagaaatgtctcagtacaaagagaggtggcaaatactcttgccagtggtatagaacaaagttatcataaaagtagctcaaagaaaggccgacaaaaaggaggagggagaatattttatcgggatcggaaagttcgcccactacgttcacatggaagatgcacaaattcaataacaaagacatcccagtcaattgatccgtctttcttcttcggccaaacagttctgtaaaccaagtaagaaaacaatcaacgaacctaacagtctttctgcctttgtccccggtcaactcctctttctccggtttggcccggttgaggaccttgaggaattcggcaactcgataacgcatcctggaatgcatatatgccttggagcacttgatatggtagtgaagataatctcggaagagctgaatctgaatgattgttcctggtgcagtgatcggagtgaaatgtcgagggaaaagaactggagaggcgcgcagagaaaaagatcgaaatcagaaacaggcacgttagacacgcggagcaaaattcagggagttaagggaataaatcaaggaggagaactaaccaaaggtcacgtatccaacgtcttcggttcgtttgaggttaggcaagtgacggatctcaagcggtgggtctcggttggtgtacagaacttgaggcgcgttctgaattccaggtagacgtcgagcgtccacaaattcctatgaacgcaagagcgagccacatcaataaaaacaccataaatatacgcgtgagatcaagttttaagccaagccagcctcaagtaggatacgcgaacgaacctgtaaaaagacccttccaaacacccgatcggtctcctctttgaaaactgtcgagaaaacgacagtgactcggtcgtgagcagcctggatatagattgcttcatcctctcggtaatgaatttgcatgagctcgctcggctggatagcctctccttcggaaggcggggcaatctgggtctgtgcatggaaagctctctcgaaaggagcagagatggcggtcggtttaatcatagagagagagttgattaggtttgttcgctcctctatcgattcagataaaaagggtttagaggaaaagatcaaggatgagaaggcatgagttgagagtatcgatctgagagtataaactgaaaggtaaaagacgacgagtgtctcgcgagatgataagaacgagaacttacctccctcttccgggaatctgtccagctctagcctgagcgttacatcaaacccctcctcaacagtgtcgctgatccagtcaccatactgtcttttcaacacctctaacgcgccgaattgagtgatgtccgcccaacacttgattgccatcgacagccaaatctccgtcttcttttgaggagtcgaaagatggaatcggactgagtcataatcaacaaaggaaatgtctagagatgttggtctggcgtaaacgaacgagtgaagataaggaacatcagcgacgaaagcagattgaagaaagagaagaggaagaaggggaagagacatacttgatgagcttctcggtaaggacagttcggatgataacgttgtggggctaatttggaaaagaaagatcagaagaaaaaaggcgttgttgagaaatcagtacctgtcatagtcctattcatattacttatgtttgaccatcaaagattgcattctcgacgagcacgggatgtaaagcacaacaagatgaagagagatggaagtcttctcctatatggatatcccgacatttgcagcatcgcctctttgcttcctcttacggtcacgtattcttctactacggattcacgcatgcagtccaactaacttacctccaagagaatcatggcgactaagagataacgaagaagaagagaaggtaaggattcaagttggattgagatggtagtctaatggtgaccagccgagtctatcagaagggcggaggtcgatctgatcaacgccacatgaacgtgatgacacctgacacagccatatcatccagatggacagcatcgtctcctcaactaattcatcaaccatcaccatcatcatcatcacgatcatcaccattgccttgcgtcctgcgtgatctatcatgttctcccttccttctgcattaggcttatatagctcctcagaggataccaagctcaactttcgaacgaagcaaggaggcatcaagaggctcttcagcagacaggttcgattcagttgtccaaactgatgtctacctaccttagtcgtgttcacttaacgcttcatgtgcctttctttctttcagcttatcagcactgaagatcacaagtactgggagcaagtaagtacaatttggccttatagcccactgagagcgatccgggttgacctgatgactatcgctcgaaccagtactatactctctttgactcagcctccgaagtctattctctcatcacactcgaagacagtaaagtccccactcctcaagtgcatcattctaaatttacgtcccggaagaaaactaaaacctctcatttcagtccgtcagacgcttcaaataaatcctcagaacatcgagacccttctttcctacctgaccgaccacctagatcagctcattgcctctccttccttccccagtccgctatcttccaaatctagtctcagctcatacctaccttctaacccatcatcttcgtctgcaaacttaccttctactacggttgaagctattaactgcttgagagttatcggccgcatattacctgtgctgtatgagataggatggcctcccgccgctgtgtctggtctaggaggcgaaggttgggtagaactggtgctctggagcgctagagaggaggttgttcaggctgaggaagaaccagaaagcatcggacaatttgtggttggtgatgatgaggaagagtctgtaaatgagagtgacggcggggagcgcgtcggagaaagcgtaccagacacccctagaaagccgttgagtcctccgttggcagatagattattcacattggcagtggatctattgttctgcgcaggattcaccatcccttcggaaacagttgacccacagattggaaaagtgtcttactgtatttggttcgtataattatcttctctggcacctgtccgagtaattcaacctatattcaattgcatgattttgcagggagaaggggattggatcaactatatcgctgggaaattctgcgccctatgaatccaacaaaatcgaagtccttcgtatgtagaagaattcggtttctgtccatttaatctcacccccgttactttgagcttattactcaatgaggtttgatacatcattcgcttccttgtgattaggattcttacaaatccttctgtccactccgatgtttactcctccaccgctccttcccagccttcgttctccacctctacattccttgactcaacgactccccaaacgaaaaacactctccctcctctgttcgctcctcaacacgttcctcaatccgagccaagctggttggttggatggagtgaagaatgtgcccttcggatacctagtcaaggccggtctcacagggagtgtcggctcagctacggatgcagggaacggcgtagggagagatagactgagaaaaggagcggcagacgtgcttctatgtgggctagattattggtatgaggacgaagatagggaactgggaaaggggaactcgttccaatatttcttgtccaagctggtgcgcatttatcatccctattttcttgccactgttttgtgacgaacggaaaaaaagataatcaatcagaaccaatccacactggttgtgcccgtgatgtagcaccggagcgaagacttcgaattcatcctcaagagcatcctgaacgtcttcaatcaacatctccaaatggccaatggactgttctcgagtagctccaacacacctctgttattactcgagacctgtatgttgtcttaccatctattcactcgagtattgatagttgaggagctaaaagaaactacgtgaataaatacacagtcatgctcttttggaagttgatagaccttaataaggtggagctttctttattctgaagtagtccgtgtttagattcatggctgaccggttggtccttcaaactattcatatagaaattccgagctttcattctttcagatgagaaacgaacagtagagataatggcccacacagttttcacgtgccttagattgaaagacgatcctggttagtctatcatcctcagcttttctaaaccgcgcctccctttggtattgtgcttgtaggctgtctggttatacttaccgatctcttatcaatattttcgtcagcccaccatggtcttttgaggatgtgcgcatatattctacaaaccatttcttcggagaaggcattcggacaagccattagcaagaatatggtttctatggcacttcctctgaaatgggctatccagggtacggcagcagatttcatgatcgttgtgagtgtctttgtctcttcttttcaaatctgttccgttggcgtgactcagtttcgatccaatgctactttatttcaatcaagtccatatactctatcgcaacaactcctgagttgaactctttgttccctggtaagctcctattacttcttctcttcgatcttgatatgtgttggactttacgaaatgttccatctgactcagagttttgctacgtcgattaagctttgacaatcacaattgccaatgtcgcaccttatctacaggatactagtgtacaagcttcaaccaagctagtccagttattcaccgcgctatctaatccaggtttcatgttgcgggatgaagggcaccctcgacttgtaaattatctgtgagtttatttcagagaaattaataaacgaaacttaacaaagaggaaatacttgctgacatccaacttctgtctaagtttggaaacgttctgttctgtcatctttcaccgacttgatagtgaatccctttgaatatatatcacataattctgatgcgttgctgacattcttctgatcaacctctactccaaaggcaacccaaatttaatctattctattctaggagcctctcacacatttcagtttctggcaactttcacactcaaaaccgggctaagagaggtccagcggataaagaagtctagagaattagctgctggttcgtcacttctcacattcaaacatgacttctaagtttatcaggttctcagtagtcaatctgtatgttgagaatgttcttcatcttttttcgactactcgtactgatagtcaaacgggctgaaaatactcgaggcaatgtcgcgccttcgaacgaaaagacagcctttctttcagacatggactcgtctacactctctaattcagagctcaaccaaagaatgtcgaacgcggccctgtctacgcattcgctgtcctcagggaatccacctgaggttgaccgatcaaactccgctcaggacagttctctgcgtcttgtagaaaacgcgagacaaaaaccgctcagcgagaaagcgaggggaaagagacgagaggggctgaatgatgggattcaagaaggcggagggttgggagaggaaagagagagaggagatgaagacgatgggttggatgaggagttagagaagatcaggacaggaggcctaggtggcggatttcaaccaacgcaagattgggtgaccagctggcagaaagggtgagtcagatatctgatagatagtattttaacagaggagaggattctgaaagcccctgtcttcgaatgatacgtagattgccgctcgatcctattctgcttatgatctcggagcttctccccaaggttgaagctcggcagatgattaagactcaagggcctaacaaagagatcttacaattgcttcgagaggttactctgaccgatgtcctaccatctgctcctccaatcgtcgctcgaaaattcttcgtgagtgctttcttccgctacattgcgtgcagattaatgtactcaaaatctgaacggtattgtctcttatctgcatctgcgatagttctcacctacatcactcatctgggagacatctctactttggggtgaaatctacgtggccgggctggctcccgttggtctctggacgggaactacaattaagcttttcggcgtcaagtctgcaccaccaggtagaagggacttggtgagtctcgctcctcttactctgttattttgataacacgactgataaagggtctttattattttggaaattgtctgattgggggcgactgatatcacaggcacttcagaacgttcagtcgaccctaacgtctgtctttcgatcctccacttcttcgtcgtcccctacaagcatgaactccggcctaccatcgtcacctcgacttgagtctcgacgaagacagagctcaagcttcagtatgacgagcctaggaggcgggggaacagtttgattttccttatttagttcgaactcttcatatcgatatcttctctccttgatagcttgaatcacataatctcccatagcatgagcttgtagtgtcgagcctgtctgcaaacaagtaatgaacagcaaggcgatagcgatgaaacagaacatagaaatcatcataatcttagagtcgtcaagccccagtttgtaccttcagacatgccagcttcttcagaacttactctccatccccagctgataccatagtgtttaaacagaagctccatctcttctacttcgtctaagcattccaaacgactagtcctattttccaaatatattccgtcgccaatttcatcggggtttttgatcaaataagtgtttggttttcgtatagaataaaaaagaactgacctagccttttcttcagtcgagatgatgatttgtcgaatctcgttgatatcctgaacgccagcgcctgaggagtatccgttagaggtgaaccgatctggctgggatgatcgagtgggatataggtgagatgaaaggagagagatttgccgagacttcagaaaaagatgaacggattgagaaggacaggtaagtaaaggcaattgtatgtctatttgggggatatgtcgatcgaatcagaaggttaagaagtacctttagatttgagacgagaacttttccaaatgaatcgctgtgaagtgagaatatgaggaaaatcgattgacgagtcagaaatcgcatatcaaatatcgtagcagatcaaaagaaaaacactaactccagtccgaacatctcgtacacaattcctccaacccatccagtacacaccttgggaaaccattccaccgttcgctcactcaccaccgagtctagatagactagcaagcactcggctatccaaagcgttggtttggatgggtcaaagatgtcagagcttaagactgagcacaagggatctgtgcgcaggtcgtgagggatcagatgatacgatggagaagagagtctagtacatgatgcgtctgataggtgatagggccaggacgagttgcaccgtgtaggagatgaatgcaagttgatttatcagctaaagaacatgcttgagggaggcagatataaaaacatgctaactgagtttgatcgattctattggaccaagggggtcagacagagccttggattttcttatgaagcctgccttctggcgggtgatttctggaaagtcgagttcgatatacttgtgaatagatgacttaagtactggatcggactgtttaagtagagattgcgctatttaggatttgatgtcgcctgagtagtcagtattagcgagagtatcggtccgaacctgaagtctccagaatctagtgtcgcttccagctcctaggctaataatctggccgcccccttgagccggcccggataagaaacttcggacgagctcatcaatacctaaggtccgcgcgtgagtgccgatgtttataagcggcggccggagatattgtgattttgtgggtctaccacgaacgaagaatgaagcaaaaggatcctctaaatatccctggctcactgcagatcttaagtaagattatccgatacgaaacaagagttagatgatgtgcttgtgtatgcacatcaacgaagcatggaacgatgaaaagcttacagtctagagagagcggcatcgccatctgtacttcgaatggcttcatccggagtcattgcatcgattgaggattcagcgaatcttctggggaagccatcggacgatgggggaaagctcataatgttgatagtagagagtcttgtaggtcgtctatcgaaccgaaggaggatcggacggatgagatcgtcattcgccacgtccagggcggtgcccgttcatggctcacgtgtggcctctgctcttggtcacgtgtgcttgccgtca

SEQ ID NO: 1619 - DNA, 495 bp, Xanthophyllomyces dendrorhous
atggtgagaagactagagcaacggatgaagaatgagaagggcaagaaagatggacatggagaaagaggcaagaaaaaaaaaagaagaaaaaagagagcaaatcagagcgcagaggcaaaagagcgaaagatggagaaagagagcgcaccaagagaaacactgatcatcgtcattggtctagtaaaaagagagagcgtgtctaatctatcagtgtatctgcgagtgtgcgggtgtgcgggtatcaatcgatcaatcacactcatactccttctctcacccacccactcttacttacactcacccactcacaaccacacacacacacacacacaaattggtgagtgttttgttcactgtctctatctgggtggatgtagagattggtacagccacgcatatacccacttattccccgttgagaacgatccggcccggcccgggggggggggagagcaaaagaaaggaaagaaaaaaaaagaaaaaaagaaaaagaaa

SEQ ID NO: 1620 - DNA, 584 bp, Xanthophyllomyces dendrorhous
ctccatcgcattccctccatcgcgttccctccatcgcgttccctccatcgcgttccctccatcgcatttcctccatcgcatttcctccatcgcatttcctctcccatcacactcacactcacactcacactcacactcccaaccacctcttaaccccatggccgaccgatcacgggcaatccggaaatccgaaatccatccaatccgatcggactcgcctgacgtcaacgcgaccgaacgggtcctcgacgtagaacaacacatcatgtctggtatcggcgccattccctccatggagggctcccacgtcactctcgagaagaacactctcatcgtcggtaagcaccgtccttgctttcctttcctttcctttccacattctattcttctcgtccccatcaataaaacacacaaacacacacgcacacacacacactccttaaaaaagaacatggctcgccgatgagaaagaaaaaaaaaacaaaaaaaagagaacccccatctattcataccggcaaacagaacggcctttgtcattggccagtgcatacgtgatcgacctcgatatccgaatagtttactaa

SEQ ID NO: 1621 - DNA, 3436 bp, Xanthophyllomyces dendrorhous
ctctccaacagaccttccccgctctcttcaagctctacaaacagggcctcctcccccccaagctccacatcgtcggttatgcccgaaccaagatgaaccccgaagagttccacgagagggaagtcagctacatcaagccgcccaaggaggaacaggaagtcgtacgttcacatctggttctttcatctcctaatctttatcctcacccgtccatcctttctgggtcttcccccccccccaaaaggccgaccacgacaagaagcttgaagagttccaaaagatctctacctacgtcgctggagcttacgacgaagactctggcttccaggccctcgagagccacctcaaggagatcgaggacggttatgagggtgacgaaaagaacagagtgttctacgtacgtctgctttctttcttcaactctctagcttggcccaaacttgacattcctctctgcttcctttctcttcaactcccccccccaaaaaacaaacaaacagatggccctccccccgtccgtgttcactacggtcgccaagggtctcaagaagaacaactactctgcctctggagtaaacagaatcatcatcgaaaagccgttcggcaaggacctcgagtcctgcagagaaatgatgcaggccctcaagaaagagtggacggaagacgagacattccgaatcgatcactacctcggaaaggagatggtcaagaacctgctcgtcatgcggtttggaaacgtctttttcgactcgagcttcaacaaaaactcgatcagcaacgtccagatcaccttcaaggaggatatcggtaccgaaggccgaggcggttactttgatgaggtccgtacaggcgtcttttttccattctattttcctttaccccttgtattcttcaacctattgccgtctttaaccgtgtaaccgaccgcgcgcaacggccgtacattctcttccccccactctagttcggaatcattcgagatatccagcagaaccgtgagctacctttctcaccttggtaaccttctcgtgatactccgtctgaacgacttgtccctattctgcctttccctctgcccatgcctccatcccgcctttaaacagatctcctccaggccctcagcgtgctcaccatggagcgacccgtctcgttctctgccgaggacatccgagacgaaaaggcatgtcctctttcctttgaccagttggcggttcatttaactaacatgtctgcctctctctctctctctctccctctcccctttcaaaaaaaaaccaaaaaaacaacccccctaattaggtcaaggtcctccgggccgttccccccatcaagaaggaggacgtcctactcggtcagtacgtcggcgccgacggcaagcccggctacctcgaggatgacaccgtgcccaagggttccaactgcccgaccttcgccgctaccgtgctctacatcaacaacccccgatgggagggtgtgcctttcatcatgaaggccggaaagggtacgtctcttcttttttctccactcactcacccgaccgaaacaaccatcctgctcggggctgacttattgatcccaacaaaaatagctctcaacgaggcaaaggtcgaaatccgaatccagtacaaggacgtcaccggtggaatctttgaaaacattccccgaaacgagcttgtgatgtgcgctcatctcttttcttggtcttgtcgcgctcgcaagactctgacacttattcgccctctggccacctgaatcttttctcaccctccttttttcttttttctttttcttgctctttttccatagacggatccagccctctgaggccatctacctcaagatgaacacaaaaacccctggattggctaccagggcgatgcctaccgagctcgacttgacctacaagcgaaggttctccgataccgccattcccgaggcctacgaggctctcatcctagacgccttcaagggtgatcactccaactgcaagtgttttcttctttttttgttttgttttgtttcctttttttaatcccacattgggcggactttttagcagagactgacttttgtcctcccctccttaaaatcacctccagtcgtccgagatgacgagctagataccgcttggaaggtatgtcgaatcatctctccgttggcatgtctcgggtcaaactgactttacgcgcgtccaacagatctttacccctatccttcattggatcgaaggcaagtccggcgaggcccccaagcccgagtcgtacccttacggttcccgaggacctgccaacatgtgagctccgcttaatgatctctccttgcccttgctgaaaaggacgctgaccaggggttcttctttcctttccaacagtgatgactttgcagagaagtacggcttcaagcgaagtaaccagggatagtacgttttgaatgtcctcttgaatttgacagtatcagtatttatttttggatttgccatactgatctggggtttcttgggcttttccgccgaatcctactcgttctctttagctcttggccgacgacgaacgtaagcgagttgaaacactgaacgcatcattctccctcttccctcttctccaatcttagagtcagttctgctgttctcccttgccttcttttgtccttttcattctttcctcgttggccttctcgagtctttttgtggttggctttccagagagaaagtgcgtttggctgaacaagtttctttttttctttcctcttcctctttcagatcgcccagctctcgcggttgtgaaaaaaccccatggcagcctttttctttctctcgtttgttttctctacatgtcttccgtagtttgctatttttcttcttcctttcatgtctcgtgtctggagtcctatgtcccttctcctcgcctactgccgtttctttcttttctttctctcacttctcttctttgccgcttgcgttcaagttgatgaaacatgtttcgatagtttcccctaaacagtcccctcccccttgccccttttctggcctttctgatcttcctttgacggtcatcggtcgatcgtctgcctggccgtccccgttcctcgtgctttgtcgttctctttctttttgttctttgtatgagatggaacgggttggtcggtcgttcggagaacacaggctgcgcatgaggatgaacggcggagagaagccggaagcgggcaagaggaaaaaagcaaggccggaaacgaaggccgaaggggaaaaaagaaaaaagaaaaaaagaaaaaagaaaaaaagagcaagaccagaaaaagaacggatgattaatggatgataacttttatagaacggggcaatgcgtaagctcagagtggatgagaagcgcaagcggccgactgactgactgactgactgactgactgactgactgatcacccatccatcctcgggagg

SEQ ID NO: 1622 - DNA, 579 bp, Xanthophyllomyces dendrorhous
ttgaagaagcgcagggtgagaagaaggttggtcaacatccgagaacgattagtcaacgttacagagaaactcatcttttttttccttttcctttcccttcctcatcatcatcgccttcagtgactttcgttctctctgcgttcttctcgctcgctaacggattctcgggctcggaaaggatgaaagctaaatgtgtttaaaatagaatgaatataatttcctcctgttttcttcttctttctctacttcttcctcttgatcgtcctcgaccgttgacccgttggaaagacacaccctccttccgtcttgtcttctctatcgccttgtgctctcgagaacgtcgtgtttgaccgacctagactcactcgtacatctactcacatactgaacaggacatggtatccactcaacgattccggttcttccgttctcagaaacacggtcatgaacttgaacatgaacacgaacacgaacacgaacacatgacgcacccaacgtccgcctcctcaatgccgccaccaaacagaacgacaatgacgacgacgatgacaccaccaccaccaccaccaccaccaccac

SEQ ID NO: 1623 - DNA, 14469 bp, Xanthophyllomyces dendrorhous
atcatcatccttgcccgagccctcactcgaacacgaaccggtttaccaggcccctctgaacttactggctgcgttcagatcatgggtcaagatggacgagccagaggccgagagaagcgagcagaggatcttgcgacgactgagtttctagtttggtcccttttcccgttttctctttctttccgctcttcctactttcttgctgttcgtgtctcaagactgatcgctcttccctcgttgtcgctgttgttgttgttgttttctcgtcttctcgtcttctttctctcagtcgactgccggatgagccggatcccgagtatccgtcgctcgtaggtcggtcttgcaagatcccaatctcggatgggacgtacatgaactgtctcgagatcacttccgtccgaccgccccggacgtcgacctcggaaggagcacatgaggaaggggaagaagaagaaggcgaggcaaacgtgttgatacacgggtacggcatgggactcggtttcttctactggaacatggaagagttcgcaaagatgagtgccgcgagaggacggagggcgtacgtgatcgacctgatggggttcggtcgaagctcaagacctcacccgaaagtgtttctcaagaccaaacgattgtccatcaaggagaaagtcgaccttgtgcgttccgtctcttgttgttgttgttgttgttgttgttgttgttgttgttgttgttgttgttgttgttgttgttgttgttgttatcttcttctttccttcgtgaggacgtacccatcaaagcaggggaacgaattggctgacctacctacctacgtgccctcctcttctctcctttacctcccccctccctctgcgcgcacaggcggaagactttttcctgaagccactcgaagaattcagagtgtccaaaaagatcaccgccatgcatatcaccgcccattcactcggcggctacctgtccgccgcgtatgcgcttcgatatcccaacctcgtcaaggcgctcgtcctgctctccccagccgggattccttctcttcccccatcacacggtccgtctggcgccagcgccagcgccgggaagacatcagcggacgacagtccggatggagcacagcacaacagggcgtccgggaaatcactcgccgacaccctcgccatggaggtcgggatcggcccaggcgagatcgagcccgggccgagggagaacagatcgagcagctgggacgtcggtcagaacacccatctcggtcactctggtatgttcctcacccgagactccaccgatcccacggcccaatctgacggagatcaagacccagaggacgatgaccacgacgacgacgacgaagaagaagaagaagaaggcgagaaaaaacagcagacgttcaaaggacccctgggaaagagtgggaagctgacgagcaagctgtatgcgtacatgtgggagtctggtctcagtccactgggtttcatcagaagggtcggtcctatcgggcctctcatgatcggcaaagtgagtgtctctccgccttttgctccatcgccgttcacgccaccacagagttgaccggaaaagagggtgcgctctcgctgctgcttcttctttcttcttacagtacgcctcacaccggttcgcatcgattgccccgtccgaggctgacgatctggcgtcatacctgacaaacatcacctgtctgcccggttcgggagagtacagcgtagggcttcttctccgaccgggcgcgttcgccaggtttcccttggtcgataggatcgcggggatcggcaagtcgatccccgtcacgttcgtctatggagagaaagactggagtgagtgtcgatctctttttctactctttcttcctttcgtttattgttttacgtagagctgatagtcgccctgctctcttttctcttggctctagtggaccgacacggaggcagggcagctgtcaaggtaagctagcctctttcatcttttccaatgttggttcgaagaaacaagctgatcttacttgcccccgtctccatcccttctctctctctctctttctctctttcacaaaaggctctccgcgcggttggcaacagacgttcccaagtggtgatctgtcctgaagcaggtcatcacgtatacatagacaacccagaattcatcaacagactcctttgggagaaactggccgggccgagctcatcagacatgccgagtccgatggtctcacctaccagttcggcgtttccctctaggagtcatactcgaccctcgtcgcctctctcaggtcaggtaactcaagacccgttggcgagcttaactaacggtggtggtggtagtagcagcagcaattacagtactagtttggatcaacgattcccgtcgagctcgtttgatctgggcccacacaccgagcatagactgtccgtctgtgtgaactgattgtctcttcctcttccttttatttattcttatttctcttatttgcaactttttttttcttctttttctttttcgggtctcgtctgtatctatatctcaagctgtacgcatctcatcaacttctcctttttcttttttcctcttgaaaagaaaggggctatatgtatatatttcaaaaccagttttttttttccttcttgcctcatgatctccttttattattttatttcatagaagtcattttctcttgcatctcctgtttgtatcggtacatatatatgttattctctctgcgtggccttttttttctctttcgttttgttttgtttttgcaatagacaaataaatccctctcctgatgatggaccgggaaaaaatcgccagagagagagagagtcaagagatggatagaaattagaagctcaagccggtcacgcgagggcttagatcatgtccgggtgaacggccggccggccgagtttggcgatctcgccctccgaggaaaacatcccccatcgacactgccttcttaaacgcttgctgtactctgaccagaccggttcttcctccatctcaccaagaaacggaaccgaaggaaaaagaaaaaagaaaagaaaagaagaacacgaagaagaagaagaagaagaaaaagacagcacaagcgattccctcttttgaaagaactagcgtctcctggacaagaagcgtgaacgaagaacaaattagacgaacacaccagaagagaacagagagaatcatggtcaagaatatctggctcgattgtgatcccggtatgtcgtccatctctccctccctctctctttctttatatgtatccatccgcgcctcaatctcgatcccaccggggttctcatcgtttctgttcttatgccttctttggaaaacgccgacccaaaggccacgatgacgccgtcgcccttctcctcgctctgaacttgtcagagatcaacttgctcggagtctcgagtgtcaacgggaactctggactcgaaaacacgaccaggaacgcagccaccttgcttgccatgttcaaagccagggaggacatgccgctggagagaggagcgaaagagcccattgcagggccagagttcaacgaaggagccggtaagacctttcgtccttcgcttctgtttcgtttcatttgactttggttgactcctctttgtgcatgtgtttgtgcgtatgtatgtctctccctgatttgatatcgatgctaacagccgaggctatccatggcagctctgggtacgtacaaatcatgggatcttgatgcaatctagagagcaactcctgaccggcgtgctctctttcattcataattgctgccagtctggacggcgtggaactcctgcccccactgtctgatcccagggttcaacacttttattccaaggcgcccgcagggaccgacacggccgttcaagggatggcccgggccatccgagattcgtggaaagacggacagggcgagaaagtctggatcgtcgtcaccgggccttgtacaaacgcggcgagactgatcaagatggaggaggacttggtcaaagatgctgttgccgggtgggtcgtcatgggtggttctttcggtgcgttcccttcctcttttctccttttttgggttcaccacgtcttgtgtcgttgagacctaccgtagctgaacccctccctcccccctttaaataaacgaaatatttatatatatgttacataaacccctccttggcctgatagatatccctcaatggacacccgtagcagagttcaatatccacaccgacccagctgctctgtccgagatccttcgacccgcgcctttcccgccggtcattctcgatcctctcaacatcactcatagcgcgatcttcacgtctgatatccaccaacgactgctggatccgaaaggcaagaacggatcggattggcggaagagaggggagagtgatgtgagatggatgttgagtaccctcctgacattctttgtcagtacagcgttccgttgatcttccctctcctttgctctcttgtatcatctgactgactaactctggttcgcggaaattttattggacgaactgactaggctgatacgtatctgaaagtgttcgacttcaaagacggtcccccgatacatgatgcactctgtgtggcctgggtacgtcccgcccatcctatcctatctcgtcctgtcccatgttagtttctgcacgctcactcaccgagagtaacaccattaactttttttaataaagctgggagacccgtcgctgttcaaaggaagatggtgtgatctcgaagttggctccatcgatgaaggatcggccggtagaggtcaaacccgactagtcaaaggaacggagtggaggaacggttcgtttgagcatggtgtcttaggaaattgtttcgttctagagacgctggatgtaagttacctttctctctttctttctctttcttccccgagaaggaaaaaaaagaaaaagggaaagacacactctgtgtagaattctttgtgaaacaccgaactaatcggtctcctcttccgcttgtcaacatggatctcaagacatccaccttctggaacatgttcttggaatgcgtagataaagtcgaaaaaaagattcaggcttgattggatcaggaatctggcctcatctctttattcgataggcggaagggtacaggatactctcccctcggacaaggggaaaagcgtggtcatccgagttctaaatccaatgtgttcggctacctttttgtacctgtatttatatatttatatccttctttctctctttctctggaagaaataggggaaaaacaggaactgcatgtatgttgtagatgattcagttcggaaaaggatgtgtggatttcaattgcactctgtcttgaagcaacttcgtgcaaagaagggaaagggtagccaagaattccatcccgttaaaggttacaacgccatgattggcacaagagacaaagactagagaacacagaaaacatagaagacaaataaaggaaagatcatcaaggacaaagctaattctcgactagatcgagacaaaaagatgagtaaaataggaaagaacaaggattgcccaaatttcttctcagagcaacgacttcatcttgtatcccttcgcatcggtgatattcgcctcggattcagcataagctctttggagctctgtcttaaagtgatctgcaacctgctgccgcttgaactatagagtgggacatcatgaagtagaagactcaaatcagtcagaatctcttaacatggacaaaggcaacaaaacggcgacggaccttgaagctaggagtcatcacatccggagggaaggggtcgttgctcagatggatacctttaaccatctcatatctgggtataatgaaaaagtgaataaagcagatgaagtctggtttcctaggattcatatgagccagtcttgaaacaagacacaacgaaccctttcaatcctttcgagcgggccaacttttctagagatttgatgatctcgttcttcaagtgtttggcatcctctccgtcttcctggatagccttagcgacatggtcagggtctttcagacgtcgaagtttggagtgagcagcgctttggataaactgtacggcttgttgaggatcttgttcgtttcattttatttattacgtggacgatcgattagaaagaatagatgagtacagccctctctcttgctcatgcggtgcgagatcgagataagagcaatttagttcgactaaccaaccacaccgactccgaccaagtggttcttgagaggatccccatggacatacatcgtcgtaaagaccggatgcaacgaatagacaccttccacactctccagagcaacatactctccctgagccaacttcatgatgttcttcttcctatcaatgatctattgtcaatgcaaatatatggacaagggcgatcagcacgagaacgcatatgtatcaagcaaattgatattcagactgaccttgaagcgaccggcctcatcaacaatacacacatcacctgagtacagatcaagcacaagtgtaaaatatcagtttgttgaactaaattggtttggatttgaaaaatcgcatatagacggaccagtatgcatccagcctgtaataaacacagaaacagatccatcaataacattcctcaaaacgaatatgcacacacagaagaagtgcctaccgtcttcgtcgattgtttccctagtgtttttctcgtctttataatatccactctgtatcaggaaaatgcatagacaacgacaagggcagaagcacacactaatgtaagcccaaactctttctcctatcaactagatttactcacaaacacgttcatccccttaacgcaaagctctcccctagggaagggcttatccttagcagagtagcccatctcagggatatcaactagcttaaattcgttgcagacactacattcacatggtttacatcagttcagatatttaagaagaaagcattcaaggccaacgaggttagactcactgaggcgggccaattttgccgcttgcatctttgtcatgagcgttacctataaaccatcgtagcatgccaatgagatttcatcaagttgatgaagagttgataggcttaatagaaggaacagccatacccttagacccagttcccacagtctcggtcattccccagccctccgaaaagttggcggcaaaggcgactttgagggtctcgaaaacatctttcgaaataggagcggaacctgtcgatatagtgagggctcagaatagattagcatggtacacacaacgagctatattcaaaccggtttgtcgtgctttaactcaccagaactcatgtaaagaatccttcctccgagtagctgagggagctgttatcagcacagatacaacgcggaacaagtatcgagagcgatatcagcagcgagaaagccgaaagacgcgcgtgaacgaaaaggagacacaccttagacaggaagagcttgtcataaacgggatgagtgaaatctcccgtctgatgatatctatccaatttggcattgagactcttggtaaggatggcgcctacatatgaccccatcatcagactggttaggaccaccagcatctgggactttggtttagaactttcgaaacgtgaatatacctttgattccaccaccattggcttgagcctgaaagattgatatgcggtagctttgatcagacccgaaatacatttctttatcagtttggaaaaacctagaagaacgaaccatgatggctgcatagattcggttcaacactctaggaacacttgggagaatgtggggcttaatgatctggatgtcctgcaaaagtcgaagagctacaaagcaaagtcaagccggcgaaggcataagtcaggtctagtttgaacaagattttgtgctaagacaacactcactgtctccagtactgtatgcagcagcacctcgaaggaggattgccatcagatccacgaatcttccatatacgtgcgacaagggaaggtaggaaatcaaaactattcctcgaccgggtaattccgttccataggtctgggctatgatggcagtggtcatatttcgatgggtcagaacgactcccttggggtttccggttgtgcccgatgtgtctatggtggtcaattcgaaacaatacagtgagtaaagtatcgaatgcagagaaggctgcataagaaaagatatagagtcacgcacagctaatggtagctatcgattcaggctttggaaccatggggtctaacaagttggctcgacccaggaccctcacttgagagacacatatacgaccgatatgttagccagatgaacaagttacaacgaagatcatggcagtacgtacatccatcgaaatcgtctacaaaaacaccctctcgccttccccattctttagccatctctccctcagaaccatacaggctctccatgcaaatcacagctttcaccgaaggaacgtcaggtagaagcttaagcattgaaggcagatgagctaaagagacgacgatgatggacaatccagcatgatttgatctgaaagtatgctcgaacatttcgcgcgtgtttagtaacgaggcttgaggtgcgagatatagagggtcagtatcactcacacatattctgatgaaggcagccattgagatgtgaccaggttgtgattgatatcagcaaagttaatcaaaagagccttaaatgaagtcataagcgaactaacgagtagcagtctaaattgttgaagttatcatcaacaatgatgaaagtagaacacgtcagaagagaggtgaaagagcgatgcagtcagtcgggcaaggaataaggagaacatagactgacaggtccaagggtatcgtatagaggtactccgacgagcgaaaaagcgtggcagcccatatcggtgatctgccactcaggtctgtttccactccagataccgacaccccatccaccttccggtccagaatgatggggatcgattcgttcaatcctgctttggtcgccaagaatacccgctcggaagagatgcatgaaagcagaaccaacctatgagacggaatcactcattcagtaaaagataccgatcaacttgatttgttgaagataggagagatagaaacctacctccatacgagccttctcaacttcaccatagctgatccattcgagcttgtcggcgtaagtcactggaagctgtcctcgaggagaggttataggtatgtatcccaacccattgtcgaatggaatttcatcggtcactagatcagaaacaacagttacaacatatagagttaacaatccgaatcaaacccgagtgtcaagagaacagaaccgaaacgtgccttgtttagtaacctcgtataaagtctggggtttaggcttctgaattaggacagactgatcagggtacagtcctataaacggccgaccattttaaaagagaagaattgttcgttaaacgaaatgcattagccaatccaaactctcaagcttggagacataaagatatccaagaagaccttacggtttcggtagtgtccggtttgaccctcctttctagttccaggtacctcctttgatgatccaatcgaagcccgaaatatatgcatgtgagatatattcatttaccgagacagaatgaatcgtcaatggaagaactcttcaatcagaagattataagaaatactgacaattgcctggctattgaaatcaataagagaagcatcatagactggatataacaaatgggaagggatcggattgatcggatggtgtttaaaaacttgatcggtatgaacttgagcagtcattgtaataacaaacgaagaagtagtcccaaatgagagatcgataggcgtgtaatctccttttaagaaagatatacaagagatataggttcaggattgggatgaagacgaaatgggatgaagatgaaagtggaaagggaaagaaaggaaacgttgatgaagagagaagacaaaggagagaccaaatggatgatgtgcaggtcacctggcccggaccgaaccgaaccggctttgtataaccgagcacgcggtttacgccgcttcggccgtctgacttgtatttatggtcgacaaccgatctagtctacattttctttaagaggtgtgtaagaatccgcatgcgtacgggtatatacacgtaaataactagtgatcgcctcagaaccacagaccggttcccgtcggccgttctatcggcaagtaagctatgctgatgtacagacgatctcaggtgttaaatgtcgctcgttcagagatactttcattcaacaacagcaatcatgaattgtctctagcgctagagctaatatcgagatatactttctcttgaggtctttcctccttctaaacacgagtatgagtacgtaattatgagagatgctgcaacaaattaaatatcaccatgttcagtcacttgtgtactcatattcagaaagtcatgttcaacgtaccttttagatactgattctcaaggttgcttgttaaatcaagacattttgttgatgatgaaaaatacatagaaagatgctgtatatacggacgatcttcttgctcagcgcaaccattttatttaaatcataacgaacaaagaggaactcacatggaagaactggccaaggtgagtacgtctacgaagaggctgcgtaggagtagaaacaggaaagggaggaataattatttactaatttagaagaacaggcctgctatcaggcgaacaatctctagcgcaactattaatcaaattcacaaagcgtcaccgaacggaagagcgaataggtcagcgaggaagaagaaaaagaaaaagaaacaaaaaaaaagaatattcagtgcgcgttgaggtataatctttgatgacaatgcttaatagatcaagtaagccaagttgacttacggcctccagccagcaaggcgacaaatcccaatgcaacgatctttgtccatttagcgtttgacgtggcagcctctttggctcgtcgttctgtagtagacttcttggcaggctgtcgctggccaaccttggcagcaaatttcttgagaacagtagagaaattgtatcgagattaagatttggtgagttcttgcatctagatcgaaagaaaaaagaacagtaagaaatatatcagatgctctacctcgtttttaagtcggatgtcagcagcggtaggctgtaataaggagtgtagatgcgaaacaagcaatccgaaaattttaacacacattcataaaccaaccgcactcaagcacagacctctgaggtagaaacttaccatgactgggacaaccaaataggagggagggcgaaaagaaagagctgaagcaggtgggagagtgtagggaaagtgagatggcccgatgaagataagtttgaatacttaatcaaattcaaaaagtctccaaacaacaaagatagtccgtccaatctcattcaacaccttcctctgcttctttctcaagataatctcgatagggaaagaatctttgacagctcgatactcctgaatccttacactcgatatctataaacctcgtttgatcatcaaacgatcatttcgaatttagaagctagcgttcttttcccaacttccgacagctatcacctatgctcagccttcctttccttcttcctctgctctcgaccgcgtccttgcttgtgaaagctcacggaggtggacacgcaggggagaactatgatagccacggcgcggacgatgaaagccttggatatgctgaaagacatgtttgttccttcatttctttatccttgttttcgctgtgtcttagagatcgaacgacgtccatatgcctagaaggagaagggcggaaggacatgggcatgttggacgagaaaaagtagcatttagctaattctacttttgctctatcaaatcatcaccagatgcgttccgagcatcatatgtaagcattctgcttgaacagtatatagctcataagatccgcttaccaattgtccttgtcttccaccccccaaagtgatgctttcgatcctgaagccttgtacgtataactttgagaattcatctcctcatggagcaggacccgcgtttgaccgatttttgacaatctaaaaacatttgtatcttccaaagcttcgcccttcatgatctcaaccatgacggagttttagataaagctgagatcgaggcgatctgtatgttctttcgaccatctcagtgttgtttctttcttttgtgtttcttttttctctctggcaacaagatgtatttccaatatgctgactgttctatttactccctcaatcatctccacactctatgttgccttaagacggacttcatcatgatatctccaaatctaactctgcctctgatgatactcactcagccatggccaaaacggtagttgacaaggtcctgagtatcatggatcgagacaacgatggtttcctgaccctcagcgagtttttggcggctggcgggagcataagtttgcccgacttcaaaggatttgaagagcttggtcaccactacgatgaagaaagcgaatagtatgtctcttctgtttctttctgtgttcctctgatgaactgtatggcgcaactcaacctgcatctctcctatcttttcaattttcctacatagcttcttgcaccacgaagagagatatcacaacactcctgagacacaaacggatgaagcatataaccacccggaagatgttggtcctttttcaagtctcttgtcgagccatcactctttcttccctttctcttcattctatctcacttaacactcaatctccttttcacacgggcccttctctttagatcgctcactttgagcaccacgaagccatcgagtctactgaggatgaccggattcaaaagtttgtcgagggagagactgagacccacagtgaccttccgcatgatgccaaggttgctgccgcaaacaatcgtgggagttcgccaggggcatcagctgcagttgagccgccgaagttgagtcgacaagaagaattaagaaacgagcggattttggcagagacagaggacgaaccgtatgggatgggtgataaaggatacgttcgaccccgaacacctagggacaagttaagacgaaacaccccttacaaggttcgttctcattctgtcgtccttcttctatatttctttccctgtgtcaagttgagtctgatcgaagtctactgataatgggtttgctaacctcattctggttttatggataaacagtacaagttccgacgaacccctaaagaattttaaaacaatttgcgaaccagcttgtcgatgtcaactgttttttgttcttagaaagcggctgctcaccaactcttctttccctgtccttcatcttccctctcactttcatcattgattgcatgcaatcttctcagttcatcattttcatctgtgactctcacttgatctttgtctattctttcaaaaacattcggccagaggttagatgttttgaccataaaaagaacatattccattcggttttctttttatccacctttatttctcattattttcctgtcatctttcatctcgtcacataggctcctatcaagtcgtttactggccctagttctcgcttctcactatattattcaataaatcgtattcttgtcccgcacgcaggtttatggcctccatcaagcgtcccaagatcggagtctatccactctattatcaacaaacgggaagaaatctgagccgagactcttttatgtctcggagacgcggaagaaccaaaaagatactccgaactgacaccactgaatatttcaacatactgcggtgaaaaaaacgcatgtaaatagacttcagctaaacaagagtgagctttcaaagaaatcgagatgatctgaggaaagatgagaatgtgccacttgatgaaaccaggagcatattaaaaaacatatatggataacgatggcaaaagaggtacagtatacaaaaacccgtcctgtgcacacgcgctggtgcgttgcttagaggacggagaacagctacccggcacagcggccagcagcagtgaaggagccgggacaaactgagaataaagcatgacgagacaaagcgaggcagacagaggggcctagacgacaccaacgacgacggcagccgtctatgcgcgctctcctcgcagccgccgggcaagctgcaggtccttcggctggatcgtcactcgcttcgcgtggatcgccgccaggttcgtgtcctcgaagagcgacaccaggtacgcctcggacgcctcctggagggccatgacggccgacgactggaagcggaggtcggtcttgaagtcctgggcgatctctcggacgagccgctggaaggggagcttccggatgaggagctcggtcgacttttggtaccgccggatctctcgaagggcgaccgtaccgggtctgtcgggggacggacgagg

SEQ ID NO: 1624 - DNA, 1170 bp, Xanthophyllomyces dendrorhous
cttcacacacacaccctcttggtcacactcgatcacgcgcatacatccatcctcaatcacgctcactttttttttccttctcctcgccttcttgcacattgcccatcgtccatcgtccgtcgtagtagcagcaacagcaacaacaacaacaacaagacaacagcagcagcaaggcctcgcttgttctcgtctcgttcccctccctctctccctatctctctctctctctctcacacgcaccctcacatcggcatccaaaaaagaaggaaagaaggagagaaaaatccgcattctttctcacatacatattctcacacgaaccaatctctatcgcacctactctcacccacaccatgcaacccatctcaccaaggctcacctcggtcggccgagctatcgccaccatccccaccgccaccaccgccaaacactttgcaacttccctcgctaggcagtctggccaaatcgaattcaccgaacctctcccactctccctcggcactcaccgaaagaccaccctccgcatgctctccaaaccaaacccggcacacccagagctctcaccagacgtcccggtcggcctgcccccgtccgtcatgtacgaacgctactttgacgctcgccagttcgaagactccctcctcccagacagaacagccctcagcaccgtcgccgccaggctcggtctcgacatcaatcacacagacaccgcagacagaatcctccaagccttgacccacagctccttcaaccagtccgccaacgtcgaccccaacgctgacccctcggtctcctcccccttggcctcctccgcttcgccctccatcgattttgcagcctccccttccaacacctcgctcgccaccctcggcagcacgatcctcaattttacgctctcagagtactactccaaaaagtttccaaacatcagcaccaaaggtctccgtctcatccacgccggactcacaaactcactcgccatggaggacgttgcagcagagatcggtgtcggcctccaccgaacgaccggacccaccagcaagcgagtcggtgactggagtggttccaaaggtgttcccgtcagatggaagcgaactgtttgtcttttttttcttttcttttttattgtttttgtctttgtttccttctctcctgctcctgcccctgccg

SEQ ID NO: 1625 - DNA, 2325 bp, Xanthophyllomyces dendrorhous
tttttccacagctcaaaccgagcgagaccgacaaggactactacctcgaggccatcacctctgccgtgaacgccatgatcgccgtcgtctacgagaaaaaggttggctcctttcctctcttgcccgcctttttcttcttctctgcctcttccttctccctgtccttcccaagccgaccttgaccaattctttatcttttctcactcctccgtccacagggtctgcctgccgccgccgctttcgtcaacgctcactttatctcccgaagcgtcgacattggctcgttcctcaagtttgccaacccaaaggccgtcctctcggatatcgtcgtaaagtacggcctggagccgcccgtcgccaggtcagtcatccataagttttcttctttcacttagctctctgcgcctttttgctcatatcatagccccgaatatcttgcttcctctccctcatcccaatagactcatcaaagagaccggtcgaatgagtcagacaccatactttgtcatagccatgtactctggcaagatcaagcttggtgagggttggggaacgagtctaaagatggccgaacatcgggtgagaattagtttctttccttcctccctttctgtctactcttcctttttcttccctcccccccttagagaaaccaaaactaacctctttgcctcctaccattcgcctttcgcctcgtctctctctctctctctctccctccccgtcattcttctgcaggcctccacaaatgccatcaaggccacctacctcacagagaccccaaacccggtggtatccatcgccgggttctcgccatacccactgacggacgaaccgttggcttcgatcgaacaaaagtacgcgttcgtggcgcctgccatcggtgaatccgaatcggtctactcttccgccttgaggccgccgagaaggtaccgggctagcgatcatgtccaacccggaatggagcacgtcgtccgaccgaaagcgatcgaagagggcaaggagatcacccaggccgagaggctgaagaggttgcagtatcagaaagaacgacaggtcaactgggaaaaggcagtcggtgacaccaaagaccaccatcgcaaactcgaacaaaagctgaaggaggtcaacgagatggtcgtcagatcctccaggccttgaactaaatataagaaaagatatgcatgaaactcttgggttctcgttcgctcgctcgccgtttattcttgctttttctttcttctcttttcttttcttttcgtttttttttttcttcttttttttctcgtcattttgaacatcaacctgacaagagcgacgtggcagctcaagcatcttgtatatcttctatacaacaagggaaagaaaaaaaaaagaaaaacatacaagcaaggacaaaagaatctccgcttgtgagagcgcacaaaaagacggacggcccggctactctgatctgcaacgcttctaaccctaacaaaacattcacccgtccatcatcaacaccatcaccatcatcatcaacatcagtaccaccgtccattcgtcgtcctgtttgtcattctgtcagtccattgagagaacatctctctgtctgcctaccgaacgacttgactcgagacacgcccgatcacatcacacatggaggtcggtcttgtacgcattcatacgcgctctctctctcttgcccttggtcatcgaagggatcatcagaggcgaacgtttcacagtcgtctgatggcatatcctccatagcatatccagttccccttcttcgctttgatctccgagtcctgattccaagactgacttttgaaatcttccttccgacgaatatccaataggacctgttctccagattcctccgccggccgacggcgagcagagagaccgggagatcgaaagcgaaagggaaaggaaaggacgaagaaggcggagggggggacgaacctatcgtcgggttctctaatgcctgggaggatataaaggttcgttctttctggatctgttcttgttttctttcatcgttgctattcctactgtcgctgccactgccgccgccgctcccagctggcttccggacatatggcatactcacccgttcgagccgccttgactgactgattgatcatgcccgggaataaacaggaggtgctagaacacccggacgaaagagctctctccagagggatccaatcgacagtcgtccctagaagaatacagtatatgatcgatgccctcgtttccgaatccaaccagacggatgaccagtccgttcgcctttcattctttttcctcttcttctcctctctctctctctctctctct

SEQ ID NO: 1626 - DNA, 4756 bp, Xanthophyllomyces dendrorhous
ctctctctctctctctcttgaatttacgtggccctagccgaagctaaacgatcgatcggtaaccctcctcctgatatccaaacagaacaacgggcgcctgcttggaatacctactcaaacacgacgtgctctccaccctcgaacggctcgcaggctcggacgaaccggagggcatcaaagcagaggtcttgatcggattcaatctcttggtcgccttgctcgatgaaaactttttggttcacaatgctgttcgttgaccctctttttttcttttctttttttctttctttagttttctctttcttgtcttgttcgatgttttctcgctcggtatatagctgacaaccaggtcctccttccccccccctctctctctctttctatcttcctcctttccttgctctatccttgacacgcaaggtccatcgaccgttgagaagacttttgagaagctgcgtgggggacgaaccggaagagattcatctggacggtcaggccaaacctatgggtgctgctgctagtgggagcgcgcagaaaggctcgctcgtaaattacgaaaaggatcgtcagtccccctcttgttctttcttggctttcttcttttcgaaccgtgacaaagtgcttgttgagccatcagagatactgatcgtgtgccaggaggttttgggttatctcgttttatcttctctctccctcggttcatttgcggaaaaaaatagtcttggagttgatgtgagtgtttttgtttgcttgtttgcttatttgcttggttgctgggtttccctcctccactatcgaggcgagttgctgatggcaagaggttcatacatctctctaaaggtgcatgctgtgtaaacggatccgatcctaccccgctcttctcatgatatttttccacgacaaatccctcaacgcccaccgtccgtcgaccgtcacccagaaacttccgactggatccccagaagacctctcgtcccgcgcgacgtctccctcaccttccaacacgctgaccgccccttcatcagaccacccggcatcggtctctcaaccgagcgaacgaaagaaggaacccgagttcctcctgtttgcatatctcctccggttcgtccatcgggagagcccgatcggcgagtttgcccgtgccggcctgatgttcctcctcgacatcgcgttctcaccctccgcttcgctctcaccttccccttcgaacccgtcatcggcaccggaagatcaactcagctcgtccgacccgttggaggatataaagtgctcgatggcagagtacatgctccaaggcgatttcccagaggtcctcggcgctggtctcggcgcggtgtactctctcttgccaaacaagttggcgatccgaccggagcttgggtcggacgcctcgaatggtacaggcggagggatgatcctcggaaggtcgacggatcatggggaacccggcgaggacgatgaattcgatgacggagagcggcaaggtcaaaccggacggtcgatggcggcgatgatcgagggcgaggattcgaccagtccagagttcaaagatcgactcgatctgttcctcaaatcgtgcgagtttatctcggacgtcatcaaccgtgcatccttccttccttctgttcaaccgtcgtcttcgttgtcatcatcatcatcatcatcttcatcttcatcttcatcagcagcagcatcaacaaacccgccgctggcatcaacctcagaaccgctgccaccaccaccaccaccaccaccaccaacgcaggcggcgacggtgctcaccggttatggttcttcgctgtcccgggcgatcttacgagcggttcgctcaacgttcctcgagcacgtgctctacccatcgatcctcgaatgctcagatcaagacggttcggccgtagcggtcatcgcgtacatcgacatcatcctctcctcgttggatccggagagcgcactctgtcagatgttcctcggattcctcataggatcggacgagctcgagttcgaagacggggacggccggtcgggatggacgggcaagctcggttcagacatcggtctcatcccgagatccatgggcgggctcaaggaggaccgcggcgagcgggagacgaccaaagtcgacagacggaagagtagcgcgatgatcctgttggaaaacatgcaggtccctcggtcggcggggaaccaacagtactttacctcccagggacaaggaagattcacgctcaaagatctgatcgtcgacaacatcgcttcttcaaacccgcccacggcgagtgctacgctcaggttgttgaacacgatcttgacgagatatccgaacgtggcgctccatgggttgttggacgtcttgccggactatcggtcgaccgtcgttccgttcgctctccctccgctgtcgttcgacatagacgacgacgacgacgatgatgttgtcgatttcgatatggttgcagatgatctctctcacggcgatggtaacagcgacgatggagacgaatcccataaatccgatctcggtatttcgcggctgaatcttccgacggacgatgtattcggtcaacctggattctcctcatcgaatcctacaccgtctctaccggaatctagcaaggaccgatgtccgtccttcctcgactggcctgttcctaaacgtctgatggccgccgctttcgatcacacccgagaagtcgagctttacctgtcgctcgtggcagatatagatcattcctaccagtcagcacacacgcccgttccatcgacgtatgagaactatctgcaggacgccatgttggcgatcggttccgatcgctcgctcacgaatttccagctaggccttctctctttctcgacagaacagcatccacccccgctctcgtcgtcttctccacatccacacccgcgttcctcgtccggagacgttccagctctcgcccgtaactcgaaactcaacccgtcggatccgttgcttcagctcgtcctggaccgtctgagagagttcttcatacacaccccagaggagaacctggcgctgacgggtgtgctggcttcgatcgggctgaacacgaacctttgtctggaaggatggttggtcttcccatcggacgacgaggtcgatccgtgggctgcgctcgaccgaaagatgaaagtaaagaccgagcgagctgggtccaagtccgtccgtccacaaggagacgacggtgagggtgagggggactctacgactctacgcgagaccgtcgttcggtcgggtgtcacagatgatccgttcgtcgagtccgactcgttcgacactcagccgatcttgtatgtgctgttcaaagatctggtaagcttctggttttgtttctattctttgttcgttcgtttgtgagagctcgagtgtgctcactcttactctctttttttttttctttctttttttttctccttttctctctcttcttttctcatttctattctttatttctacttggaaaaacaaaggttcggaagctcgaaagatatcggctcatggaacccaagttcgatgtctacctctctgagcgtcgtcaaggactctttttcgaagagaccatgaccgacattctgatggacgtttccgaacctagctggttcggcagcagcaacagcagcagtgctttgaccgcagcggctactcctaatgacttttcatctcccgcgagacccagtccgttctctcgaccacaagctccacagagactgatgtcgtcccctcgagcgggtggtaacgctggcggcggtggcggcggcggccctacgctacccactctgagatccaacgtttcctcaccggcaacccctcaagcgaaaaaaaccggatggtctctgttctcacctctcaaacggacacctgtccagacccctccggccgtctccggtgccgccaagccgttcccgtatgtgcctcgagtgatgcccgacggtgggggcgcaagtccgaggacgaacagacctgggccgtcaacgccttatgcggatcattactcggcgacgataggtcgcaaggtagagagtctcgtggctgacagtccaaagagaggggaatggagcccggctcgggtgaaacatcctaaaccgttcaaaccggcaaaaagacggatagggcccgtccatacgaacgacgtgagcgaggagtgtgcgtccgatgacggtaaccttggcgatggcgatggtgaggaggacaacaaggtgcaatcggtggatggaaagagagcagatcaaacggtccaggtgacgaccactcaagtctcgctctctcaagttctcgataacgtggtggtacgtcctgatctgtttctcctatccctttggctcttagactttggcgcgagcgacaactatacctatactaaccgtacggtcttcttactctttcccgcttggtcgatgcctcgagcagatcctcgaggaatgtctgaaagagctggtcgcgatccgtgtagctcgtttatcccagggagctgatacccttgtcagaacgtgacccgtctgtcatatagatttgatgtgatcctttatatccatgtgctcaagatttctttcttcctgctcttgcgctcattatggatcgattcaagtcacagaacatgaagaatgaaacaagtgatatcacatatatacatatacatatatttatttagaaaccaagtacgaaatacaataactcgtctcacgagcggagaacaaagcacgacgagacaaagcgaggcagacagaggggcctagacgacac

SEQ ID NO: 1627 - DNA, 399 bp, Xanthophyllomyces dendrorhous
gggtagggcaaggcaacgcgaggcaacgcgaggcgagacgaggcgaggcgacgcgtctgggcaggctacgtcatcggtcggacgcgtccagggcaggcaccgtccagggcaggcgcgtccggcggagacgagccccagacgaacgcgctccgggccgacgcgtgtgagcaagtcgcgtcgtggcttttcgcctcgcccgcctcgcctgcctcttcggcctcttccggcttgctctgttcgccgtgtccatgctctgagcggtataagaagacaccgagtctggggtggcagcgttctttccttctctctatcaccatcaagcacatcaccaacgcccactctccaccactcactctccaccacctactctccaccacctactctccaccacctactctc

SEQ ID NO: 1628 - DNA, 1398 bp, Xanthophyllomyces dendrorhous
tctcgctctgttctcgcgcttctcgcgctccctcgctttcttccccgctctctcgctctctccctcgctctcttctctttcccgctctctcttccgccttgtgtgatgcgctcagcagactgacgccgttgtctggccgtctgacgtacagggactcggaaagggcggcgccaagcgacaccgcaagatcctccgtgacaacatccaggggatcaccaagccggcgatccgacgacttgcccgacgaggaggagtcaagcggatctctgggctcatctacgaggagacccggggtgtgctcaagctgttccttgagagtgagtggtcttgttctctttttcttggtctgctggtcgtcgctgttgttgttgctgttgccgtcgtggctgctgttgctgttgctgctgctagtagtactgctgatgctgactacccctcgatctgttgcctcatccttgcctcatccttgccagatgtcatccgagactcggtcacctacaccgagcactcgaagcgaaagacggtgacagcactggacgtggtgtacgcactcaagcgacagggccgaacgctgtatggctttggcaactagacggacagagcagagcagggcagagcagggcagagaagagcagagcagggcagagaagagcagagcagggcagagaagagcagagcagggcagagaagagcagagcagggcagaggatagatggacagagcagagtcgtctgtggactgggctgagctgagctgggctgagctgggctgagctgggctgagctgggctgagctgggctgagctgggctgagctgagctgggctgagctgggctgagctgagctgggctgagctggactggactgtatatactgtaacacaccctgtactagatatgatgtatactctatcgcgctgaccgcttggggacacccggagagagacagcaagcaggccgagggtgaacatgtcgagatgggccgagggaagaccgagatgggcgatgagcgatgggccgagtcgtgcgagaagacggtgtcgagagacaggcggtgtcgagatgacaacgcagaacagagcacgatgcgagcgcactcgatgcagcccgacagaccggtgcaccccatgatgtgacacagagtacaacatagcacgacagaacacgacatgagagcacacggtatgagagtacatagcatgacagaacggtacgaccagaacagagtggaacgagcacagagtgcagccgtgtacaacagggaacagggaacagggaacagggaacagggaacagggaacaaaggaaaaatgacacgggcacagaaaaaagggaacagcaagcagcaagcagcaacggtgacagcaagagaagcaccagcaccagtaccagcatcaaca

SEQ ID NO: 1629 - DNA, 25064 bp, Xanthophyllomyces dendrorhous
gggcttggcgggacggacacggagaccgaggtcgaaggcttccggatctcctttcacggtgcgttcaataagtggggctctcgacctggagtcggttcaccaggggctggatcctctggcagccgacgaagctcggttattcaggataagattgagttcaggcgagaggcaagcagtgtgattcctcggagacaaggtcttaacctcgccactggccgagggaaaattgtccttcctgctgaaggcgaggacgtcatgctcgagcacgtcaacctggtcgacgacggaccagagaacggcaagctgtcgctcaaaggaacagtcgtcgtcaggaatatcacctttggcaaatgggtcaacgtcagattcagtacgtctctcctcgtttgactgatttctcttttgtttcctaatccagccttttgaccggtctcgttctattctttttttcgtacctttagcgatggatgactggcatactgtctccgaggtcgctgcttcccactcagtccacattcctgctacttctcttgggcctgttagtagtggatctcaaggatgggatcgattcaccttttccatcaagttggacgatgttcgacaaaaaatcaacgaaaagactctccttctcgccgttaaatactccattgacggtgggcaggagtggtgggattcgaatgcaggtgcaaactatcgattccagttcaacaagcagccctccccgcttccctcgccctcaattggcggtccaaagagtgtttctagcaagcctcggaagacctccatggaaggtagcgctttcttgcctctgttagaatcccaaggaattagtgttcagccacactatgctcctgggacatcacccatcaagaagccagccagcacagaatctcatgcttcgcccaaggcgcccacaaagtcggccctggtaggcggatggccgttcccggtatcatcctattcgtccacagctacccataaggctaagcccagtcctggaggaggtgttcagaccacaatgtctaccagtccctcacacatcactctcaaaaactattgtcctcccaccaatgctttggatcacgatcgaccctcctcgtcagcttccgccccttctcccaacgttctggccgttcctttcgcccagccaaagaaggtatctccttcgccttcgggagcatctactccaacggccgatcgaccgggtttccctcgaaagcgaacgtgggatcgagaggtcactccgttgacccatccaaaatcagtcgagtcgacctactttcttagcccgacaaagccacgatcgggtgtgtcgtccccgccgtccagaccttcggtaattgcttcgtctcctcaggtcagaaagctcgctctggcttcttcaggcttgcctagcccccctacaagtgccgaccagtcgcctcctagcccgggtcctagtcctttgccagagactccgaactctgccaggttagagcttagtcccggagtcgttccgtttgacctgcctacccagccgacaatgccaacgaccagccctctgttgaaagacaaggcagagcttgatgaaaagtcgagatctgcggcggatggaagcaagccggatgaaaatgctggatcgaactatgccgatttgtgagtcttgcttggttccttcctccttctctattttacttagcttgtgcactcatagactgactggagttggtcatttctcttttaagcatcgacaagtattgcttcttccgaggcgaggaagcttctccaccgacctcggttccatcgtcccacaacgcctcaccattgagtcatccttcatatctccctctgctttcccgcaaaggacagacgttcttttctccgacctcgagcgccaaaggatctggacagtctaccccgcagcttgttatgcattccggccagtcgtcccctttgggctacggcccggcacccaccgcctgggattcagccggccttgacgttaggctgggctcatccccgttcgtcccatccgaatttggaaagggatccttatggggacagaacggagaaaggccaggcactcaggataggtcttcagaaggaaacagcaacagaatggtcttctgttgaaccaaagcctcgtgtattcttcttctttcttcaaatcaggcatcatccagacgatagtctagttcgctctagacaccatattttatgctccttccgctctggcgggacgatttacccttcatatgtatagctctgcattgtagccttctctactttatcctccttacatcataattttccaacttcttttccctctgtgtatggtgttgcctatactattttttcttcaatttcaacatttactgttgcgtttctctcctccttatctgggcatcccgttgtttgtttgtttgttttttctttgtactgtttccttctttcttctttttctcttgttctgcgtacatagatctctcctctctacttcgttctctcttttctttcttcctagctgtaactacatctttcagatcttaaatctttctcctgtttctcttcttcatgtatgtacgtacatttgtctgttaatacatccaccctatcttgccttgtttcttatcccattctaactcataccgatcatacatcctacgttccttctttctcatccatctttcgctacccgttgttcgaaaacactcttttcctttttcttagtttttctcgttccgtgctgtgagatcgaatcatgacgactctcatgaagacaacctgaagtcaaaatgaagcaaagtctcaagtcatagatcgcaaactgaagtgacctcctctttctattcgttctccccccttttcccaagtaattcggtcacaccgtctacgatcagtctgggaggataatctctctcgattgaagttcaaatgatccgaccctgacgtttgtctgtttcattagtttccctttggtttccttctttctttgcctgatcgtccgtgattgtttcctcgttctcgacccccttcggtgttctcttcaacagagaagaagagaaaagaacatgtagatggagaataagaaagcaagatgtcgatggaaagaaaagagaaaggaggaagaaaagaaaacatctgtgcagagaaacggggttagggagcgggatctgggaaagaatgaggagagtaaggggtgagataaagagtggagggagggggtagtacatcgaacaaatacattcaaagttttcagtttttccttcttaaattatactaggcgaaaaaagaaagaatataacagaataggaaaatggatagaggagaggggggaatcaagataggagacagagaagaagaaaaggatagcgaaagcaggcgagctgagttgatagacaatcctatttggaatgaaaagagaagaagaaagtgtatatgtctgacggtgtcgttaaaggcatgtcttgaggaaaaaaggcatacgcagggtcggtttggaggaaaacggggtatgtgagattttgttttgtataaaagataacggatatgtttgaatgggtggaagatgcgacgggttggaaagtcaagcaaggggatgaagagaggataggcagaaacacgcagaacgtctcgagaataattacgagtacgagaggtgctctttttttctctttgtaaagtgagaaagtggggcgaacacgagagaacggcgaaatgtttttaacttcctctttccaaagaagaaaagcacaggtccaggacagaggaataagagaaggggaagacaaaatcgatcatccctccctctacatcgtacaggtcttgaacagggtcgtcagctctggactcctcgtcacgaactcatgggaccagaaggtgggcaacttgagcatctgaatgaacgtcaccaacagaccccaagggtgaggtctagcgacgaccactcgttcaagcatgaccctcgcaatgatctctggtagtttcatattgtcccctccgccagaggaagaagtagaggtaggcgaggaggaagacccgttcgggttcgggctcgattgaacgggatgaggaggagagttgaacagatggataattaggtgggagaagaaccaggtgtgcgcatttgggtatcgaagatgactagcgatcgacgagatcaaatagtactttccttcggcatcgagctcagcagccaacaattcatacaactttgccactggcgacgcggtatcaaactcaaagtttgccaaaccctctgcattcgttgtcgccgctaccgcagaagacccaacgaacaacacgacggcgttcaagaagggcaggttgtacactagaccgttcgatgtggcggtcatggccgccaaggacgatccatccgtttggtttgctcccccaacaggagtaacgattcgagctctcaaagcgggtaccagggccgggacggacctatccgagtagacgcaatcctccaacgccgctcgaagttctctagactggagtactgcgaagtaatcagacaggatgacggggacacggtgtttttccacgtcaccttcagcaaagtcgtacaggaacgggtttgggagcgaatgctttctagggaaagcagcgatgataacatttcggatctggacgcaatgagcgggaatgacgtctaggagggagtgatagtactcggcaaggaactctgggaaatcgtgaagaaggacaaggatgattcgcatggctcctttgtaaaacactcgggaagcctcctgcatcttggtcgaagaaaggaagggcgcgaggaacttgaacatggacaaaagcaaattgtgatactcgggccaacactaaatgcgatagaagagaagcggaaaagagcagtaagtacaaaacaaggtcgaactcaaaatgacgcaaaaagaaagagacgaaccttctcttcgcttccctgaagcaacttaggcataaagtgacggtgagatatgagagacatccaagagaaagcaaatccaggaagaagggtgggttgcagcatgcttaaggtgttgctgctgaacgcctggagacaacccatataggcagcggtatggatgctaggttcgatcgagtaaagatcatttaagatgctcgagaagaatctgaagaaaggtcgttgatcgaactcgtgttggaggtcttcatgtgattgaaccaacacaagaacgacgatcgagaggatcttattcaagtatctgattctcgactcgtccacctctgctccgtttggatcgccgtagtttttgaggagcaaagtgatgatctttgaaagagcgtccatagggatcaatgcagctgcgggttcggtcaccttgagcttggcgtaaccctcgacagacacctcagcacaaacacggaagaacaaaaatgtagcgtcgtcccccttcagaattccttgggcttggaggttggtgacgattccaacgaaggcttgttcggcagaaggagcatgctggaacattcggacccattcgagaaagtagaaagcgagtcgatctcgaagtccgttatcgtcgacacctacggcatgctgtccactagccgttggctgagcattcccagcgatctcttctaagaaccgaatggtagcgtcagaagcttttccagcttgggcagctcgaccaagagcctcaatacagtgtccaaactgtgctcggctggcacagggcttctcactcaataagcattcccggaggaactcaaccgtaaagtcaataacactcattctgagatcccggagaatgaagcttgatagctggacgtcctgctcggctacgttgatcaaaccggctcgcaacaaagcgacggtcacagggacgttgaacttacgctagatttataaagagaagggttcaagaaccatcagcactgttccctatccaatatttaaactaagagctaagatgttcagagagaaagacgcacctcatcctccgcatatatcaaccaagtagaaacttccttgtgaacctttgagaacgcctcacagagtctctgcaggatagcgacgtagacttctcttccaagcacagaatccgtcttgaaaagcaactgtacgaccttctgggagaacgacagcgcagtctcgtccctgttgacagattgagcggcgacaagagggatctgtaggatggcctgtcgaacatcatgggtaggtgtcaaggctgagagaccaggagcggtcgattgagcgaagaacttatcgagctcgagaaggagaaggttaaatttggcgattgcctgttccgcgtttgatccacccatgctggtggtcggagctgacgctgaattctcgagcagggcttcacctccgccagaggagggagagggtgttctgtaggtagctcgaccgccaccgctgacaggtcgagtacctcggtcgatgatgccagctctctggactttcccgtcgatgactgtcaatgatatcaacaaagtaagaagagaaaagaggccctggtcagaacctcttctctaaccgaatctacagcagagagaacaagagaaaacataccattagggagtcgagaaacgattgcaggagatttcgccctaccgaactcttcgtaaacctcgagttgctggaggagaaggccgttgggtcggatccgaagcatatcgggcaacatgttgatgttgacagaagcctgtgtcccatcccagaacggctggttcgtacgttgctatatatcaagagattgagcagaaagaataagcacatgataggcgaacgagttgaagaataaagctgaaaacaagacgcacttctcggtgttttcgtcgaagagcaaaggcaggcgtcaatgtctcgtccacatcgtacaccgccttgtcctgagcagctttcttgataacggacgctgcaaggtctaagttacaggtcaccacagcaacaaccgactcggatggaattgaggactttgaaatcaagatcgaagagatgtttagcaaaccggggtaacaattcatgatcatgactatcacgcatcgcaaagaagaaaagaatgaagagaaagatatacctcgttaaacccgttctgctgcaacaacgctctgacactcgtggtgatgctggttctcagaggttcttttgaagtaaccatcgccaagtttccagccaggttctgaaccatagaatgagcagccttcctcatctttgactcgtcgggctccatcgcaaaatctttggtaatcagatctctagaagaaattccagcaatcgtgactgatcgttcaaccactggaacgacgatctccctgacagcgcgttcgatggcagtatacacaattcgtttcaaactagcgtttgaactgaacggagcggtctccaaggggaaagacaagaaggagggaagttcggcgataagttcatccacctttcggttaagagcagcttgagcggcagccgccgcggcctcggtctggtacaactgaacggcagacattcgttgagacgcgtcggtaccgacgcctcccgctcctccgccagcggctccagcagcgtaacctccagggcccatggagagtcgttcaagatcttgaacgagtgatccaccgggcaaaccggaagcagcagcggcggcggctgtcgcagcctggaggatctcggccggtcgatctctgatgatcgtagtgggtacgaccgaaccaagatcgatctgaagagtcttgcaaagaacttcgatctcgaatttcaagttcaacttcaactctgccgtttgatacagctctaccaacaacctgatgaccgccatcagccaggggtttggtggcctaaagatctttgagtcgatgcattgttcgaggattttgcacacgaacggaatggctacgatcaaccgttttgcgtcgaacccttcgaccaagagatccttcaacgagagatgtttgaatctgatcggtttgtcccgagccaaggtcaacctaccaagccaagaacctagattcttcaacgtcgatcgatcctgagcctgagttaccgtcttttcagagttcaacagcacaagcgccttggcataggtctcgtacaacacgtgttgttccaacggagctcctcggtcgagtgactgaaggaactgcatgtagagaacatggttgtttggctcggccgacacccgagcggtgataaaataatgggcgaaccaacgggaatgtctaccctggaaggcgtctttcatctctgccacctttgtttcaaagttgctgggagcaagattattcacgataaacaaaatccgatctgatgtatcctcatcgggttcttccatccgttccgagctcacatcaaacgagtccaggtcgagcgccttgaacgtcggtgggggtggaggggcctcggcgatcgaccgaccaccaccgccaccaccaagggtaccgtcggcatttcgagcggcatgatccatgtcagccaacgtcgttctgacaaactcaattagatgaggatgactgtcatgcaaattctgaatgctgagaatggcctcgcagacttctggaaactcgtgcaatctggattggaaagcttggagggcggtgataccaaaggtgaagttcgagctgacggcttcaggaattgacttgagcgcgtcgatgacgaagcgaacagcgaccatgagagggattccgtccaccaactttcgaagaattaatgaaccaaacagctggcccgtcaacgagagctctctaggcgggtaggtatggaagaacttgtattcgtcaaatagagtatagagcatgcagctgaagatctgctgtctttgttcgtccggtgagtccttccaggcgaccagatggctgacaacggtctcgacagggatactctccgcgtcgtggtacatctgatggtaaatgttatcgacttcagcctcgatgtcctctgggaaagtggcgaccgtctctgcgtgggcatgttgtctgttgggaagtatgttcatcagtcgggggtatagttgaagggaaagaattcgaagctcgtcgagaccggaggtgtcgtctgcagtgccttgatggggggctcgatcaagttgatgaagaaggacgatgagagtatgaggagtgagagcgaccgtttgagcctcgctatcctgtcgttgtcgggcgagttcagaagtgaccttgtggagggtaaagtcaaacaaggccgaccggaactcgtttccttcaacctcatccacttcggtaagccactgtttattttatatccgaacaagaacaacaaatcaatattggcgatcaactggttcttgaaaacagagacttggtccatagaaagaaacacataccaattctaagtcagacagctcagtcttgaacgctagacaggccacgtccaaagcgagtgcaaaaggtcgctggccgagcacggcatcgacggcctgcatttttccagagtgaaaacaacaacgttagcatccaacccccaaggggaaagctcgttccaaatatcaacgaataatggagggaaagaaaagaaaccgaccttgacttgttgggcgacctcaaagataccggtgacattcatgtctgacgtagcgtagaccctagcaaagtattcgagcaacagatcggattccacctgccacaatcggagaaagaccactaaatgggtggcatagtgggcaaagaacatgttgagtagtcgggagatcagatccgcatgaggtgccggccagggtttcttcacaggttgagaaaaggacagaaggagggatgaaggtgcaggccagcacaagagttaggtgacatgacgatacaaataattgaaggaaggaagaaaattctgtctacataccggattcatgacgagaccgagaaagacgagctcgattctggccttcattccgttctcgatgatctccttgctcttttcgccaacaatctcgtcgacgtcttctcgtgctgctttcgcacagagctcaaagatctccaacgcgttccactgactggtagtgatcaaaccgggggcgtcgttgacatcttcgggggagagaatctttgtcaacgttgggagggccgcgaggttgaatgtgtctgggggcagagagagaagagcattgagtagagttagttgtgcggccggatggctcgtccacagtgggctcgacggggtggacggagtgagaagacctcggatgggcggtcggctcgattgggaagggataaagaggatcgagacaaaaattgaaaacaaaggtggggtgagcagggcgagaggtgagggcaacgagtcgaacgtctggacgagggccgaccagtcgatttgtccggttgggtccaagctgtcgatcgcgcggataagagaagctccatcggggggaacaactctggttggatctggtccgtcgagcaaggagtgaataagtccattgatgagagtctcgactcgggtctggagcgtgtcttcctcggccgaagcccaccatcgttggaaaacaactcggagtgctcccgggtcaaggacatctctgccgagttcaagaaggaacgagtgaagggcgatgtttgggatgggaagcgggatcgagccgagggaggaagcgatgaacatagggccaaacttgagggccaacgcgtggaaaagagccatctgttggggagcctcgagcaagagtggctcgagtggggagagcagggtggagagcagcagggtacccataccgggactgatgtcggcatcgtcgtcgaaaaagccggacgggccggaacggaggacatcgatggcatgggcgaaggagtctgtgatgatttgtctggcaggttcggccaatctgacggatcgagaagagatgatgcctgctccaaaggtgagtcgttctccgggtgataggttcaatcgggataccagtagcggtagggaaagtgttcgcgatggatccgagtcaggagcctgatcaatggccgtcgcgaaatgggatgctgtgacggaaaaattagggaagaagttcagaagagatggaacaagaagacaggaagaagaggcaaaaccgggaagagagagagaggaagagatatcagaagagaaaagaacaagggaggaagaaatgaagtgaaggaaaaaaagaagagagacatcagggagaaggggaaaacagaagaaagaaggagagaggtaggaagggaaggaaggaggaaaaaaagtctgacaacttacacaacacaatgtctctggcgactcgtctaccctccaaggtcatcaacctccatccgactagattctgagaagacccggttgggccagattgaagagcggcgatgttgttggcgaggagtctgcgaaggaagtattggtagatatctgggccgtgatggtcgctcaacgctctgatctcaccaaccctgctaccaaagttgtcctcgttgatgctgctgagaagaaagacgatctgtgctttgacgatgccgagcagattcctgtcctctgcccgttctctcgtgccggatggattggctgaggtctgaccattaccagaagcctggacggaagctgacgagttcgagatggaggcggtcgaggaaggggacgaagacgcggcgggggtgacagcagaggatggggccgcaccggacaaccctggcggaggcggaccccctaggcccggcggaggggcgagtcctgggggaagaggcggcagcttgggcggagggaagaagaaaaagagggtggagaagaagagtccctatcgatgagggaaggcagaactgaggatgggaggtttcaaaagtatgagattaaggaaaggtaaggacaagaggagaaccctgggcttgacaagggagaaatcacaaaagaaaaagaaaagtctgccaaccaagaagaaaaggtcaacgatgggtgtatatgtgtgttgcctctgggtttatgtatagcagatgggaccccagggagtgtgtgtgtgagagagtaagagagagcgagggggaggaaggtgagtgaacgcaaggaggagaaagatggacgaggcgaaaaaaaaagagagaaggcggccgatcgaagggaaaccagggctgaaaacggttttgtagtgttttgtaggaacttattaggaagcgctgtagtcattttgtggtacttttgtagtctttcgggaacaccacggaacgtgactatatgcgcatcttgaggtcaacacacatacatatatcctgtaaggcatcgtactacccttgttgagatcatcgtgtgaggtgctgtatgcagcacattgatgatttgtgtatgagagaagagaaggcagatgatcgcctggacggaaacgcctgatgtcgctctgccttctgaatcatctttccctctcatcagggtgagcaaagatggccatcatcgtcatccagatgctggccaaggcagagagtacagatattggaagatcgtacatgctcggaacatccaacatgctgcatacgctgtacgtagtagatgcatgcatatgttggccaaacggagtagacactggacaacacacagaataggcgaactacaaaccgttatagtcaattgcagatgattcactatagatcgttcactcagacactactactacgactactactacgttcatcatacacaaacttccaccttcacccaaaatccatagagggaccatgttctacagcactttataaaccctactctcgccatagatatcaaagatgtcgtacacaacacccgtaagagatgatgactgcaacgcgctccagagttcaccacaagaaagcccgccctagggatgaccccaagggcatggacacgtgtctgtggcgagtgtagccaaacaggctatgcagagctccgtgccttgatccatccgtaaccaatgggcccccatcggccctgccgtaaccgcgtccaatcagacctcgtccttcttcttccttccatcaacgagcttcaccaaagaccaccacggatcttccatcgtttcattcagatcctcagacgctctctctccccctctctttctctactacacatactcagagcctctcgtccgtgttcacgtaatccaatttatcatttgctctcatgctggccaccactgcatttcgtaggctgccattcagacagccagcatcgatcatctccaggtcgatcgctagctctttacctgccctggtcaggaagcctacctttgaacctctcatctgggagagtgagccagagttgccgactattgctaagaagagctcacgcaccaccgcgtctcacacggtcgaagggtcagtgtctgattcgcatcttttctcgccttcgttctcgccttccacattgttttcttccctcctctctcttacgtgtaatctcccgatctcgtctcgttgactttaccgtccctcctctcaatctcatccagacttggtaaactgtcggctgctgagcttctcgaagagaccggcacccgagaggatcgaaagatgcgtcactttaccgtcaactttggaccacagcatcccgccgcacatggtgtcttgagattgatcctcgagttgaacggagaggtatgtgctgccgtgttcttttacatttgtcgtacctcttcttctcggaatgaggatgttctctccgatctcaaaccgggaaccactatttctcaccgtccatcatctgctttctgttcaaataggagattctacgagccgatccccacatcggtctcctccatcgaggaaccgaaaagctgatcgaatacaaaaactacacccaggccttgccttactttgatcgattagattatgtatcgatgagtgagtctctctcccggctagacatcgtcttgtcaaaacttactaccggtgctcaacgacttccttttgacattcttctccttgccttcctggtcttattctaccctcatgtaccctcatcacatccagtgacaaacgaactctgctactcccttgccgtcgaaaagctgcttaatattgaagttcccgagcgagcgaaatggattcgaacactttttggagagattactcgggttcttaaccatctcatggccgtcctcacccatgccatggacgtcggagcactcactccgttcctttggggtttcgaagagagagagaagctcatggagttttatgaacgagtgtcaggtgcccggatgcacgccgcatacgttcgaccgggtggagtcgctttcgatctccctcacggtttgttggatgacattttcaagtgggccacccagtattcgaccaggtcagtctctgctcgttttttctagccaggccgtgttggctctatctcgttcttccttctcaacaaacttctcttttttttgtacatctcatagactcaacgagatcgaagaggttgtaacggcgaaccgaatttgggtccagaggactagaggagtcggtaacgtcagcagggatgaggctcttgcatatggattctctggtgtcatgcttcgtggatcgggtgtgccatgggatatccggaaggttgccccatacgacaagtatgacgaggttgagtttgacgttcccgtcggtgtctacggagattgctacgatcggttcgtcaacttccatcctgtctttttctttcctgtgggggcatgggttcttcttgctttcttgacctaacaacgagttctctcttcttttcattacttctatagatacttgtgccgagtccaggagatgcgagagtctcttcgcatcattggacagtgtctcaacaagatgccactcggtgtagtcaagacggacgataacaagatcaccgctcctcctcgtgcggcgatgaaagagtcgatggagtctctcattcatcacttcaagattttctccgaaggatactctgtccccgctggtgagacttactctgccatcgaagctcctaaaggttggtttccctttctcgtcttttctctttcctcattcgtccttcttattgatctaacttgcacgtacacgccctctttcttctaggcgagatggccgtttaccttgtctcggacggatcgaacaagccatacagatgcaagattagagcacctggttttgctcatctcgcaggtctcgactttatgtcgaggcactcttatctgccagacgtggtcgcgttgatcggaacgatggaccttgtctttggtgaggttgatcggtaacccacaggtgttttttccttgttatccgtttcttttttccactatcacattgttcttttacctttcttttcttttttatcttgccttgtatgttctctatctgtttttctgctccttcttcatttgttgttaggcattttcaatgtgtgtgtaacttgttcttcacttcccccttgaacgtgacgttgtagtcttttcttctccttttgtttactttcctgccccttttgttcattacttccatcttctttccatccgttcgatctgtttgtattgaaaagatcagatggcatttgaaagaagcgcaggaaaccgtctctttcaagatttctttttacatcacttctgcctgctctgctagagattctcggagtgatgaggagaaaagccagaacgaaacgagagaagagagtccatatcacatcacatcaacgaccctcatggacctcactttatccctcaaaccaatcaaccgatccgccagccgatcagtctctctcctctttgattccctctctcgttccgaccttacacctttgcccatcaagaatacaggtggattgaggcctggtcgaggactgacaccgggactagaactagcggtgagctcgtcggtcgtcgcagatggcacggtcgatacggcatgcgctcgtggttcagtgtcccgatctttcttccctgcactgccctcattcgtagtctcgatctcggcctcgacagcgctcgttgcagcagtgggagcggtaggggtggagacgccgatccgacatcggccttgagctcgagtcgcagtaagatcgacaacgagtgaattggtggagagtgacgtgatcgcctttaagagcgtcttgctctctgctcggagtgatctgatcgactcggtcgtcaacaccgagtcatctggagtgaatttattggtgggagtatcggcagaagcggaggtcgaggtaataccttctacgatgggttctatcgttggattgtcgagtgtttgaaggtgtgatcgagggtggagggaaggaagggaaggaagggaaggtagagtccgtaaagtcttgagcagagtttgagatttcaagaaactgttttcttgacggatgtatcgaacagtggtccgtaaggattcgatcttggtgtattacaaaagattttgtgatgaagaagagaagtgagccaacagaaagataaaaatcaagagtgtaagttcaatgcaaaaagaaggggatggcaaagaaaagaggagcgatgaaacgaacctggtcgatgaggtagtgtgtttccaaatttccctcgacagtcgtcatctctccttgtcctactcctgttcctttcatcgtcgattcttctacacgttcatttccccaagaatcaaaaaaagacaaacacaactttcggtttcttgccttgtactatgaagagaaagcagaaagaaatggaacgcgtacctccatgaacagcttgcacttgggtctgcttcagctttgtaacatccgcctctgccttatctagctcagcctgcatgagttcgattgcatcttctaatgccctttcatgcttcttgactttccctagatctatctctaatccctcgatcgtttcggcctattcgtgaaagaaggaaacagaacatctcgagtcagtatgctggatacccatgaaatctaggcagccggttttatgagacagacctgttgtttggctgtctcgacctttcgctccaaaacctggaccttgacgtcggtttcctgactcaaacgctcctatagatgatagatgaaagattcaaatgaaattatcgaagggatttcagttcgaccaagaaaatagactgaattcgagaaggagaatagagagactgactcgtttcttgatctctctcgatagttcttgaacctcttcgttgaggcggacacacttctgctcggaatctgtgttgatcatcgcctgagcggccatcttctcagctcggactaaccaaggtgcgctactcgagacttttttttaaatccaaagagaaaaactgtcagtcgagaggattcttgatgtgcgcaatatttgatggacttactcttgatggcattctcctgctccatcaacgtaggcaagatggcagccgcttcttgtccaaggttggcgatcaagccagcaatgacgtcccatggttgacctacttcacctgtcacgttgagagtcatgtctcggagtaatgagacaaacgtcgacagttgaagagtcgatttagatgatttgatctcttccacgtgacctttgatctgttgagcgagctagacaaagtaaaagtttgatctattagtgctgattctgcttcaggcgccgtcaaaaggattagagtgggcggacttggatggcaaaatcaacagcatttgagactcgagtaaccagagagttgagatggggtaagagtgtaggctgtaacgcagacgagctttgaacaaggtcttcgactcgttttaccaatttcctaaggagtgatcgtcggtcctatcagtatgtcatcttttgctcgtgtctgagtcagattaaacagcaacttacttggaagccaatttaacagactttactaactcaaagaggtgatcgatgggagcatagatgacctcatttaagctagtagcacccgtttcaatatgaatctcggaatcttgagcggcagtgacgatagcgtgcttggcaaatccgacagcggccaaaaaattgtcaagatcgtagtcgaaaccaagaaccatatccagctcgcgttctccaagatcgaggtccgactgattaaagtaagcctcttctagatgttcatactgagcgatatgcctgttttgtcaagcgattgtacgtgcaaaacgatacattcgagggttcgcgtttaggtcctggtggaggcattgtttctatctagtaagaacaaagactgacttgataagatcacccatgcagtccgtatccttgaactcgtcctttcgaagaagttcaatgtatccatccattcgtttctcaattccagagagctcgtggtagactccacaaatcttgacatagagctctggagagcatcgtttaagaatagcagcgaaccgtctgttgagtagactgaagtgtgataatttacctcgcatcttttccccagaaaatataaccagatgattgatgttagaaacgggaacgcatttgacacggtaagaatactattcgagaccatacatagaaagaagggggatgactgacctcgcaggtgataaccagagtgtcggatgaagccacatagaggtcttctggcagattttggttttggccaatgatagagttcatcagaagggtcttctgagcgagccgatcgaagaagaggacgcaattagtagcatctgcatcaagctcgaagtagggctttggaaggtaggcctatagatgatgaaagtcggatcagtcgtgcgggcatagaaccgacaaggaattcgcaacatacctgaaggatagagatatgctctgatgcctgagcattttgaaatttcagcaggtcaagatcaatggctttcgactgtgctttggccacagttgactgtaacttgaggttctgattgaggactgattgggaatgagaagtcatgttctcggttgatgattgctgagaaacctgtcgttctcgtagatgctcaagctcactactctcgccggtttcagtttcgacatcaaataaagaagcaaccgccaagacgagatcaacaactctgctatctgacgacgtgttccaagcagaaagacctgcgcggactagcaaacggataggagcacttacgcttgaagctccatgactaactcccggaattgagagatggttccttgatgatcaactaccagatcttcaagatcctccgactttcggacttgttgcttgtacaatgattctcggatatctgtccaaaagaatccatcaaccaaatggaaagtcaggtcagtctcaatcttctccaattatgatgaaagggccaaagatagagaggttttaccaatttcctcttgtagttgcttctcggtctctacatgattttcttcaagctcatcattcaattctttaagcgcttccaagtcttcgatcgtgattctcatttcctccaatttctattagataaaaatcaaggaaaagagagggagcaattgaacccagatgatgaatcagcacattatcgacaccgatctaaatggtcaagtattaaagaaatccgaaacatacctcgcccatggccaaattctttccggtaagcaactcgagcatctcctccgctccgagcgcatcatccaactggatcttgagatcctctacctggagctctgcattttccagactattctttactaactcgtattgagcttgtttttcgataagaatgcaacggcattcgtctccatccggtcagacgttgtcttcttcaatcggaaggaaagggagaaaaggggacagactttgcaaaccagcagtctcggataaatccttctcaagttctgctatcttcatccggttttctctgtctgtttcacccgacaaatcgcgtagcctgatgtaatcaaattcatcgatcagtgtcttatttcaagttgttcaactagctacttgagttttgaggatagagaggaaaggagcaggggcaggagatggcgacgtaccgaagaagagcatctttgagtcgatcgttatgtttttctagttgtatgaaagctattgaggatcgttcctctccagacccgacatcgctcggaggctgttcgtactcatctgaagcagaacaaagcggagtgattcacgatcgttttaagttacagacgtcagacaaagaaattttggatactagggacatgatgagaaaacaggataaacgaaccgttccttgctttgagcgtctcaactgccacctccagatcaacgactctctccttctcgtgctctaactctagctcgagcgactcccctcgttcctccgccatttccttatcgagagtggccatctctaattggtcgttcgtgtcttgtagacgggcttcgagagaggcgttgtgcgattgaagagcagtggtcgtcaggcggaagtgtgtcagctctgtctgaagcgtttggatttttgctattcgtttatcaacaagaggagctaacagaatcagtactctcactctcactcttctctacaacaaacagaacggagaagatcgaaggaagacggtgacatacactgcattacccctacagctctccttaactcatcgacttctctccctttcatctcggccgcccgtaacttttcaatctcttctcctctcttcgtctccacaacccttagcttgatccttaattcttccattccttggtctctgataagtgtcgtccgatgaaccctgctgctctctgcatcctccgaggccaacgcagactccattggaagaggcaccttcggtttcggtggtgaaagtctagaaaatctcaaaggttgtgtcgaggatgatgatgacgatgacgggtcgttcgatgattgaggtagatatggaggtagtgctgataggcctctcgtcggtggtggtaatggtaattcatccttctcaatatcttcggttggttgactaatcccaccgactctaggtgtccgtttgtcgttcatctgcccgcgcctatctgcagagttctctgcactatcaccatgcccttgctcttcagcttcctgctcaggttcggcctcctcttcctcatcagcactcacaacagatcttgtcggttgacgatgttggttctcgtttggcctaatgctagggtatggaaccgaggttgaaccgatcttccgggtggatcccagggttgttttagtcgagcttgaaagaatggtcggatctgatggtctcagacttgacttcccgataggcgtgataggtggagggagcggactgatcgattgtctggattgctgcgctgttgttgttgtcgccgccgtcgtcgtcgtcgtcgtgtttgaagaaggtaccctaccgagcgcgctgctcgaagatggacgagaagaaagagtagatgcgcctgtggctgtggttgtattcgtaggcgtaggtggtatagatggcctagacgccaacttctgaggtgatcccgctcgactgataggaccagagttcgatgttgaaggtagatgagatgactgtctgccaatggcatatttggtgttgggagtcgaaacagagccggctatggaaggtcgggaagaaggtcgacttcctgtggtagacgatgacgcagacgatgatggcctggactgcttgtttccccatccccagacggagcaaacaaacaaaaagaataaagaacctgagcgacgaccattctgcctagtacagtcgcgctcgaaagaaagcagagagaatagggaacacatacgagtggtagcttgataaccgtcacctgcgacggtcgaacgaacaccccatacttttcacgacacgaaaagtaactctcgccagctacacttccatcgttcttcccatcaggtccgaatcttcccatgccccatacccggcccaatcccaattttatgtcagtctctgtaccactcgaaccagagaacgtgcaacagaagagagagcaagttatataagtagaggtacagggagtagtaaagatacatacagctcaacaccgacccaacgtcctttggcaaaggtaggattcgtacccgtccatcttatgattccctgtccagcagaaacagtgacttgagaaccgacgatcagatctgggccttgaggcggtacgctcgagatgacagaggaaggacgagaggccatctattaacacgtccgtgagtgtatgtatgtgtatgagcgaatcctcgtagaagggacaagtaattcctcgttctcgtccccgttcctatgacgaacgaataagggatatataaggaaaccctcccgtattcaaggagcgtatctacctatctgtttatccggctgactcggtatccgacgttggatatttgacgccttgacgtgtatacgtatgcgttgggtcgaagagtcgttggttcttgaggttgtcgtcgttgatggtgatggtgatggtgatgttgacaatcgatccgaaccggaccctctccgacgattcaaaaacaaaaactcaaatccggcctgacatccaccatcctatccatcaggccttctcgcgctttcctcacgtcctcctctttcatcatcttctcgccttgtccgactttgctgatgtttcgatgagccttgtttcttcaagctctccttctcagtattctcaacaaattctcagttatagccaagggtgtgtgaataaattgagatagatagaagtacaagaaacggatctaaaggagaaatagagatggaaagatttgtacacaagaaaaccccactcgcttctagccctcagccttcaattttgatagactgatcagaaggaaagggccagagtgcatataaaaagaagaaagagaatagaggatgagtcatagagagtaacgaagattaactatagacacaggaattaaataaagtgtaggtgtgaatgtgaatgtaaagcaagacaacatggatgaacgaaagaagagggatcgttagagaaacaagacattttgctgacagaagggacaaggtggaacggggaagggctctaatggccagaaacaaaaaagaagaggaacaaaaagagcaaaagtttacaaatatactcgttcttctcccataagagatcagttcaagggggaaaaggaagaaagaagaaaaaatcatctaagaaagaaaaagaacacactaaaggtgaactctagagagaaacctttcgttcctctccccagaagatcccggactcttcaaggaatccggctggcctgccagcggcagtccctgtagacgtcccgtttgaactccaaccggcctgtttcccagggctgtatcccataggcgagcttggtcctgaatgaagcaactgaggtgtcgtctggcctgaagacccagaatgagaatgtgtgccactgagtgcaggcgagaagaaacctgaaggcccgacaatccgtttaaaggccgaactcgagctaactgcagacggggtggtcgacgcgtacgatgaggccgactttccggtcgatggatcgtacaccggtgacatcgagcttgacgtggagagggatgaaggcgaggaaaactgatcgcctctatagaaacagtacttgtcgatgaaagcggcatagccagcggaagaagcttctgccatttttccaacctttaccgccaaccttcctctctctcccggtgcggccccaccggtgactctgacaggttctcccagaacgacgccgacgtcggtctcgccgtctgtctgacgttcaataggcaactcggcggacatgactcccggactagattccaacaaggcggatgtcggtgtttccggtagcgtcgggctgaaactcgggcttggggaagacataggcggacttggcagatccgaaatcggtccggtatatgatgacgatgacacctgcttggaagataaggaagatggtcgggatcgagactttgtgggaggaaacgatccagcatggttcataaagtacgacgaaagttcgttcgactttacctttgtctggggcggagcctgtgtggccaacgtatcggtctgatcccatgttttctgtctggaatgactcggcctgacggttcttttgcccgatccagagggaaggacaatggatgcagaaggaccgctgacctcagccttcggcgtgatcgcctccttctccagacgagggggacagtttgtggtaggagtgggagtagagacctcaaatagaggaagaggctcatcatttttcttcgagggcggagaagaagccgtcactgctgtggtcgttgatgaagttccaggaaaagaccagccggaacccaagatcggacgttgtttatcgatcacggatatgtgcgtattgataggcaccggtgccgttaacggcttttccccaacaggtccagtaaatagggtcgaggccgtgaccgcaggtatcggctgagggtttcctcgtggaggttcgaggagaggcaagaatgtgccttgttccatcaagggtctcgctctcggtctttttgggattaccgggttcggaacggtctgtgctgctgtcgacccaactatcgatcggatcaacggagacgtggtcacaaagccaaatttgtagttggatccaccattagaatcccaccattctcttcctccgtctattgagtatttgacggcaagaagcagagtcttttcgtgaatcttgggtcgaacgtctgcgaggttgatggtaaacgtgaacctatcccagccggacgagtggttaggtccaagactggacgctgggatatgaacggcatgagatgcggtgacttcagaaactgtctgccagtcatccatggctaaacagttgaggaagacagggaagtagagaggaggccgattcatcagcaaaccacgcaagcaatcaaagaggagacacgaatgaggctcaaaaaggactcactgaaccggacggtaacccatttgccaaaggtaatattcctgacaatgacgttacccttcagcaccaacctttcaaccggctgagcctcatcaattagatgcacactttctaccatgacctcttcgccttctgcaggcagtacgatctttcctctacccgggtcgaggttgagccctttcgttctgggtatcatcgcagaaacctccttcttgaggtcgatcctatccctagcggatagctcgccgttgggataactgacttgaccgccggaaggaccaccactacctgggaggaaacctgtgttggatcgagggttccatgtactgaaagcgccgtggaaagaaaatcgaaagccttcgacctcggtctccgtgtccgtcccgccaagccc

SEQ ID NO: 1630 - DNA, 28910 bp, Xanthophyllomyces dendrorhous
gtggtggtggtaacagtagggatgggtgagagttctctaccgatcgtcttgtccgcagactgtctcctcggaatggtcattcccggccctggcgccctcgccggactggaagacccgtgactcttggctcgtctgggtaacccgggcatgggaccggattggaaagcaggtggtgcgtcgtccggggaggcaaaccggtaggctgatctcgagctgggagaatgctggtaggaagatctacggggaggtgtcggttgagtcgggacgagcatggtgtcggtggtgatggtatcggctgtcggacaggacaaaggcacggcagagtgcaaggtcaaatctttaatctttggggatggcagaggcgacacgtagggcatgatccaccgtcaagacgatttgaaggtgaggcgtgagaattgaaggtaaggagaacaagggatgatctgctttaagattttctctgtgaacgagagacaaaagataacaccagaagttaggatggacgtccgaaaggaaagaaggacgggaactgggaacaatctgttgattggatcaatatgaacaaggacgggacggatggtcaaccagggatgccctgccgctcttggagttcctgggtgtccatctcttgtatgaagtaccaagagatcaaggatctgttcctggggtccagaaccacctgggctgttcacagttcggaccggtccgcaacaacatacccacaacacatcgtacacccagaacaacactcccacaccccttgaacacacagaggaactatgacggcctgctcttggacgtcacccgctccggccgtgtgtttcatgatgattcccgcagtcctaccggccgagcgcttccgatggagggagtttcttacgtgagacgcacagtgaacaaaaccctaattacggatcttttccttctttttttcttccccttctttttcagaactctaagggaagacgatggtccgagagacaagaggggaaacgaaaacaaggagagaaacgaatggcgttgggaatatagaaatagacagaacataaggaactcacagagagaaagagtatatgtatatgtgtgtgtgtgtgtatgcagatagatgcaaactcgaaactcccaggaatcggttctttgcaaaagtacggaaaggggaacgacgaccggattaaactggcaggattaaagatgatgtgcacgttttgcgtgcgtgtctaggtctggaagatagattaccagaggatccgtcctgtgaatgagattaggtatgtatgcaaaaagttcaagacaaatgcagcgacggaagcacgccaagatctatctacagtgtaagttggctggcacacatgtatacgcacatatccgcacacaacacgcacaacacgcacaaccattcacacaaaaacattagcaaacaacgaaggagaaagcaaacgaacgagcacttgatggatgaaaccatccatctgtacttacagaagtctctgtgatcggagtgtgtatcccaaacggccgaaccagacgatctgccttgggtgagcgtgagtgtggggaaagaaaagagaacgagaggaggggcaaacaggaacgagaggaaagaggggaaccgaccggatggaagaactggacagaatgttggggagaggccgtacgcataggcatacgcacgcgtgtgttttccaggtacaagggcaagcctaaagagacattcactgcggatatcatatgtgtgtatgtcattcgcagaatctgatcgtgttatcgatcatgatcgacatgtctgctcgcgccctgagatcatgcgcagtccccaagggtccagaccaagtggacgcaaattgctttcccccgcccggccctctctggcgctcggatccacgtaaactcataacgtcacataccttgtcctcgggtcccatctatttatgccctaattatgttacagttttgcgtgagtgtttacgcgtgtgttgtgtggtcattgtcatcagggcactcccacctatactggccctgttaataaccctaacaggatgtttctcttcccttcatcccctttcgcttttgcctccgtaactttcctccggctgttctccttgctcttccgggatgagtaaccgatcacgtgccacattgtttacattcatcaggtacacattccggtcgcacatcacacccgccgagcctcgtaccttctgacgagatcatccctctctagttcccagtcccagcccatcctggcagagacatacgttctcggtccgacttcgtagccttcgctgccccttctgatctttaagcccagtggcttgtcgtcatcatcatctccctcttgccatcgttgctcttccacttggtcctcatcagaccatccgtcgtcggctctgatggacgccgaagaagcgtgtccctcccgagatcgaagaagatcttgtctcatttcagatccaggacggtaccgactggacgtgggttggagcgcagggttcaatatgtctcggccatagacaaacccatgggatgattcggtcgttccgtcttcaatcaccctcctcggtcgagagggaacgtatgatggatcgggcggtggccaagagagcgcttggtatggatctttatgtagatcgacagatggaagaagaagaagaagaagaagaagaagaagaagaagaagaagaagaagaagaagaagaagaagaagaagaaaagcacaagaacatggcgtgtcaggattatgcgcggggtgggtttgatataaaacaatgaagagtcggggtgagggttgctatcaaggatgggaaagagagaaaggaaaaaaaaagattcaaaggggtcatccccttttacttttgtatgcggattccctgtttcgtttgttctttacacgagaacgacagagaactcaccttccgatctcctttcatcccctccactttttccactccccaaaccctcagactgcttgctcgcctacccaacttgtcgtcagccctgtctctccctcggtctcggtctcacatccaccaggtctcctccgttgaggttccgtcccaccttggagagcactcaccactgcgcccaccatcacagccgctgcacctcctaccgagcccgatagacccgaccgatcggcccgccttctgtctcttcccgtttcttttttatcttctcctagcccctcttgatctgtctttcgtcgatggaagctaacccactcaccagtcccatcggcaatctcgaaagagagcccatcgcctggtgtctccgtccacggaaacagccaagcaagaggggagctcccaagaacagaaattatgttgaaccagggactaatactatatggatatcttatgtccttaattctacctcgacggatcagtgtcgctacctagaaaaggcaaacggattaaactttgagattttggaattttcggacagatgtaaagaaggaaggctaccttgtctttctcccatgcttcgatcgtcgtcgtatttgaccagagtgaccaataatgatacattctgtttttgatccacatccatattcaactcagtcacaccctctcttgtcttttgtcctttctgcttgaacgttgagagaaaaccagagaaacaggggaaacttacgccatcatggacacaccgatcaacaccggcacgcatgccacaaagtttaacaccgtcaatacgacctctgccgctgtcggttcttgctgttttgccattaagtcattgtttttcagtcaaacagccagacttcagcgatacgtgcctgacacgtcggatagacagtggaaaagaagagaagaatacacgaacaagaaaggtgttctctccgccttgagcaaaatcccacactctatatgccatcatccagaaatgatatgtgcctgcaaaaagtttccttttcaattgtccgtcaacatacaatgttcgatctccttaaaaactattcaaaacagggccaaggcctaaagaagacagaagcgaatgacttacatgctagtaccacgtaggttagaaatcggacaaaagacgcgtagttgtgatgaccaatgcagttcgccacccacggacactaaagatgtgaacatgagaggggagaaaaaggagcaaggggctgtgagtataagaatcaacacgatattatctaaagagcataggcttcacgaacgtgatgatccattcgaagaacacatctattcatggccaaccatcacaaaacgtagggatagtatcaggcgggttcctcaacaaattatgcgagaaagaaaatgggtaacagaccgtttacatcttctgcaatgatgggctgtgaagtcccgcaagaagagcttgaatcaaatctgtcttgaggtgcaagatgcaagatgcagaaacatacctcgtggaggtttgtagacagagcatttcgaacagaaccggggaccccccgtgagcttctttacctcgacatcttccgaagagaggtccggttccttcgatggagatcatgccagtacgtaagaagagcgcaaggttaaaggttgagccattgaggaggcatcggtagagaaagttcaacggcatacccagtttggtggtattcttcctggctctgttgtcacacagagatagtagcaccaaaagattaatcccaccaggacacttcacagagagttgaggtaacaaacagattagttaaaattccttcgggagatcacacatcggatgatcatacaagaaggaaggaagtcttacttgaaaggtactagaagtcgaagcaattcgatcgaccatctcttcccatagaacggccagatgatgaaaatctgggaactatatgcgatgaacgagatcaatgagatcgcgaatgtaatcctgtagatattcaagaaagatgatcccagagtcaaacggctacctgagtttaaacggaacacatctggattcttaccatatcttttcccacttgtctgccatacagagagctgccagaacaaagttgatgacaacgatgatgatggatggtgatgatgatcaaagataacgtcggcaagaagaaaagtgaaactaccccggttgaaatcgactctcatcttcttccttgccttcactcactccaagcggtcctatcgctcctcatccatcttctcgcgatgagctctccgtcatgggattagtatgtgctctatatgttttcattcaaatccacacgcatagacatgctaatcatcattgtgtctgtccacctgtagtatcatgaagttcgtgtctcaagtttcatctctatgcgctctgttttctctgatctgttttctctgtatatatctgtcttgatctaaaactagattcgtgatcgcgggtgaagcagctacaggcaagacatcaatattgtaccgactcaccgactctcgattcttgacgacacccgacccaacaatcggtgtcgagtttggttccaaactgttacgcgtggcgcctctacctcctaaaccttcttccccttccgttccatccggagattcaggaaccggagatgtcgccagtcaagcactagtggcacaacctgaacgtgatgagaccgccgagcaattggcagcagcagtaacggtaccgacggtagagggggaaacagccgaagaagaggaagagggagccaagtgggtcaagcttcaatgctgggatgttgccgggtcaccaagctttcgaagcatcaccaagagttattaccgaggagcagctggtgcactactcgtctatgtttgtccatatatgtctaactttcgtttcggtcacttgaatgccaatgtggatgtctgactttgtcatctgatgggaccactgggggtgcaatcgccgaccaattaccacaggatgttacccgttcgcaaacgtttcgagaactaccactctggctgaaagatctccgggcgcatgcagacccatctgtctccatcatccttctaggcaacaaatcagacttggattcttctgctgagacgtcgacgacaacacctggggaggacgcgaaaccgagaagcgggaagcgggaggtctctagggaagaggcacaggcgtttgcagagagagaaggcttgatgttcttggaatgtagtgcaaagagtggagagggtgtcaatgaggtttgtctttctcttctaaacatgtggtccagataggcttgtgccgatgaatactagggtctgacagtttgtttcatgggttatttcaacaaggcttttgataaaacgggcgagtacttcaacccttcaaagtctttgatccaatctagtctggtctgactgtatgtttctataatcctatcgtttgatcaatattacttcatgttctccagctcgagaaattcttcagaagatcaatcaaggtctcttcaagggtgatactccatcatcgaaatccaaggtatgtctttgcttccctgaaggcgatgtgatcatcacctgaaatgttttgatgctcaacgatctctattctgggttgctctggacaaaccgtttaatcagtcatcaggaatcaaactctcagcaaactcgtcagctgatagtaagagccgtccaggagagagcgcgagatgttgctaagttggattcgaatacagatctgtctacccgccctgccttgtttccggtttgtttgctgaagagatggggatttaatatcagtagtagatgcactgcatctctccctttccttcttataacctgttgtatcatatgattaaatgcgtgtctttctatgttcgaatctgagtcctgtccaaccggaagcatgcctgtctatcgagtatagaagaagaacagagaaaaagagatacgagaacgatggatcttggcggaacaaagcagaaaaagagacaaacgcaaaaaatcgatcgacttttgaaattttctattttattcttttcttttcctctttctcttcttacaacccactccccttcttccatcgtccacacacacccactctctccttctttgtagccaaacatgtctcctattcttgtctgcatgggtaaccccctcgtgagtttctgtccccttgtattttgtttttgaaatcatgtcagagaacagaaaggaaagaaaagaatggaaaagagatgaagaacacacgttgatcgatcgcttttctcctttttttcctcgtctatacctcaccgttgggtgctcgataatctagctcgatatccaggtcaccaagggtgaggatctccttgagaagtacgagctcaaggccaacgatgctattctcgccgaggagaagcacatgcccatgtatatctattctcctcattctttattactttgatcaaagcggtcgggagctcaccctaagatccatctctgttcgtttatggactgtgataatgtcggtatcagctacgatgatatcgtcaagagaaaccctgtctacgtgtatgttctagttgacgtcagcgatctgtcttgtcaaaatattctgatactaatctctttatgctctggtcaacacagtgccggaggagctgctcagaacgcttgccgaggagccgctgtacgtatcgttgtcatatctaaattccttaatcagttagaaccactcatccgtctgacaaacatcttgcgtttggaacaatcagtacgttcttcccgagaagtctgctgcctacatcggagccgtcggagatgacgatctcgcccagcagcttcgagccgctaacgacaaggagggcgttcagtctgcctaccaggtcttcaagggacagaagaccggagcttgtgccgttgtcatcaccggtcacgatcggtaagatcttccttttctcacgctactttgtcccaagctgtcgtttgcattttcgccgtctaaatttgtttcatctcggtactcttatcagatccttgactaccactcttcaggctgccgagtccttcacccctgagcacttggctacccccgaggtcgaggccttgatcgaagacgctaagttcttctacttgggaggcttcttcctcactcacggaatcgagtccgctcttgttcttgccaagaagtccgcttctgccggcaaggtccgtcttttccacttgtacattgcgccttgttatcaggagatgcagatagatcctaatctttctttcgttccctttgatagtgtttcgccatgaacttgtccgctcccttcatccctcagttcttcaaggctcaggtcgaccagatgattcccttctgcgacgttgttatcggcaacgagtccgaggctgaggcctacgccgagtctcacggattgagcgtcagttatatgtcccaacttctgcaaagcggttaagtagctattcattaaccagcgtttgtttcacgaatcgacggtatgcacagtccaaggagcccgcatttgttgctacggccatcgccaacgctcctaagcagaacgcttcccgaccccgattggtgatcatcacccagggagcttcttccactatcgttgcatcctccgatccttcggttgctgctaccaacctctctgcaggtgatgccaaccccaagacctaccctgtcaacaagttgagcgacgaccagatcgtcgataccaacggtgctggtgatgcctttgccggtggtttcttgggagcccttgcttctggaaagaacttggatgagtgtgtcgaggctggacacaagctcggtcagatctgtgtcggacaggtaagtggatatcagacctgtctataagatctcacagtatcgacatttcatgatctaaacattcttattgttattcttttttacttatttgtaggtcggaccccagttcaagttccctaaagtccagatcctttaagcgcttagcttcaagattcttcctttctagatttttccccttttccctctcgctttcaacgctatcttcaacagttgcccttcttgcatcttccttccctttctttcttggaattcaagttcatctttttctaacaagtgtttgattagtctgtactaaaaaacatatatccagtcctctctgaccgctcaactcgggatttttctctatccttcttttctcatattgtcttcctcataagaaacaacatagatttctttctcatcgtttcctttcacataggtttctttttctccactaaatcaatatgcagaaagaacgatgggatcctgagacacaagtttagaacgcattttaataagaaagaaaaacatgagaaagacgatgcatagacatgacgagccgagatcccggaaagagatgaggacacaagataagaaaagaaaggctgatggaagtaagggtacgagtacatgactaaataggacaggacaagacgagatggggttgaaaaatcgatatatcgtgggagaaaacaagatgctcaaagaagttggagggatatgtatagtagatgtaaatgtaaatgcaaagtgcaaaagagtgagattgtgattttaagtgacgaacggactgtattacgctttagtaatgatgcaatgaagatcagaagatcagaagataagggaagaagacgataatcaaggtggcagctccatggagacacacggtgtgtgttatagaaagacaataataacaatagagatatagatggcaaacaagaacaagaggcgtttatcgcgaaagaagatagagaaaagcatagcaagaatgatctttcagtcgtcttcgtcgtggaagctccatccgactgtcaaccgagggggttgtccgtctcctgatagagttccttgaccatcaggaccgaaccatctgtcacattagaggaaaaaaacagaagaagaaagagaaagagaagttaagaaaactcagtaaatctcatctttacttagcgattccaaaaaggagagatcgaagagaggaagctcttgactcactcattatactcgaccatcgtatcctccaactctgccaacatcctgatcgcatacggatggagtttcctatcatatcctttcttactcgacctctccttctccttttctttttctgatgtcgatgcattctcttcctcttcgcctaacatagcgagtctctccaacaatgtcgatgctaacggtgtcaacaacgaagatcgctttgaaaacgatcggctcatccgaggtgtggccgagacatggccaggtgcgagagctaatccgtttgaagaagatccagcagctgaagagactgatgagcccgacgaagttagttgggatgagtcgaatgagtcagacacgggcgtctgtgcaaaatcaaaggagaatacaccagaatgggccgcaggggctgtcgataaatcgggagacgtagactcaggagtcgagacagtgaagacgttgtttgtggccagcccggaggatgattcattcaggggggctcgagcagatacagcggatgatccatagggccgttgattgaagttcttctgttcgatatccgagaagttggagctcaagggggatgaagaactagattcgaatgaagacctcacaggagaagagaggtcatgcttgtaagaagtcgttgtgggggctaggaagacaggtgtttgaatagggggaggaacagatacagaagttgaacctgtaggaacggatgctgacgtggaaatcatagatgagcgagtagaggtactcttggtgggtgacgcgtaaggatccgagtcaatctcaagatcatcggagacttcattgatgccatacaatgttgatctcgttggtgaaggcattccttttcctgcgcccgaccgtttcttttttgcgccgaaactcttcttgaaccactgagtcgccttgcctagagggctcgaaggtaacccatccgtcggaatgctttcagcagttagagaaagtgctcgcgcatcgagctgttccaccttggcaggcgcagacagggcctcttcagaccgttgcagtgagggttgcttgattaggggaaccatcgcgatagtcgacttgcttctatggatacccccgccaactgtctctgagtcttcaccatgagcattctgccctgacggacagtcctcttcttcgtccaagatagttcctagtacagaaggctcgatctccccgtgacgaactcggattgcctcaagtcgattgttgagaagtttgatcgtatacagttcggcctctgtcggttcactctccacgccatctcttttcttgatgtgagaaagtcggaagacaagaagccggacgacgtacgatcgaacggactgactccagaagagaacgagacgctcgaagataactggatcaaacaataggccaagaacacgcagacggtcttctgggttggcagtcagcgaatcccaatgctggaagataaatgatacacatttacagagcgtgagagcatgatctccatctcgaagaatgatctcgagagtcgacacaatgaatttgacagagaaggcattggtaggtgaggaagagagagagagatcatcaaaaagatcaggtggagcactagcaatagaatcaaggaagtcgaacagacagctaaccagttcaaaaatagaagtgcagaattgagccaactagaattctaacggagagatagtccagataaatgatagaaacactcacaagacgccctttggctcatacatgtttgtcctattgacaagcaacctcgtccagatgtcactcatgtttccccagaccttcgctccgtccgtgtctgtaccgaactccggatcaacaatcatcggggtgttcaataggtagctcacgctgtcacttaatcgtctgtttgcactttccaataccggaggtttaccaggtgaccctccaaaccctgcggtctcattcgagttgaatgaattcgtagcagcagaggtcgtcacggagactatcttgccttggacgtacgacaaacacttggtggcgaatgccgcagagatgtctaatacgatagccgacccgaagccgagatttcaacttgtattagtaaagcaagcttgaaagataggacagtcgtccgtacagatatagaacaacaggcttacgagcataacctggagatgcaaggacaactgaggactgtagcctggcagggttctcaggatttcctaatgaaggatagaatttggccaaattcttatggtatgctcggaagaaagcaaagaacaactccgagtcgtcggactgaattgatgaccaagccagaccaatgtgaatacaaagacatctcaactgaaggtatgaagaaaccggaagctgacctgccatcgcctcagccaatttcccataggaaacctgaacgcagcctcgtcttctgagtcctcatagacacattgtgttgatctgagcgacgccaagtaatcccttgggtcgtctttggtaaacggcagcaagtaggatgggaacggttcggactgatgtacataagatggtccagaccttggcggagaacgcataatcagaaaggttagtgaatggcaagagccaggcaagtcagagtgttcgacatctagactcactgagtagattcgacttgagcaatgacattcatctgtctcgtcagcgtgacgcgtgagatgggcattgctgctaaaagctgctgagcaatcccttcaattcggaagaatgaaaaagctatgagaaccaaccggaacatcacatatcaatatcttgcataacaaaagccttgaccaagacggatggaattgcacaatacctaagattcgacctccaaaactgagagtgttctgaaaaattcctttactactgagcttgttcatcacgaatgagataacagttctcatgatctttcggaacatcgcttgatcttccggatcagattgaagagctttgattgacaacacaggactgcaagtagatggttcaagacgaatcaaacatcagtgagtgagtaaagagagacagagacaatgtatctagaacaaacctctcgattagcgaagcaacagcttccaaaacagcccctctctcacttggtgtctgctctagccaaatctcctttaccacgaacatgatcaacccttcgaaataaaccgctcgaagttttttgttgtcgattactttctcagaatcgaatcctcttcgttcggcgtcgtagaggatcggtagaaggacacctcgtatgatcggcgcacggatgggtgcaagccttaatctgaggtaagcaatgaatccggatgtcagcaaatgagctctaggggacggtacagaaagagaaaggggatagactaactcttgcagacaatcttcaagtttcccttgcaaatctctcacctccacgccgttctctctccgtctcttcgctctcacctcttcggtcaggatcttgataacttctctctcctttgtctttccttctgttgccgctccagccttgcctcctaccctcttcttggaatcaaacaatccatctagtggctcatctcggtttgatatcggcgacattatttggtcgccaatagcacctaccacggatggatatttcgtcggcttgcctggaagcgaatttgaatcacgccgacgggtgagtgtcaaaggttgcacaggtgtgggcgctgatgtaggcatgggtatggttgtggacgacgaagacgtagaaactgggccgactgggtgactctgactggtcgtttctttctctctcaaggatatttctggtgggaatattgacgagagagaaggatgtgttgagttattaagggctgaagggccctcgaactgagcggatgattctcggggagacaagacggggcctaagactgtcgttgagaataagccaggttgaggtgtgattaaagaagttggggtcacactaaattcaggatcggcaggagcagcgataatagcaggaggagggagcatatacggcagagatgtaacatgatctgacggagacgatgaatcaaatgtcgttgaagcgagagaaggaagagttggaggagagggaagataggcaaaaccgaccctcctcgcctctgctgctacccccctctccacttccagctgtagatcgtccaacgctttctctacatctccttgcctagatccggcccaggagcccttgccggacctacctgaatctgctgaaccccaaatctcagaactggatttactcagtaccctccgatgcgccggccctttctttcgagatgaagatggtagtagatggctatcggaagagttgccatattcagagaggaaggccccagagaatgagccactcaagccggcattgaaggaaattcgattattgaacgttggcagatctggtaacttgaacagctcggatgatctgtttactggcttattgtctgaagagagtgaatctgttgatatttcgctaatctttcgattatgttgagttttctgttgcgatgttgggtgaagtgacgtggcagaatcggagccagggaaccctgctgatccggctgacgggaaggagggcaacgagatttgaggggatggaggagtagaaagcttaaaggcaggggtgatgggaggtactttggcaggagcctcccatgaaaacgagttgggaagagaggttggcacaccagaagaagacgaagcggatgacgtcgaagtcgaaggcgtggtagtggtcgttgctggggtaggggtatacgattgttttgatttagatcctaacgagacggaccgagtctgttcttctattccatttgagtacccccctcgttggaacattgaagggaaagcaggcataggaggaacagcatctgctttgatgccatcgcctccgggtgaccctccatctgacgcgctgtccttcttcttcccaaacaaatttctcagcacacccgagctcttttttggcgtgatctttttggttttcccgctctttccagcctttcctacagggctatcacctgttccggaccaacctaattcgtccactgaacctcgggaatattcagcctgataaaccgacggccttcctctatcgatgtctgtgctcgtcctgaccatccctagtccggccagcggcgttcgatggaaagtagacggacttgagacattcctcgaacctaatggtctgcttgaagaattggtctggatagacgtatgcggatagatggactggttcgtctgggacaagaacagaggttcttctgtcggaggagcgggtcgaggaggaggcgataaaggcgcgcctcggcccccattgggggatgaggggtacaggtgaataggtgtaccgtcttggataggtgatccgatcgaaagttcactttctggtcttagcaagggtttcgcggttccaccccaagaggacttgcgctccgttctatggggtgaagattggctggatgcatgtgtatttctccagagaccaggcgatcgagcaacttcttttccttttggcgtagactgagtcgatgggtaatcaactgatgaacgacctcgatatggttgaggcgaatcagtctgaaccataccggacagcttgtcggtcgagtaagtagtatgcgttggtgagagtgcgttggcctcatacggaccagacggataggcagaatgctgttgtttttgttgttgctgttgaaacggagctagagatgtcggcaagctaccgggtttcccgactcccagttcagagtagctggtagcagcagcagctgcatcatgcgttggctgtttgagtccggtcctaccacctattgagccatttagatgttgatctcgatcgtggtatcccgagctcttggaattcaagggtgagaagctagctgctggatgagaagctccgggtgaaggaagtccagattgatggggcgaaggagaagctaagggggttggaagcagagaggacgagccgacggaaggccgtctggatatcggtcgcgttggtggctgagagacgggaggcaggaaggatccccctcgggctgctatgggaggaaaccgagccgttgtcgtagaggcctgtatgggcgtaaccgagaggtcatgagcatggagaaagcgttgaggaagagaaagaggttacgtatgtgtgtaggtaggtaggcagacgggcagacaggcagttaggttgggcacaagaacaattatacacataagaaaccgaagagaaccccgggataggaaacagaaaaacaaagatggcagagaggacgacaagggaagaaactaagctcaagcaaggaggagttgagcagccggaagacagtgcattaaagacggacgtacgatactcgttcccctgtttggatccatgacagaggagaaggagagaaggagaaaaaggctttgagtaacctgacttgctcgcctatccgagagtgatgaacgggatgagaactggaggtttccttttttttgggtggtcgtaccgaaaacgacgaacggaatcaaagacgtttactcgcatcgaacaggtaacattcagtatagcatccatcgctagcatacacctcatctatcgacagtatacattcgtattcccggtcagaagtcatacatacataccatgcgttgctcgttgatcgctccgttgtttatggcatttctctcatcgcctactcttatcatggccggaaactctgccgacacccagcctgagcagaaacctctctcggctcctcctttgagacactcggccaactcgcctttgctctcggatattctcaccgtcgagagacgggctggtttatggttcgattacgctagggactgtagcgatgtagtgagtccggtcgtggtgatgttctgtgcatgtcgttcgactgattcatccattgtcttctcttcagatgaaacggctcacggatgaaagccagtcgaccactgtcctcgtccctgttaattcagccatcgttgctctgcccaggaaaccgttcgtgtttctttcgtgtgtcctgtccatcatcagagacggatgtgcttgtctgtgttgatctttggccattttgtatcaacaggcatcaacttcctccctcatctaagatcgagatcaaagacatatcgttcgaagaacaagacatggctcatgcttcccaggtcgagcgatggattcaaggacatgtaatccctgtacgttctctactgtacccatgttatccgtcctgactgcttcgtgagactaaactccacggattatcaatatccatataggaatctgtccccttccctcttccaactcagtcagcacctttccctacgcttcttgattcgttctcgatcagcttcaaccagtctggacagtcagatgatggagcaaagagcatcgttgtcaatcctggagaggcccgggtcgtagacgtgctacacggtagaaattggagagtagtgtttttggagggcgtcgtggccgttcccgtccaaggttgattctctttcttattcgttctctcatgtcttcacaccgttgtctctatagttcgtagatctttattctcatatatcgttctgtctgtatctctgtctgtatctcgtctgcctttcgatcttatgcccttcttgatgtatgcgagggtggtgcaaccaacaccacgtggttacgatgtttggttacgggcacgttgtccctcttcccaccacttttgggtctcccacttgaacacttgacacctaacccaccacccgttcattctccttctcccctctcttctttccctcggcctctgttctccctctgattaacacaggaaatagaaagctcgcaatctcaagaaaggaagaactcaaacagatttgtctttgcccaagatggacaaggaaatgtacaagctagaggttctctcgctcgtgtccaagatctcacaagagatctttaaccacacgggtatgtggacgtatctttattcattcattttcgagattggtatatcgacactcgttgcttgggtactgaccatgttcttcctgaaactgttcttgtctgcagctttgaacgacaagtctctcgcagagtttatcatctcgcttcaccagcaatcaaagacgttgccagaattcaagcaaaagctcgccgacgtccaggccaactttcaggatagtttcgtcgagacattggagtaagttcatattataaccacttcctttctgctcctattcttctacttcccggtggttgcccacacaagcctcctttgtctttgcaaaacacgcttggtggggaaagccgatcacgggcagagtgcacgcgttctttttggacccggatagattgtgagagagaaagagagaaagagagaaggagaccacattcatggccaaacaccagagtttttcctccaaggaaaatatgcagactctacccttcactagtgaacttgttctctaacgttgtgtttctattctgtttgcgtacctgcagccgtttgattctctctcttcacccaaaatacaaaaagaagaagaacaaagctcttaaatcatccaccacgtcgtccggtcccaaagtggctgatccgacagcgcccatgcctgtgactaaggaccaggaaatcaaacgacgactactgcctggtctgtccctcccagacgaagtctggaaacctaccactgagtttgaaaaacgaccaggagaggctgatgtggcaggaaaggaagttgaggacctgatgagccaattggagaatgtcggaagcaagaaaggaagaatggcggccactgactttatggaaggctctgccgatggcgagagaaacggtccgagtgcgaagcggccacgatacgacgagggcgacagagacgacagagacgacagagacaaaagggaggatgatcgagggaggtcaaggtatccgagggataatggatacggaaacgccgatcgatcaggctaccagggtagaccggttatggacgagaagccggtgttgtacaaaatctacgatggaaaagtttctgggtggaaagactttggagctttcgtcagtctcgaaggcttaagaggtagattcgagggttagtctttctacttatgcttttgatagacatataccagtgtatacgattgaagtgatcactgactccgttcttttactctggcccctcatttgagttcggcaggcatggttcatatcgggtccatcgcaattggagggcgagtcaacaacccaggggatctcctcactagaaaccagccgtgtaaagtgaaagtcatgtccgttgctggaactcgaattggactgtcgatgaaagacgtcgaccaaaagaccggagcagacctttctcctcatctccgaatgaagaccgaggccgaactggccgcggaagaagaacgtcggcgagcccctcctcctccttcaaccaccggcagtaactctaccccactttaccaggtcgatgacgccaaaggaagttcagccaagcggttgacatcgcctgaaagatgggaaatcaaacagttgattgcgagtggcgtggtcgatgcgagcgagtatcctaacttggacgaggattatacgatcagcatggatggaagtggaggtagagaagtcgatgaggaggtcgatatcgagacgagagatgaggaggctccgttcttggctggtcagaagaggcatgtgctggagatgagcccggttaaggtttgtttacgatttcttgtcttgtcatggcctttgctttccaggatgatgttgccaaagtcgtgttggctgattgatttccggtgatttgtacctccttgaactttcctcctaggttgtgaaagctcctgatggatcgctcaaccgagccgccttggcttctgaagtattcgctaaggaacgtcgagaacttcgacaacaggaagcgcaggaccgggcagattccgaggccagagacttcaacgctccttggttggatccgatggctcagcagggagacaagcagtttgcccaggatctcagaggaacattgatgggtcagagtagtatgaacgagccggagtggaagaaagagaacaagtcaatgtcgtttggtacgaactttttatctctcgagtctttggttggcaacgacgagtaactgccagattagattatccttgttggtgctttatcctgactttctcatcgttgcatttgtgtctgcataggtatcgtgaccaatttgtctatccaggagcagaggaagtctcttcctgtgtacaaattccgaaacgaacttgtcagtgctgttcgagagaatcccgtgctggtcgtcatcggagagactggatctggaaagacgacccagatgacccagttcttggcagaagaaggtttcgccgatcgaggcaagatcggatgtactcagcctcgtcgagtggctgccacctctgtggccaagcgagtcgccgaagaagttggttgtaggttaggagaggaagtcggttattcgatccgattcgaggactgtaccggtccagaaacgaaaatcaagtacatgactgctggtttgttgttgagagaagcattaatcgatccggatatgacccagtactcgtgcatcatcttggatgaagctcacgagagagatatcagtactgatattttgttcggtctgttgaagagtgcgtttgttctattcttgttgttcttcttccgcaacaacgactcactgtttccatctcatctttgtcttcttgcaggaaccttgaagcgtcgcccggaatttaagttgatcgtcacctctgccacgcttaatgccgaaaagttctctgagtacttcttcggttgtgctatcttcaccgttcccggaaacaccttcccggttgagatcctctacaccaaagaacctgaagcggactacctcgacgcctcgttaatcaccatcatgcagatccatttgtctgaacccccgggcgatattcttctcttcttgaccggtcaggaggaaattgattccgcttgtgaaattctgttcgagcgaatgaaagcattgggacctcaagttcctcagttgagtatctacccaatttacggagctcaaatttcaagtgttcagtctaaagtgttcgacccgacgccagagggtacgagaaaggtcgttatcgcgacgaacattgcggagacttcgattacaatcccgggaatttactatgtgattgatccaggattcacgaagcagaaccactacgatccgaaacttggtatggatcatctgcaggttatggtatgtctctctatcgtcatctctttgtgcgcttcgtaacgccctagcttatgacctgacgcggtacgaccactgtttcctgatttttctggtagcctatctcccaagctcaagctagacagcgatccggtcgagctggtcgaaccggacctggaaaggcttaccggctttataccgagatcgccttccgaaatgagatgctcccgaaccctgttcctgagatccaacgaaccaatttgtcacccacgatcttgaccctcaaggctatgggtatcaacgatttgatcgcctttgactttatggatcctcctcctccccagacccttatcaccgcgcttgaaaatctttacgccctcggagctttggacgacgaaggtcttctcaccagactcggacgaaagatggccgatttccctatcgatccagctatggcaaagatgctaattgcctcggtcgactttggatgctccgaggagatcctgacgattgtagcgatgctgtccgttcagaacgttttctaccgaccaaaggacaaacaggcccaggcggacgcaaagaaggcaaagttccatcaaccggagggagatcatctaacgttattgacggtttacaatggttggaaggcaagtaagttctcggcgccttggtgtttcgaaaacttcatccaagcacgaaacatgaagtcggcccaggatgttcgaaagcagctgttgggaatgatggatcgatacaagcacgatatcatctctgccggcaataactacaaccgagttcgaaaagccatctgttctggattcttccgaaacgccgccaagaaggacccgacggaaggctacaagaccctggcagaaggaactccggtctttatccatccgtccagtgctttgttcaaccgacctccagagtggtgtgtgtacaacgaaattgtcatgacgaccaaggagtatatgcattgcgtgttggctattgaacccaaatggctcagcgaagtggctccggccttcttcaaggttgccgatcagtctcgtatttccaagcgaaagaaagccgagaggatcgaaccattgttcaacaagtacgagaaacccaacgaatggcgaatcagtcatacccaaaaggtcactcgaagcagtcagacgttcggttagatattttctgttcctttggggtggaggatcgtggcgaagcgattggaggatcaagtgggggggtatcgatgcaagtcgtcgaagagacggcggcttcgtctccttcatgttgtctcacctctgcatcatcttgtctaattttctttatggttttgatcattatgggtgtatatgtttgtctctctttcagggttggccctcttatttcttctttccgaaaagtgtcctttctttctccgtaagtcttcaaaatcttagacaagatggggaaaacagatagtttataaaaatacgtgggtaattgtaagattaggaaaatcacagaagagaagaggtaaaaaaacgagttagaacagagaaaagcctagctctcagatatgaggattatccacagtaaaaacgaagcagaggaagagcagaaaagagaacgaagacaaaggaagaaagaagaggggaggagagaaaaggagaggagaagaaagacgaaatgagttttatcgtcgtccgttcgactttgcgcttcccttcttctttctcttcccttcgtcctccgaatcgtcactatcatctgctttagccgcgcgtctggttttatattggtttggttagttttgccttatgcaaaagacgagagggaaagcaatggctgatcagctcacctcttatcatcagatctagccgctttcttctcctgctcgtcccagctctctgcctctgagaattcagcttcggatcctgaatcatcagaagcatcttcatcgaagtcggatcccgaagagtcactttctgatgccgattcaagatccgactctgcttcaaattcggatgcagagtctgattcgtcagagttttcggcctgaaagggaatggtcagaaggcagaggattagtacaatggaatatatagtgacaagagaagaaggcaaagaaagaaaagcaacccacatcagaatcaccggccaagaaggaccatccaccatcaacgaagaacatgtagggatcctcgttgatggtcttcatgatctgattccaggtcaagttgactgctccctccgaaatgggaatatcgacagagctaatcccatgcaacaaaagcagatgaatgctatgaacctcttctataaaaagatctgaacacttactctagccattctttgataccctccaactgaccgaacggaatagagttcacatggaccgggggtttggtgaagtctgagaagacaaagaccatatcaaattgtttgagtccatgctggactctctcaaaatgaacgacctcaacctcgctcagcgtgatcaccaaatttggcatctccgttaaatgaactaggcagtccgtcgtaggtgccaaaagaacattcgacttgaaaggtacaccttggaaacctaactcccggaacggaatatctacttcgaaatctccgttaccggaagtagcaatcttctcagcgaacgatttgaactctttgttgagttgttgccgtcgtttcctttcttcctgttcgagctcaatctcatcttcgtctccgtatcggtactttcgctttcggttacccgtttcgtcgaattgaacatccgtagcttccctggtgaattggacgtcctatagaagatcacacagaccagatgtcagtggatgacaggtacagagagtaagaagaaaccattctaccttggctttcttctttccaatcatgatcggcgccttaagatgaacatggatgataacaaggagctcatcatcacaaggttggaagaacagatgcttgatattactgaacaataggtctgtcgttacgtttcatgaatcaagcccgcaacatgttcagctcgatttttatacgggcataccttttttctatctagtggaaagtgttcagtaagaaattctactcaccgactttctgatctcgatggttgatgtatcggataccgttgtcatggatttggagatctccggccaatcgcttcgtatccggtccaggacgaatcataacctccgtcagtacatgcggtcgtttacctgtacgtttcccacacacgcgcatatgatagttagttctaagagaccagacgaaaagagaaggaggaagacgaacctcgaagttcgatcaatcgttcttgcgtgatgacatctgccaactccttcttatccttctcccgtttagtcatcaatgtcctcatttttgtaatctggtcaaatacttgggagaaatgatgatggtcggttgatcggaagactgctgagcggatgaatgttgcattgggatcttcgaatggctgtatttatatcggcattaagtatcatcaagaaaacctcaacaaatgacagagagtagatcagaaagcgactaactgtgtcctccttctttcctgcgatctgtccaggcgattggaagttgatccggatatacgtatattcaccctcttcgtttttactagcgttcttgatagtatttatatggaatggggtagcgaatccgttgataggaaggataattgttgctctttgatcatccacaaagatctgttgttttcgtaaaaagggaagcgtcagctaatgcgtggagtcagaaaacacatcgagaggcagacttactcgcttcttaacaacctccctaggtaactgctcttccctcttataactctcgaactttttgaaccctttcttgacttctcccgatcctccttgatcctggttgaacctcttcagaccctgctcctgtcttaacgcgtgtaactctttttgatgctccttcatcttttgttgggacgtttcgtcgacctcggagcgggtatcattccttgtctttcctcggaggactttggaaccgacgacatggccggtcagcttcttgggagatgggggcgctcgcttaggagctgttttctccggttcctcctagagaattccatatcaaagtgcaaagacgtaagcgcttctctcaggatagcatgataagccagggcaggtctgatagggaaaagaagagactgactccgcccatgaagaaaacaacatcgttcaaactcttggatccctctgtgaggacaataccttgatcttttccgacttgaacagtatcaatgagcaagagcgcgtacctaaatcgtgaccatcaccttcagccaggtaagcgcgaaccgttgccaacactttgagtgaactcggaagaagaagaacggaagaacgtacgtctgtcctttctgcttggggtcaggtagtccctggaatgccacctgaaggttgatcaccattccttctctcatcgcctttccattcttcgtgttcaacaagaatgacgtgtctctaaattctaggccggtctgtgatttatgtttgcgtttttcccatatcatcatcaacgaaagttcatctttgctcaaaacgcgacaaaaggacgtaccctcgatcccagtgacttctggaagtgagattctaaatcaggtctcgaactcttgacaaattctatggcattggcgatcagttcgctgacgatagctccatccttgatgagagataagatgtgttgttggacttctagtaggaacgagtaattcttttcttgactctgccagcgtttgatcgaaatatacaagaacaatcagcatatagcccaacggaagagacaagaaagaagaagagaaaataaggcgaaccttgacagggtcgatcaagaatgtcctacccagattactgcaataacttctgaccctcaaaccgacgcttgctaagatcacgcctgccttcaagtttttctcgttcgattctgcggatggcttgagatcatattctccaccagactgaatgataggtgtgtagatccaaataactgatgagaagtcgacctgttggagcgcgagcgagtatacataaagagattagaacttgttggttcgtcaaattcatagaggaaacacgaactcaccgaagcaacagcaggccgctttgaccacaatttcatatccggtcctgcctcctccgttccaatcttactttccactaaattcgccaactgcaagatttccctccaaaaagccaaacaacgcgtcggatcggaatcaaaatgagccatcggttccgctgtcatttcagacccaagtacaaaggattgcataggagaacataccttctcgtgagagagtttcttgtcggcctcgattgtactagccatcttgtcgacgaaataagagtttataagtgtcgaagtgagaagcgctgctgtttgaatgtgtttctgttcgttgccagagccaagatttgtcaggtcatcgtgtagggagtgagggtgaacgaaatcagaagtgaacgaacaagctcgcttttgtctttcttggccatgacggtgctcagacctgaagaaacatcaacctcttcaaaagttgcggttgccaggctgtcctcccaaccatttcacgcattcgaaatccagttccaagcccataatcgtgtcagcgagagattgagaactccaagcgtccaaaggaggactcacgccttggtccattcgtccaccatctttccacgatgcttctctttggtaagcacaccgatcgctttgcctttacccgtcttttttaaagtgtccaccaagtctgtcaggacacctgttcaacaatgaaaatagttaaatgaggaagacaggaaaagaaagaatacgttgatgtgatgagattaagaaaaaatgcaattcgaagcgcgcgcaagaggagaggtggacgaagaaggatgcaaaactaaccgaacgaagcagggtcctttgcgttcttgggcacaatcctgatcgggatgtccgccttatcagctgccaattgctggagaattttggctgacagagattgatttagggacatgatacaatctcaagtaagctttctgttcgtaagagaacgggggtggacagagaaggacgatggagaagaatccacctaggaacgagataagacaaacctttggagggagagcatacaaagacgatctcatctggtctgaatacgatgatggttgagggaaactcgtatccaagcagccaggtctaagaacgaataagaaagtggcaaaaatccgagaggaaaacatcagcacattttgttttgttgtcttcctcttccctttctcctcgccatagatgaccgattcacgctagagcggaagcaaggacaggccaggaaggacagattctggttgactgacctgcagagcggtactcttcttgtacactccatcctcgtctggatcgccgacaagtatgacaagcgcgtccgcctgggcaagttgactatactcatcgacgtctccgggagtctaagatggagaaggcagtggccgaaagatgtacatattcacatcgagacgagataaagaataggagcacaaacaaaagatgaaaagcacacacataacgtcagccatttatcaacgggaaaggatagacagaccaagtagagacaggcgaagcaacagcagcaaaagaaagaagaaaagaactctgaaagacagaccttccaagcgtcgaggagggatttcgacctggcaaagaacgcggggacgtccaggttgatctctgacatggtttaattctctgtggttctcttctttgcggggatctgttggttctatagcgatgaagaacgagcgagagaatcaatagaaaacaaagatgatggtcagaggaagagaagaaaaaaaggaaaagttgttggctgagatcgcgtccgggtgggagatgagcgtctggtcgggggtcgcgtcacgcgttgtgtaaccacgggtcatgtgactggtgacgtaggatgtgaccatggtcgtgagtgctagaacaagggcgatagagagactctgaagagaagggaagagaaattgaagatgcagatgaagacgcagatgcgcaagaaatgttgcagagatacgcaacaaggaatacagactcaatgagagctgaagaggatggaggcctaagggcaaaacacaaacgacgctgactgcacgagcatatgatacattcagacctcacatgctcaacgcacctacacaacttgtaccgcatcagatcgagtgtttcaacccatgatatattcctttattcggacaatcggttcgatgattacaattccatatatactgtctcaagcttggacgcttcgccttcgcttataccttctttgctctcggcggatcttttcgtctctgcttgcccatctatgtatcccgaatttatggtagtttgtatccagaaactcatgcgcgttcgtgttctttcgagagcttgacaagatcctcgaatggaacttgacttccgccgaagatatcgagtgacctaggttgatatattcaaataagcatttcgaaaagaagagatggtgaagaaaagccgagaggaacgaagagaaaacgaaggaggtggaaaggaagaaaaggaaaggaaaggaggcggaacgtacgagccatatgtgagatctaccttcccgttggatagtcttgagaccagttccaagtcggatatacctgatcacacatacaagaatcaaaatggtttgtttccgagtttgggcataaagaagaaaaagtagtaagagaaaaaagtgaaagaaaggatcgagcgtaccacgagcaccgccagcatacgtagttgggatatgcacccactctcccagccctaccattccgtaaacc

SEQ ID NO: 1631 - DNA, 19207 bp, Xanthophyllomyces dendrorhous
ggtagaggtgtttaggatgttcagaatgtcagaatcattcacagaaggcttggaaaagaaggagaagaggacagaagaacaaacttgaaacaaggtcttcatctattccctggcataatccctctacatccgctgcgtgaatcaagaattcacttttgttcaagagaaagaatgaaatacgatattgtcagtcaagctggatcttcttcttttcttgttaagctcgagaaagagaaggtacctgcagtactctgccagcatatcgagggattctgtgtcacagccaacagagaaatctttgatcaactccatcgaaacgactaggatacgcagaacagagtataggcttaccctttgtgacatccagatccgtcaaatcctgccatttgttcatggccacaacccatcgatctcctctttttcgacagcttacatcgactactagtctgtcctttcccaccgcgttctccagctctatcaatcgctccaaagagaatttggccgatgggaaaagatgtgaggtcacgataactttcgaagcgcctgctttgatccactcggatgcattcgtttgattgattcctcctcccacttgaaggtgatctgatcattgccccgacaaacagagggtgagtagctggggatcatctttcgcatgtagaatagaggaagaacgcaccaggccatgtagaaagtgcttctttggcggccaggtcattgttaggtcctaatttgatgacatgtccgccatgaaggtcatgttctttataaagcgaagcatagtatccaggaggattactgacagaccaattggtttgttcatcaatcagacatcatatagaaccggttcgtaggaatgagtctgtacttcgtattctaaagagaccgttcgaaagacaaaggatattcacctagaaacaaaattcgtcttgagctctgcttcctgagctttcacgtcggacagagtacctcctacgatctgcttgacgagccctccatgaagatcaatgcaaggacggaagagagatttcctggaagcgtcttttgaggaagcggtcatggtggatatcgaatccggaggatggaagtgacggtttggggatggtatatgatacaaagcaggtatggtgatgacgagttggatgaaggagtttaaccctaactgatgatttccactaacgactatcagcagctcccaagcgtgttcacttctggaagaccctaagtgaagaacctcttacatttgccacatcgactgttctttgatggctttcacaggcaagttagtggcgagtagcatcgtccgttttttttgttctcgtgtttacaaaaatcgaattgaagaaacggaaggaggatatctggcgaccgtggcactcattcgagctgatcgagttgaacatcctctcactttaactagaattcccacgtttatcccgatcgatatctaccgagaagtcatcggacaactcttcttagactcaatatcaccaaactggctcgaaagagaggagataaaagatgagcggaggatcaagctgtttgaggatctattgtcttgctgtttagtctcaaaggaatggctcgtaagcctctttctttctttctttcttttgtgtcttctcagtacagatctatcttatgcttaatgaactattaccctgccatttcaggcgatcacccgtccctttctctatcttgacattgacttgtcgtgcatcgataacctggatgctctgttcaacacactgtccctcaacccatatatccgaccatatgtcaagcatctctctttcccgatgacgtcgatcgagcttttggaaaccaaacgtcatctctttccctgcgcccaactaagtttcccatacgatttcgacacagatggatccttgattgatggcattcccgatagcctgctctcgttcacccgatgggaacggaagatccaactccggaaaatcgtcatcgcttcctggcaaggtcgttcatgggaaccagcagcaagagtcctgattcgtgctagcgagatattcgatttgactcaattggaggcattggaattttcagaactcccagtgggagatacagagctcgagctggcagagaacccaaagtcgtccgatctgttggaaccccttcggaggattcttttagattcattcggaccaaagatgcaagaactcaagataacgacgacatctaggctcttgttgttgctctttctcgactctctccctgatctccaacggttgtcgatatcggctgacctagccaacatgattctcaatcggacgtcctacccacgactcgagtctctccagatcatgactgacccagatatcgaacctagtccgatccaagaacacccggacctccttttctcccggaacgatacactcgaacgactcgcacgagcatttcccttattaagagtgataggggcatcaccttacatgagcgaacaagatatatatgccgacgcagagctgatcccggacgaggatctgtttgcagagctcgaagaggaggatttgatatctatggaacagcggagagatgagatgcgggaatgtgcggtggagctcaaagaggttggggttaccttggtcgaccagtggggagttgaatggctaaagaagccaaagtctggattgtcctccgactgggctaaagatattctggtcgctctcacagacaggcaggatggagagcgagaaagcgctatgtgagagctgtttatgatatatgtttctagcatctctctcttcttctttccctgccttcttgtaagatgtatcggctctgtttctgcgctatatccttgacatcaggtggcagctacctaagatacttgaaaaacagaaattcaaaaacagcgccagcttcttacaccttcctccgctgtcttttagtcctcctacactcctctccgcccctcgtctaccatccattagaagaaagaacaaaactattaaaatgtctgacgagcagtacgttcgcatggctaccatgctgctgtttggcgatttatcactttcgtcgttgtgcaaaagtgactgactttcattccgtctctccggggttttttttcctctgtctttttttcctcctccctcctttctattggattctctccgtccatctgatgatgatccgggtagagttgttgttgtaagttggatcatttggtgtctctttcctgctagggatggatgagcaaccacggacggccgatcttctcaagatcgacccatatcaataacatccagcggaataaactctgacagtgcttctttcaccccttccctttttttccctacttccctctgttcggacaatctcaccaatggaaatcgatcgaaaaaaacctcgaatgtagatgcaaaccgctgggtttgagtaagtgctctttcaatctcctacaattcggtcatgttttagtttctcacaagtcccctcttctgttgttggaatcgtttgtctctttcctttgggaaaaactgtgtagtgcccgattcccccaggtatgtttataacgtcgcgttcctccactctcaatatatcacccaacaactaaatcttcttgctaacgtcctatcctttccttgtgcctgttcgtcctttccacacagaccaaccagaccgtacggactttcaatctttccttccacttctcctttcttgctagctagatcaagcaagattggatcatgcgatggaagactccttgaagctgaatttatatttgtgcttcgtttccgtcatttccggggatatgggtcgttcgggatcatgcagaagcactggtacgtgatcagatttttcgagactctgaccccaatttttggactcaccaatagacttgtgtcactcttgtttcttatcgggcggtcgtctgccactctttctttcacttctgtgggaaaatctggtctgatctatgcttacagctggcagaactttgtggactaccacaagtgcatcaacgccaagggagaggattacgctccgtgcaagcagttcaagcgaacctaccgaagtctctgcccgaatggtccgttccgagtttgtttcgaaaaatgctgtcatggatgctaacaaggagacacggtattttgctcttcttcttctttgctgaatacagactggatcgagaagtgggacaaccagatcgaggagggcaaggttagtttctctcttctttccgatttggaatatcacagcgtcgcttggcctgactttttccatttctcatgtctgcactgtctccagttccctgccgatctttccccttagatgtagtgtgattgcatactcggtcaaccgaccgagaagaaggagacgggaagaaacataggatggaagcgaggagagatgacatgtcaaattatgcgattttcaattctgtttgtgtgtgtgtgtgtgtcgggtccttcatttgctgtattcacatcgaaagtctacgaccaggcaatttagaacgaacatcaacccaagagggagtagaatgcacaaggctgctgagaatgaaccatctgaaacttggatagatcgtacaggaggagaaaagagacgagacgattggacggtcatttgagttttttctccgcctgccggttttttcttttttttttctttctttttctcttctcaccttccttgtgcacaacacacttcaatcgacagatcactctactctgtcaggccgatccacatagcctcaggcaagaccacaagcaagcaagtctggtctcacgccaggaatagagacacgccgacaagaggataaaacacaaacgacgtcgtgtacaagggatgatttcaacacgttgtttcccttctctttcaagggcctcgatcccgtccttctctcgacacgctcatatctcgtctcgtactatcccgtcgataacaaccccgtcgggcttcaacctatcgatatcggcatcgacagcaaagttcagaccgggagttttcgtggggacaaagaatggctcggataagactgaaagggtgatgatgctatccggccagtcgactcgacgtatccggttgattcagaataggtcgtactcgactgtagctccgtcgtcatcaacatcgacggcaaagacgataccaacaacagcatcatctccaaagacgtctccatcgccgctctcaccagccgcccccttcccgccatcggcttcttctcctctagaaactctatcaagtccccagctttctcgtccaccgtttgctccgctgccacctttgaacccacgacgactgatgaatctctatcttgctttgtccaaatctcgactatcaatcttggtcaccttaacatccaccaccggactcgccttatcccctcatccttcctcgctttcggtcttgctttctttgacattaggaacgttcttgacgtcggcgtctgcaaactcgatcaatcaattgtttgaggcacctctcgatgctcaagccaccaggacgagaaaccgaccactcgtcactcgagcgatctcccctcctcacgcagctatctttgcggccgtctgtgcagccgtcggtgtgagcgtgttgctctggggatgtaatccaacgacggccattcttgggctggggaaccttgtgttgtattcgtttgtgtacacacctatgaagaggttgacgatctggaacacctgggtaggcgccatcgtaggcgccatcccacccgtcatgggttggactgctacgggcggtcaactttggccgacgaaggagttcaagtcgtgggccgggctgccagattggataccggagagtgaaccggtctgggtgagtgtcgtaccgagggacgaagaggaggaggaggaggaagagactccggctggttgggcaccggtcaagaagaaagcgttcaagctggacaacaagtgggacggtgtgagagcgccaacgttggaggtgagtcgctgtatcttctcgttcttctctgttgtatggagcacagagagagctcatgttagagaaaacgtgttttgcattggatggatctaggattaccaaccgccgtcttacaagagttctggctcggacaattcgggctcttctagtgatgccgccaacgatgatatccctctcccttcgatcgcgctcgaagcaccgttaccggtatctccttctcatcctggccaggtccagatcacagcgctcgctccattatcgctcttccttttgctgttttcctggcagttccctcacttcaacgcactctcccacttcattcgatcggcctacgcttcttcctcttacaagatgctctccgtattaaaccccggtcggaatgcagccgtgtcgctgagacacgctctggcaatcattcctatctgctcggtcctcgctccgttgagtggagcggtcactccgttgtttgccatcacttctcttgcgccgaacgtgatgtttgcgaaaagggcgtatgagttctggaaagtccccagagatctccaagccagacgattgttctgggtctctttgtggcatctcccggtagtgttgggtttaatgatcattcataagaatgatgccggttggatggaaggagtccggaagagtgaagttgggaagtgggtcgtcaggtctaagccttggaaggtcggtacagatgtctggggctgggtcagtggctccaaggagacgccggaacagttggtagacagggtctggggtccaaaggggtcagagcttcctatggcgattccaagtagaaggaagccaccgcctgttcttccttcgtaggctttctaggatgtgtgtatgtgtgccataatgtatatgagctctccttttgtagatcgtgtgtgtgtgtgtgtgtgtgtgagagaaagcaaagcattaatcaatcgatacgacatttccatacgttcttactggccgattgaaggttgactgtaagaaagcagtaccgcagatggggccgagaccctcttgcccattgtctctatcaagcatatttcctcgagacacaaagccacagcacttcagcggctcaaaatctccagctcggtacagtctctagacaaacaaatagagtagcaagggtttacctcaaagagctcacccggtctcttaggtcgaccgacggcgttaagcgttagggttagttcatatgtgacacgccttttcaaccggcgtcagatctcgatctcatcatcatcacgaccatcacctccgacgacaggccaaccacctctacgctcgtcctttacatgcgattcaaccctggaaacatactcaaatctacgttctttgcatcctccactttctcctcccaagcatcaaacatggctaagaaacccagaacgatcccagagccgacggtgcctaccgcgattcagtcgagagaaatccaaaagaccgacagtggtggttagtccttcttcgatcctttttcatttttcattttttatttctggtttgcgaatcgagatagtctgagggatggatggcatagtagaagagtgactgatcgtgtgtctcgtgttgtccttcatctgattcagtcgacgtatgtttccgttttacaatttgagaccggcgacaaaaaaaagaagtggaggcattgactaatcgtctcttgcgacctgattgacttcatcgtctgttctacatctctctcagcacgcttactttgcaggtggatgcttgtatgtagttctttattttttatttttctctcttctttctacccattttgccatagggaagttgacatcaaaaattgaactcaacccagctggggagtagagcatgagttcacttcttatttcggacacctccgtacgcgatatctctcatttccaaatctttatttctctctttttctaatggcgtgatgcaataccccgtgtggtcaaacatccaatgctaacttgacatttcacaaatcgtttgattgtgtagcctcattcaaagccgtttccgggtacaccggtggaaccagcgagaaccctagtttgtcctcttttcgcaaaataacacatttcgttatgatttgattcaactgactttgatctgaggtcatttcctctgaatcagcttaccgagaagtgtgctgttcgtctcgcttctttctgcttttcagagccccatttaagtgggtggttcaaaggaaatagaactgatcgattatgcaataacagccggtcgaacaggacatgccgaggccgtcaaggtcacttacgataaatcttctgtaggctatggagaactcgtcgaggtttgttatcccttgcgccttcttttcatcatatctccaattgatttgagctctgacggtttccgactttgcgtacacgtctgaatggggttcggtacagttcttcttcagaacacacgatcctacaacggctgatcgacaaggaggagacagaggatctcgttcgtctttgatttttctttccccatcttctttctctcagcattctaaatttgatcattgctgacattctcctttatctttcttctgtttcttgactacgggcgcgatgaagaataccgatcggccatctttaccaactctgacgaacaatcaaagatcgcgctagctgtcaaggacgaagttcagaagaaatagtacgttttttttttgtaatttctcccttcttttttctcttttcttctatttgttcatgcctgactctcctctcaacccggcaatgtctttctcgttacgaaaatctagctttgatcccaaaggttctagagttgtcacccagatggcgtctcttgggaaatggtacgacgcagaggactaccatcagttgtacttggacgtcaaccccgacggataccaatgtgctactcatcatcttcattggtgaataatgacagaactcccatgtttttttaaaaaaatcttgtgtatgaatatatatgattcccatcgatcaatcttcattcttacgtgtgacagaacaaatcgatgtgtagaagaagtactttccttctcttcatatcagatcccaggcgcatcacaaacgaaatccaagaaaatccttccgcttcgcccattctctctttcttcttattttcttcttccgaccttgccttttcttctacctctcaggctgctgatcatcaccaccgtccatctctccacccatcgtctggacacctcctccaccctcctcagctcctggtcgtcgggcggagactacgtcgtctactcttaggagcaacgtagcggactgtttgccaaccaaaggcatgcggggtgttcgtaatcgtatcttagtctacgcctcccgtaaagaagaaaaacaaccaccataaacaaaggggggaagaaagagaacttgacgaacctcaatagcagtcttgagagtttggatcttgacggctgcggattcataaaggccataggttttcatgtcggttgcttttccggaatcaccgtccactccccatgaggattctccgttggcgtgtcgtgcctattaaataacacgagcggacaagagacacaacgcgttagagagaagaagaagagagacaaagaaagaagagacatactcggagatcggttaggactctcatagcatttccaccacagttctggatcagcgttctcgggataacctccaaagcctccgcacaggccttcaccggttcaccctcaattccgtccatcaattttgctcgcctcatcaattcaacagagatggccatctcagtcgctcctcctcctggtgagaggagtgggttgaagacgacgtttcgagcaacagccatggcatcagcgaggtttcggtcaatctcgttcaaaatatccttcgaaggtcctcggagcaagatagtgcaagccttgggcgaggtgcattcggtcaagaacgtgaagtacctgtaaagtttccaacatggttgatgataagaacacatgtcgcagtgaacagcgctagatacacaaaaataagtggacgtactcgtcacccatcttctcaacattgaataatccacactgggttccgacatcaacctctcgaagatcctcaactcggttcacaatggtcgctccgaccgctcgagctatacggttgttgtccgactttcggactcgtcggatggcggtgatgttggccttgagaaggtagtgttgggcaagatctatttcgaggcacatggtatgtttaaatcagctctcggactactgcgcaaaaggaaggagagagggcaaactcaccagagactcctttctcggtaaacacaagatccggcttgaactcgacgatcttgtcacacatcatcttgatctgctcctcctcaatttccaaaaccttgctccagtcctcctccctagtgatctcgatatttgtttggctctcccccttcttgtactcaagcgggcagttcaggagtacaatcctcgggttctcgattcgcctcctcatctttgggtgcgtcacatccttgttgaccataacaccggacaataccttgcaatcctcaatctctcctccgggcaccttctccactcgggcgtatcgcttgatatcgatcgtcttgatctcgccagtgccagagttatcggctgtttgagagactgtgcggacagcgtcgagcgcaagctggcacatcagatccgaccacctggaggagaactttgtgccgagggaagtcttgatgagcgcaagcatctccttgtctgaatgaacatcgaccggcttcgagatggactggataacatcgagagaaatttgaagagcagccttgaacgcagagataatgacgactgggtgaatcgatcgttcgagcagagggagcgagtgggccaagatttctccagctaagatataacgagaaccatttacgaagaaataagcttctgtccgagacagtcaagacccaaacgaatcgatgggcttaccaaggatgataacactagtggttccgtctccaacctcttcgtcctgagttcgactaagctcaatcattgacttggcggccggatgagagacttcgatctctctcaagatggcatttccgtcgttggtaattctgttgagtaaggaggaaacgtgagtactcgtctgaaatcttggagtaaaaaaaagaaacataagatcgaccagggaggaaacagaaggaatgagaggcaacatacaagattcctcccataggatctagaatcatcttgagcatggccttgggacccaagcatgttcgaattacatctgctaccgtctataggaaggtgtaagcatatatgggttgccagtgttgacagggtttagttgaacgacaaaataagagcaggcaatcagaaagcacagaaaagacctagtcagcaaggagttcgttcgaaatgtgcaccttgtgaaaggcagttaacaaggacgtcatcgagttgatagatttcagacaagacagtatgtccaacaagtctctgtcataacagcaaaacgaaccttggcagcattgatgtttgcgatctgagccttcctacccgattgtcgctcgggtccagtgtctgattgtgagacgagtaagcaacatgctgggtcagctatgacaacacgattcactgtgtaccacacctaatcatcgaccacatagagttcaaacgcgaacatactcatcacaaatacgttttgactcatgttgggcgtgatggtagagagtgttaaatgagaagggaaggatggaagacagggcttagggtagagatgaaggagaggagaaaggaaaaaaagggagtgagagggtcgaggtgaattacgtaaggattgatgtaacgattcgtaaccaagtcgcgtcgcgtcgcgcttgttttgttacacgacacgacacttatatagatcggcgcacgaatcaaataccgcgtcatggttagtcaccaagttgacaattgatatcttcgccgtaggcgaacaccgccaacttttttctttttttgtgtttttgaagatcttttctcactttcgacacatccttcgtctactgtattctttgcaatcaccttctttcagttctgttttctttgacttttgatttttctgtgtctgctggctcgcctcttctcggaggattttttctttaattttctctccagattttgatcctttaatcaccatctcgtaaactcctccgctccctcagatcgctcaacactcttgcttgaacgcacagacagccacagtcgatttagcacacagctatgggcactgcttgttggttagagtgagtattcagagatctggtatatgttggccatcaaggaaaagtcaggatccttaaactgataactgctcggctttcccgttgttccatctgatcgctaaactttagcggtgacaatccttgtaagtcggtcgttctcaacttcatctcgcttcatgtccctttgcgccgtcttctacttctctctctcgctctaattatcatgaagctcactccgtatttctatgcatatccatctatgggaattgcgcctcacaacacatatctttgaagggtcatcgagcttagacaatcgtggtcagccgtgtaagatctacggcaccgtggactacatcgttgcttccgttctcggaggtatccgtcagtagtacttcacaatttctgagccattcatgtctcggacctgtatacatttgagctgaattgtgtctgtttgcttcctccttctcctcttcacgcctatctgtgtcaaatcaacgtagtggtcgtcattttgattgctcttggactgggctggctcattcaacattccaagaaagcttcgcgattccgcgcgttctggaaccagagcggtgatgaggatcttgaaatgaagacacaccatcaccgtctcatcaacacatccgaagttgaacgacatctctacgatcctccgatgagctctgccggttctgtccgaagcggaaaatccaagcggtctagcatggtacccatgggtgtcagcacagcttcctctaggaaaagcaagactggcaacaccggaactgccaacgcgaggagtcctctgagcggttggagagaaggagacgacatcacaagtatgtgctcaatctttcttttgctcttttcgttcttttctagcggtctttgatgaaagatcgccgaatctttgaaaccgcaggcgtaccaaacctctattctttgggcggtctaaatacatcgacttcctctctttccaatcgatctccatctccttcatcttaccctgaacaagtgaaaaccttgttatctcctgccccgtcaagctttttatcccctccgtcacagtattctccctatgcgccctcaacagaatatgaaccctctgtagctgcgtatcctataggatcaccttacgagcagagggaaaatcagccggggagcgtattccggtacgggatgactgaagggtcgaatccagctgtgattcctggagatatcggcacacgtccgtactcgccaggtctctatcagtctcaattcgacgatcactacagggatgaccggggatatactaaccaccagtaccgtagatgagagaactatgacattctatgtattctctatgattttgttcgcgtccttcttatctgcatatacctattcgtctcataaaaattctatctatcttaacgctctctcctaaaccatcgtttccttgtttttcttcctttcttttttccctctggacactacctacgcctctgacatcaaggaaccctttgtctaccctcttcttccatctgttctgatctttctcccttcgatattcgttatctctaattttcatccttcatgtcaagttccttctttttcgtacgaaatccaatggttttctttctttgtctggagcttaagcaaatgacaaaacatgaagaagatcgcgccgctcgacgcgttgaaacaacacgcgttttgatcctccgcgcctaaaatgaaaacacacgcaacccagttttcgtgttcttgtgttctttggcaacccacctcccttgcctgtatcctccttttatccttgattatttgagatcaacagacccggttgacgtccaagaaaacaactatggatcctaaattattatccgagtggacggctttcgctctcaaaggttcgtcacgactcggtccatctctttgttcatctgttgggattcctgacaaaatctctgtttttattcctatgtctcaaacgcgatttgtttccaaaggtggtctatgtcaaggctttgccaaggaggacttcgttgcacagggcgaaaattcattgatgtttctcaagggagacattgttgtcgctctcgaggcttgtgagaaagagggtgtctactgggtaagttctttctgttcctttcctagatcactgtatcgacttatcaggggaacttatcatgagatttgttgaatttgttctgttcaactctaactctttgccttccttcaatatagggatactgtgaaggcgttctgggccaattcaaaaccacccttgtcgatttccctcaaggagctatccctctacctcctctaccaacccgtcaacggcctagaccgagcgaactccctgatttcgtcttctcgcccgatccttctcctgcaattgacactgcttcgtctcctgtgacggccgtgcctttacttggatcaccaggagtcgaagaatcattatcttctttcgagtttgactctgtcagctgctcaagatcaacctcttctcattcatttgctcggactgaagctagcttaggggctagaacgggcaatcaatccccacagttaccactcacgcctccgagccaaggcaaccatttattcatctctcatcaaatcctgcaacaacaaaagttgaaagctccttctctgggggtagagttcatggtgacttctccaacagctacaaatttctcgatggaggatgatctcgagcgaagtagtagacggagctccgggcagagttgggcgtctgttaccaccgcaagcgagcgatcatcacaagatcaagatggagaagagcaagagcaagaatggaacaaaggcgagagattattgcaggaatgtattgaaaaggaggttgacaggttgtcgatccaacagatgagtagtttaggaagtctgggaagtatggcaagtctcggtagcctgggcagtctgacggatagcttgatcaaagagatggcagcctcagcagcgctccctcctgggtacaacccgaaggccaaacactggaaccttgaacaagatgacgacaagctggaggttttaggagaacctctggactcctccattcgatcaacggcaacagtcatgccggagtctcagtccgatagaaacccagtttctgttctccaatcccgcaaacgatctgttggactgtcgacttcctcttcctcttcctctttctcctcctcaacctcaaaccagactgtcaaccgaagcatcatcaacttcagtaattctgaccattcactccatcccgcaattaactctcttaacagaaacagactcggctcaatagcctcgtctgttagtgcctcatccgatgtcagattcgaatctgagctcagcgatctgttcgacgcatacggaagggagtcaatgtacgcctgccctgacgaaaatgtcatggaggctcagattcgggtccaaagttgcaaacagacgttcgaagatcacgaggacaccgagcgcagagacggggatgaagagataaccattgagggaagagatgagaaaagcatacagtcttccgaatcggcgagtagcttggtcaaagcgctctctgaattaacttctttagcttctccgctggacgattcaagcatgctttctgtcctgaaaggattagaccaaggtgcgccgctctcagagtttccaacacatatcaaaaaaagattatcgagcgagaacttggcgtcatccttaagaaatcggatcatggagcggaacagaacagccgatctcgggggccaaaaaaatgatgttgaggccggatctacgcccggcttagagattcaattagacaaagaagatgtcagggatatgggaaggtcgaccaagcgaccacctcctttgaaactcgatgtgtcgaacgtctacaatgccgacaccgctcagatatcgtctcctgcaactcctactctccatagagcaagaaccccaacattagaggcctcaacatcggcttcgacttcaccctcagttagttcgcctaccgactcccaatcaaaaagcattttacgaggtcaaacgaatgtcaatctgtattcctcccctggcccagttccaatttcattcttcctcaacaatagtcaaacccacttcacatcacctgcggagagcccgataatgtcacccaaatcgttcgcttcacccaagattaatccttcttccgaaggttttgctggtgtaggcgcaggtcggccggcagtcgtaggggacacaaggactcgagtcatgcctcggagggaaaggcctagatcgaagagtttttcgtctcaacaaggagttgagatcgggttccctatgctcagcacgttcgtatctcttctttcgcctttacactgatcaactctaatgaagcctattttttctttcatgttatatcttgtatatctctcatccagatccgagcaaggtgcgcctcaatgttcgtttgtcactctcaatccctcacctgttcctaggattcaaccaggcgacgatcaatgcgctccttatcacgtttctcgtccaacacttcagtctttgggatctattgaccctgaacctgtccgctcgcctactgtccaaccgcaaggcattcaaagaaagacaagcgaacattcccttcttgctgctatcagacgggcggagaacttaccggtaccttcgatccctagcacattcaggaaaccaacaactccatcatcccctcatagttcttcaccattcttgtcacgacctgagacgcctagatctgtttccgacacccgggctggtacaatgaccagcccttcaatcaatccaatcagtcctacttcacccaagatcccgaaatccagagggtttatgggatttggctttcttcgctcgaagtcgcaatctaacttatcgatatcttcgccaggcgctaggatcgatcctttcatactccctcctcagccttcaccttccttttcttcaggctctcctcctgttctcaagtcgattctaattaagactcctgtgaaatcagagattgatcccctttcaagtccagtccgttccaccgatctcggaacggattcatctctggttcatactcctgcaccttcgtttggttattcgagcagcccatcgagacctcggcttgcaacaacaatgtcctctgggacattaccctccttcgtgtcgagttctaatgctctagatgacgatggggaggacttattggatttccaacccagaagaatgaagcccaggacctcatctagcagttcgaccagttcgttcagggatctcgtcaagtcaaaaattcacccatcaccgaagacagattcgaagatgaatcctatgcattctccggtatctcacaccgacttcaaagaaagcacagtgaaagaaggcaaattcgaggtacgtctttcttctttcctcctttcacgaagagttgtgtacgagaagactaaatcatctaaatctggtgctgtgtgccacaatagtttgaattgatgaatccacttgcccaaaagctagccagcaaatccagtgtaaatcttacgccaaatgcaccttctagtacgcttatacctcaaacggatgaatggggtttcttcatcccctccagtatggtccagacttttgcatgtcaacgacgtactgcctctctggggcctgaagctgtacaagcctccgagcaaaagtggctttctatcatggacacgacaccttcgaacgtcgctgcgctacagaagaacaaaaagataaagaagttgctcagatcggatttgccgtcgtcattgaggaccaaaatctgggcgtttttgtgcgatgcgggggcgaagcgagagagcggtctgttcgcaaagctagttgaaaagggtgaggcttcggacgccatggtcaaagactgctcgacgtgagtttatatctcttctgtttatcgcatttgtgattcaattgatccaagatactgatacatcttgtccattatcatttccgactgttcagagtgtacaccgatcattcattattcaaccctccaaactctggtcagaaagacttgctcaatatcctcaaagcatatggccagtacaactctagattggactacaaatctggttggtcgaccttttcgttttatactacatgtttgccgtgtcgattttttttaatcaattaaagcttacgttcttactgagttatcaggtatgcccgaaatcgctgggtgttttgcgattctttgtccggcagaagatgcgttctggttattcgcgactacaatcgatcgtatcaagggttatcacaacaaatccttgccgatagatgcgatgtgttttgtccacttattggaggcggtcgataaaccattggctaagagattgattgtaagtgtcttttgccttgaatggactagtccctagtgcttttgcgttcgcgttgcttactatatattccatcggtgttgatctttgtgattacatagatagactgccagataaacccggaagcgttactacgagcttggattctgcccatgtttgttcgcgtccttccctggcggacagttcttcgagttttagatatattcttccttgaaggtcagatcgattgctttctgttctgatgtctcggaatctgtatttatatctacctagtcttgttgacaccctttgcacaataccttctcatacagatctcacgttccttctcaggatctctctcgccatcctcatcactgcgcgcgatcgacttcttgactccgccaccttacgtacccctgcgcacgtgaagtactacttatacaacctcccctctgacgagctggtctctcctgagaagctcatctcggtggctgatggtattaaacaaggtatgaaggatgatgagatgatgaaactaaggacaaaggctgtggatgaattagcgcaggggaggagaacggccgccaaagcaaaagctcaggcggaagcgaaggcattgaggaagagagtgtaagctggtgtggttcatttcttccgtctcacaattagattcacaattttatattttgttattctatattttt

SEQ ID NO: 1632 - DNA, 24768 bp, Xanthophyllomyces dendrorhous
gttgtcgttgtcgttgtcgtcgtcgttgtcgttgtcgttgtcgttgtcgtcgtcgtcgttgtcatcgccgtcgtcatgatggcccagacctactcggccaacgggatctggatcacaaagcctcgtttcggcatttctcccacagactgcctccttgattgcccattcgtttcggcttctgtgctggaccaactgcattcatacatgtacatatcttgactcgtctgtctttcttgccccgcttcccaactttcacacttttgtccggctgccggtcgctaccgttcgttataacagtcatcatgctggagtatcatcttccatagtcgtcgcctcaaatgaacgcgtctttctctctgtctctgtccctgtctctgtccctgtctctgtccatatccttcttctcacggaactttgtcagatgccatggccaaattgatagtttgcgtcaacagatcgtcaatcgaacggtctctaacagatcacacactctccgtctggtccacccatccccggtatattcggcattccatccgatcccaaatcctaaaacacatggagatatcaataaagccagtagaataagtcataacgttcatagcgcagatcaaacaaatcaaataaggagagaaagaaggaagaaaaaaaagaagaagaaaaaacagacgcacgagtccttcaggcatatctcccataacctctttcggcggagatcctaaatcttgcatctatttcgtgcaacgaccagaccgacatttcaaaatggctgatcagcaacacacacacataaatctgacccgaaagaaataaacagaccttgcccatcaactctctcacttccgctctagtcgattcgtcctcatccgagaacccaggacgttcaaacaacttgataatctcgcttaccagtcccgcctgagattcgtacacatggagctgttccggcgaaatttttgatgcctccggtgacgacaaataagcagggtactgattttgttacataaagaaataacaaatgaaagtatgatgtgtttagggtacaaaacacatcctcacgcatagatgccaaatcatggcaaggaaaagaaaaacaaaaaaaaagaataaagagaaaacatacctttgaatttagctcactcagaggctcatacaagacctctttgctcatcagtccatccatcatgctctctagcatgccttccccatctagatccccgtcaccaccgcctaggccgcctagtgaagccaacaaggctgccagagggtcttcctccgagtcggaagcctaatcgcgaaaaaaacagatggtgtcacagaaagaaaacagaggccaattagtcaaagtacgcttcgaaagacagcttccaaagaattaaattgataagaaaaacaaaatcaatcaccttgttggtctccgatgaacgtttcaatctctccatcgtttctttgatgcccttctggaacccatcgctctgatctgccttggtcgagctttttgagcctgtctgcccagaggtcccttcctcacttgctttcgactcttccagtgcctcctgaaagaccctatcccaagcactcttgatcgctgccatatcctccggtgggatatctgtcggctcagccttcgtaggttcaccaccagctaactcttttaacagagattccattccttttgccaactcggatgcgaacgcatcttcgagaccttcctcgtcttcatctccatcctccccggctgctttcccatcggctcttgcctcggatgaggtcatttggcttgctatcgaatcagttggacgagcagaactggtggagacagaggaagccccgggtatagaactcggttcagccaacgaagggatcaagtctaggtaggcagaatacacggattagcgagaaacagaaacacaaggtccgacaccgagacgtgggtcagtcgtatcgtccatcgggaatcatgaaggaccaaagaaaagcaagaatgctcgcacgaaccatccaaatcatccaaatcttcatcgtcttcggcttccctctgtttcttggcatctgacggagcactcatcattacacgtatgcctatagctgactgagcttgttgagtagataaatataaggtagaataaaacggagagaacaaagtgtagaagatggtcgatggttgatgtccgaatgagatggctctctccctccaaaaaccgagccggttcaagccggcgtcttgttttgccggttcattcatttgcctcccgagtctgcgtgagtacatcccattcgtttccatccgccttttctctctctctcgcgcttcgatcacatacatcaacacagacgtagatagaccgttctgatcgtgaagagctcataagtatcgttacatgtttgaggtagatgctgccgaggaatcatctcccttttaaatccttcttggtatcaatcaacggaccaatcgcgaccacaccactaccctcactcggtggttcgctcccttcgcttccaccgatccctaacagatctctcagcaccctgttctcttcttctaatctaacaatctcggcctctctttccaacgcccagtccaacctggtttctcctaccgcccttccagcggaggaaccgtccgtcagtggacgagcagagagagaatatgacgggggaaggagaccaccggatgaaggtagttccgacatggccgaccttgtggaaagagagcaagagcaagaatcagcatttctactcaacaacgtcaatgaaaagtaaaacagagacacaccctccgtcttctagttctccgttctctaaacgcatcagctttctcaacatctctcctagtttcagtaggcccgagttgatctgagtagattccaggagcgactcgaccccctgttggtgtgagagacccatcaatgcggttgaataatgtttatgtagttccaactcgtgtgtttgattcgagtgcttttttttaataaaaaaatagaaaaaggagaaaaaacaagagagataggcaaaggttcccttaaatatttacgcttgataccaccgagtatcaaggagaacaaatacgagtggcaaactcacagcgagacctctgaattttcccatcactccttccaacgtagcttcatactcgcgtaacaagatcgacagttgcttgttctcgtgggccagcgttcggttctctgacacaagctttgtcgaaaactcttcgattgccgactggtactcctctgcacacagagcaaaaacaaaacaactgacgatcaacggtccgatcaacagaaacagtaacacggcaagattctgatctggacagaccttgagtgagatcagtgttgaaccttcttaacgggaatccagtgttcgcatggacagcttgattctgaattggagcaaagtcatcccaagaacaggcacaagatcggatacaacagaaagagattcagctttgatcagtcgatgcacatcaaggctacctcattggacctctcacgtcccatacaacccaccaccagaatgaaactcatggtctaccttcacttcggcaatctgctcctgtagggcagaggtgaccgctctgttttgagtcagttggtctgataattcagtcacaagcgcccataactttgcgatcggttcttctgaggctgcgatgacggtattaaatgtagaagtttagaacacaatgggctctaccgaccaacaaagatctatcttgaagaataagcaaggaagcatacacatctatgtgtgaaaccgtcgattggatggttgaattcggaagcaggagctgaatgagagatgacttgaacgacacttttatgttttaaatcttgtgggtttgtatctgcgtgtccctcaaccaatccagttgatatatacgttcgatctctagagaaagaaggacggtcgtcggagatgatggcaaggatggtggacagttgatgatggttgcacacgaaagaaactccaagaaatcaataaactcgttcaacacccatcatcaacatcgacactcatcatcatcagcagcagcagcagcagcgacaccactaccgctggtcattcataaagctacagcgacacacaacacatagatacaacagaagtgcccaaaccttactttctttcctagtttgaagagccttgtttcacattgttacatcgtgatcaccgtctctccttcgttccttccctctgaagtgagccaccatggaagccaaaccaaagaggaaggttagttctcttgacacagcttgctctttcgagtctttaccctcaaagaccgctagcagtatctttccggatccaaagaaagacctgaatctgctcaggaagtttcgtgaggcatacaaccatcactgtcaacgatacagttgagctatatgaggtccaagaagagacaggaagggcggaagtgacgtggatgacccacatccggaggggagcaaacatcctagttcactctggcaccagctgtattcctacatacataacagtggtctcctgtccatcagcaacatagttctcttgggtcgtcacactgaactgaccctcttgttcttggtcgaacggtgtgtcaaaacagatcattgggaccatccaacgttcctcgcctgggccttctcctaatttagcccatgtgccgactacaccaaaactttcattgccaaccagctcttcgccatccatatcgagccgtccccgtctgacccctacgtcttctgttcgtggcacgcccacatctgtcaccctcaatggacatcctcctaaggcgcgctcaatactgtcggcctcgaccggtagcacgtctggttcaactacggccaaagcacgtgtgaaagtcgctccgagctccatcatcggcgcgcctgcatcttctttaggctccccttcgttcccatccggttcttcttctagggactatgatcctggagaagcagctgtaggagcggatgtcgtcggtcgaggctttcgaagttccagtccggtaggcagtaatgtaggatcgctcgtatctggtttcggaaaagtaactagtaaggcgagaagtacagttggaacacctacaaatacagtcagacccaaagcagtccctggggctaggtcgtatccggctgtgagcggatctattgtgccggctcctgctcttccatccattcaatcatcaaaacaacagtcaagctcaacagcgtatgcaacatcttccgtgaccggttccccacttactgcttcgactcctgcttcgtccacctcaaatcccttgaatggatcaactgcgaaatctttagttcgagctagaacaacaccaaatgtccattctccagctgattactcaaccttctcctcttttgcgcgtacctctcccggtgtatcatcaccatcgaaccaacctgtatcaggctcttttagtccaccaacttcttcctccgcctttctcaacccatcgagagttcaatcaccaaacataccaaatccatatcatactgtcggcccgtcggcaaaagctcgtccgatgtcctcgctcccaggtccacactctccgaaccttctgtcacctacttctgccaaatatccagtcgaccatccgaatttgtcccccatagctagctcaacttattcgccatatctatcgagtgaatctccgaagttacctccactgtctccctcccattacccaacgaccggttccttcttttcacccgttctgaatcgtacccctcatcgacgttcattcgattcaacatcaactttatcatctgattctccagacgaatcgtccgcccatggggagtcatcctcgttttctgagatctccggtgttcagccctcggctctctccaaaacatcggatgggcacgagacatctgggaggtcccaaggcggggtaatggtgcttgaaggaaccgacaacagactcaacagtggagaagcccattcaagcgaaacagctagaacgatggatagactaggagatgaggatgatatggaggatggcgtggagaaggaggaagcgaaagtgaaccgaaaggtatggttcaaagtctcccagcctgtgtatattctctatagcttagtaacttgaccaattaacatatccttcgattcttaatttctaggttgccgatctagagatttcgaacgctagtttgcttaatattaaccacgccctagaagccacgaaggctaaacaaggtttgtatatcgctccacctatctctactcgattctatcttcctaagtgtgaataccaacgcgctgatatttgcaactctggtcgttctttcgctcactcacctacttagccaaagagattcgggatctccgacgcaaagttcggactggctcagtccagcctctccctccgctcaacaaacgattacgcgctttgacctctccacttctctccacatcctacccgtttcctgccccactcccctcttcctccgagggctcaggcgatgatgaaagtgaggaggaggaatctgatgacgagcaattcgtgagaatcaaagaggtcatgctaggactcttagaacaagcggtccaagcggttcagcagcctcgaccggtgccgagttggatagaaagggaccgtgaccgtcgaggatcgatcgcagatgggttagagaagagtgtggggggcaaggtgctaggtattctggagatggatgagtacagggccaggaaagaagaggaagaagacgataacaacgacgacgaggaaagggaggaagaagatgctcagcagagcgcaagcctggatttgggagatcagactttgcgttttggagatttgagcgattcgagagcgaatgctttgcgtataaatttgtctgatgaggagaggtcgatgatgttgtagacctgctcgttcggcttttgcataattcttttcatatttatttcacttttttccttcgttcttctatccttctttatccctatgtgaacccttttcttttgcccttacctttgctcccatactctgtatactaccttactttctttcatgtactcatcccacccacatagacatctttataccattacactcctgcatcttactccagacatgttatcttttcaccttccttcgccatcaggtttacgggattagatttccatcagacgcaagaaacgcgtcgagacgcatccgtcaagatgacgtcgacgcgtttgtttctcgtttaatcgaaaagggctgcttacttctctgctatccgccgacattctcactttgtgcagatcagatataccgttcatctgcgtcgcttccatctggccagcatgcacaccttgtttgagcctttctcagaccttttacctaatccgaattcaatgtattctgactcattgatatttccaaaagccgcttgggaatctgcccttccttcgactgctgcatcatcgtctgggaccacaataagctccttggacttgaatagcacatggcgcggaatatcgctacctacagagctcatcactttagtactttcattttgcgattcttcaaccttggccgcttgttcgagagtgagcttttcgtttctccagatcgcaggaccgatattatacgaggaggtcattttggacaagtacgcaagttatgatcaattgttttgtaaacgagtaggccatcttgtttccaagaaaatcaagtacattcttcttcaagctgaccctttgccccgttttttcttcttttttttgctttttcttatgaactgagaaaagacaggaaagaaatgctttgagcatctagaaccatggctgtcggtctatcagatcaaatctctttcgctcgtcactcgaccatcgacagcgatctctctagatcgattcatcagcttgagtagtgaacgtattggctccccctcatcatcatcatcatcatcagcagcagcagcagtagcagtcaagcctatccagttggagacattatctgtctcgttgtcatacaacggcttaatcggctacgcgccggtgttgaacgttgtgttacctgtgaaccttcgaatgtatcctgcattcaaccattcatcgaagttcacattcgacgccgaccggcgttcatgggaaatcttctcaagcccaagctggagaatctcactaagaagagtgtggctaagtggttgttgtttgcgtgtggtggagagtgggggaggaacgttcagaggtgatcccttgcgtcccttggaagacgaagcacatggcttatactacaaccccgactttttcctcgtcccatcccgggccgaacgtcttgcgatgaatcagacagacgacggatctcgaacggtagataccccgacatccacaccgctctctatcgtatttgatttgacgaaacgatcgagattgacgcccaaagagttctacacgctctttctctctcagcggcggacttcgggtctcttctcagtgcctggtttgacacaggagtctgcagtttccgcagatacatcctcctcctccttaacttctcaagaatcaggcttcatgccatcaacgattacaacaaagtatgagaacggaatgacgattttggtcaagcgagagagtgaacgtacgtggatcgagagtgggctaagggcacgctcagagggaacacaagatagatttgttcgtgtactagtaacatagttgaacagaccgtgtcgtcattttggttgtgtctttcattcttcaattcaaaataagtctatccctttgttgtgttgtctcttgcaagtactccttgtacaagatatataccaatgtacttctgaaacctctatatacggtggcccggtacaatggacactttcaccatttgtatgatatctatttcgaaggggacagatagttcgtccaccaggtctcaaacgactgttcttccgtccactcgatcccattctcttcgagacacgtcagatcgagttgagtatcctaatagtcagaacgaatctgatgagcgtttggctctctatggacatttggtatgtcaggagacataagatagaaagaaagatagaaagaaggtgactgaccttgggccgaataacacctgcagcaggctcggttccatcaggaatgatgtgcgaaacttcgacgcccagcgcctgggccatgacggtgcacatcgaatacttcgtgaaaggtcgtttggacgagaagtggaggatcgaaggtggaagctccgatgaggtcagtgaacgagggaatcgacgagcgattcgcaaaaggcagacggcaacatcatggacgttggtcggatatctagtttggtacgtatccactgttgaatgacatacacgagatcaaagtgcttggtaagaatttggtgattctgaaagcgtagaacgaaagagaaagatgggtgaaaggcctgcatacttttgtaggtcttgcctgatttatcattcacgacgtccagcaaaacattcaccgctgtttctgaattgtattcggcctctccatagctaggatggaaagttatgagatgatgagcttctctctgccttgcgcgtaggtcacatacacaatcgtacacacacacacactcacaggatgggtacccgaaggacaatcccttgtcctttagagttctccagtactgcaacctcaccctcacgtttggtgataccatagaactgcagtgggtttggtgcgtctgacgtcttgtatggtgggctaatacaacgagcgtgatgaagatacaaggaatctctgagtcatgcgctgctatggcaacctaagcgaacctgcaagagagacgaacctggtgccatcaaagacgtctttgaggagatgaaacagaacggttcagcaagggcgccaggagatgacccaaaaggccaccgaagagacgaaacaccacaccgtataccacaaaacacactgggactcacaatctgtcgagatgtaaatcaaccggaagcctttctccccggctagtctcgctagatgggcgggcaccaacgcgttgagctctctggcctttgccgggttctcctctgcggcgtctggcctgcgctcagcggccgagtggacgacgactggggatcaagagagacaggcacaacattcagctgttcctgaatagtgagtttaagggggaggggaagatagatttccgatcagggcaggcacaaaccatccggattgaactcgtcaatcaacgccctgaccgcttcagggtccaacaggtccaacttgaggagctggtcagtggaccgagtgaatcccaggcctttgactttattgagtgtgtccagagcaaggaagaggacaaggtcaatttgtgggtcgagagaatggcttgtatacataacggatatacatcgacgaaccctctacatctggagctgattggaacactttgagggtagctcgaccgaggagaccggatgcgcctgaaggatagatggcaggtgtgttcttgctcagtcttgttctttaaagtcagactcgattcaattcgattcagtcaccaaagaaactaacctgtgataagaactttcatgatgagatgaacaaggattcttgtgtatctttgtctgtgtatagaccagagagatttcacccagacgggagatgacggaggagggcttgaaggaaggctgattacatacgcttatgcatttccagaggcagcggcacacggaatgaaaaatccgtacagccaatggtagccaggctttacccatcgaattctctctcttctcttgatcgtatcccgaccgttcaccttctacccttgtcgtcgttgccttcttttttctttttccccaactcgtccctcgcctctctctagatcgtccatccgtcttctctacctgtacctttctcgagtgtcaatatgtccgccgctttccgatcgtccaccaggttcatcaacgccctccctaccgcctcgctcacctcgaggggagccgctcccttttccaagggagttagtgtcaacttgatcgcccagcacgattcccacggtgagtacgatcctatgcaccgagccggtaaggctgctagctttgccttgaagtttggaaggtctaccgtcaggtcggggatcaatggtgaggatccctttttctttttttctctccgtcgggtttttttcttctatctgtcttggatttcgcagtcaagaaaaaaaaaacttgccagagcacatacccgtcttctgaattggacatcactcgtcaaccattgtcatctgctcctttgctcgagagcatcagagaaatacagaatccaggagaggtcttttcaggaggttgtcggaagaaaaaacctcgatgggcctttttttcctcagatgttacgtcgattgtgttgatgcggatctcgcgattggtcctcttttctaccatatctgaacgtccgagcgtttccgtcacatcttcatctatcaatatctcttctctacatcccgtctcgtcactcgcagacgttcgaccaactgagatggctattggccatgatcaccttttgacagttgagacagagcgacgaatgctgatttcttctgtcatttctgttgtcactccgactttttctcttagctgctccttccgttggccgacgaatgatccacacctctgtggctgccgagcgagaccccgttgccagcccggacttttccaagtaccgagccagctcttcttcgacgaaccgaaacttgtcctacttcatgatcggttcgatgggaacattgaccgctgccgctgcaaagtccaccgtcgtcgacttggtcaccaccttgtctgcctctgccgatgtgttggctcttgcaaagctcgaggttgccacttcttctatccctgagggaaaggtgaatattccattttctttctgctgtattgatctgttctgtgggaaagaaaagagcaggagaaagaaggagagacaagacattgatggcttacgtttggttgttgttgtttttccgcctcgctcgcctgggttgctatgatgatatagaacgtcgttgtcagttggcgaggaaagccagtgttcatccgacaccgaactgctgaggaggtcgaggaggccaacgctgttgacatgaagaccctccgagatccccaggctgattccgagcgagtccagaagcccgactggtaagttgctctgagtttatgtgtctgctggagggggacgagtgttggagggggttacagcaaggccaaagaaatcgaccacaagtctgatgacccgagctgccaacttttacaggctcgtcatgatcggtgtctgcacccatcttggatgtgtccctatgtaagtcatattctacccgtttatatgagaaagaaaggcagagatatgatttctgaccgaccggataccgttggatttcgactacaacagtggagaggctggtgatttcggtggatggttctgcccttgccacggatcccattacgatatctctggtcgaatccgaaagggacctgccccgctcaacttggaggtccccagctactcgttctctgatgacaacgagaccttgaccatcggttaaaaagtttttctttcttgtaaagaaaacaatcaagtagatgtgaggagtgtgagtgtgagtgtgagtatgagcgtgagcgtacttggtgtgtggtgtgtggcgggtgatgtagtgtggacggcgaggagagggagatggatggacagacagatggatgggtatacagctgagacagtgtttctcttattcgcttgtcctctttctttctctactcttcttgtttactcttgcttggtgtcaagtttcattgtgtttccttttcttctctagtctcttttgttttattctttcattattccaatcaacatgatttaccgcatcgccgtgtgagtgagagtaagaatgagagtggaagtgtttatgggtgtgcctttaagtcattgtggggaagaatggtcgagggtgatgtgcgtgttggtccatggaaagagcattcactcgatacttcccgaacgaaaggatgtaaatagagaagtaagaaagtgaatttaagagaaaaaaacgtgcaagaaaagggactttgaaggaaacggagaacaggggtaggggatgtaattcagagttaatagaaggtgaagagacgagagagaatgaaggtctgaatgattgaacgtacgtcaatagagaaagtgtcgagcaagcgattaaccctagtcaactagatcagttaaaggaatcagataccccaaattgaaagagagcgcgctctctatgaggtgtgggcaatgaaagaaaaagagaatacagcaacaaaggaaacaaacggcctacaagagtacatgtacagggacggaaagagggtactatgcacagattggttagggtttatactcttgccgttcagagtgacggatcggcctgacgagcctggtctatccaatggatccgaagcttttttgtttgtccgaaatgatgaggagaggacggaaatacaatcggaaacaagccgatggaaagacaacgagaggatgttttgtattctggttggctcgtttatactttttttaataccttttcgattaaagtcaccactttttctcctttttcctttctcttctttagtcttttcttctctccttcttagtaaatcttgatacagcacattcaacggcgcacgcacacatacacatatatacttacatgctctcacgctcgcaaaggccattttggagggcgcgttaacaaactggatttagttggaatcgttcggggcttcttgtgatatgccggtttgtttgagtggagtatctgtgattaactttgttgtctgattggtcgaccgtctagctctctctggcgagcgatcattggaggcgatcatcctccatgagaacgggcatggcgacagggacgaaagcaaaaaaaataaattggccaagccaagggacccatcgagtgggtatatctgattggatcggatctatctcgcttatttatagaacaatttgtacctgaccctatcggccttcgtcgcccgttgtggggcggcgggcctggtcggtcaatgggataaatgggcggtatggataggtaccccgcccacgagagaagcgcagtcgctctgttcctgattccttctaatcagacaagaaaccaggtacccagacccacaccaatcaggcacccgacagcggccaacatcaaatccggacggaacgataaaaaacacaaatttacttcctctgtctgtttctttcttcctttcgagattcgtttaaaacagagagccgtccgattttggtctgctttcctttctcttctttcccttgacatcaaacacacactctctttatccaccctactcgctctccaccaacgtacgttcgtctgtcgacctcatggtgccggcgatgttctgtgaagaagagaatcaaaactgacggccttcgactttctcttcacgattctccttgtactctctcttttctgatcctccaatcacagatgcgaacgagttttatggccgctgctgctgtcgcagcaatgaccactgtccaggcagcgttgatcgagcactggtggtaagtcctctttcttctgtggcaacgtcttgcctgttcacttccagcctaatgttcgactcctgcctttcttttcctattacagggacatcacctatgctgaagccaatcctgatcgtgagcatgacctcctaggattatcaattctatcttttatttttccttcttttatttttttaaccttacactaaaccgacatttcttcttcactcagaaatgtatgagcgacgagtcatcggtgtcaatggaacttggtcagtgattacccactgaatgaccttatcccactagacaccttgtgacaggctcgatcttacttattttttttatccctataggcctcctcccccggttgttgccactcgaggtgatatcgtccgaatccacgctaccaacaagatcagccaacctgccgctcttcatgcccacggtatgttcttcaacagaacaggttactatgatggacctgttggagttacccagtggtatgtgtagcctccctgtaatcttgtcgatcgcctcacacgcttatctcctttcctcttcttagcggtatccctgtcgacgcgtcccttacctacgatatcgacacccaatatcagcaagggacgtactggattcacggacacaacctcggtcaatacaccgatggtctccgaactcctttcatcatccacccaaacaaagaaaccactagaaccgacatcacctgggatcatgatttcaccgccgttgtgtccgagtggtaccatgaggagcacgaacagcttttgaccgagtttatgagcattgtgagtttctgtcctgtattttttcctaacttgatgtatacatatcctaatcattgtcttttacagtacaaccctactggagccgagcctgttcctccctcggccttgatttactttgcggagaactttgcgaattacagtgactatgttggtggcgctgccgccattagcaacggctctataaccgccgacaggtccatgatcaacttcgaggctggcaagaagtaccttatccgattcatcaacatgggtgctttcgccatgttccaactcgccctagacggtcacgagtggttagtctaaaaactgctctttggattggtacaacgaaagctgatctcgatccgtgaccacttcacaggcaaattgtcgaggtagacggagttgagactaacccctacacgatcgaccacttccctatctctgttgctcagcgatacgccgtcctcgttactgccaagaacgacacgagcgagaacttccacctccatgccaactttgatccccagatgtttgatactgtgcccgacgatctccagctcagtcagtactcttcctgccttatctatcatttgttctcttgcgcacagtcattaaccttgccatgtcttctcagattacactgccactatcaactacaaaactggtaattccgtcgccgagggtagcactattgaggcttacgacttcttcgatgataccgttatgtcgcctcacaagcctgttgccatggctgaagccgactactccttcgcactctcctttgccttcgacacattcgacaacggaatcaaccgagctgccttcaacgagactacgtacaacgcgccttctaccccgtccttgttcactgcggcgtcgatgggtgcgaaagcgactgtcgaggcttacggagcgatgaccaatgcccatatcttccagcgaaaccagatgattcagctcaccatcatcaacactgatagtggacagcaccctttccatttgcacggacacaacttccaggtcgttcaccgatcgttcaacgactcgtctcccgccttggttgagggacagcccaacccgttcgtccgagacgtcgttatggttcccccggatggtggatccaccacgattcgattccgagctgataaccccggagtttggttcttccattgccacattgactggcatttgtcgtccggtcttgccgccgtgttcatcaccgctcccgaggtcatccaatcgactttcacgatccctcaggagatgaaggatcactgcgcagctctcggtatccatgccgatggtaacgtcgtcggtacgtactccaccaccgactttactggtgagcccctcggaccgtacccgattgtggctggatggaccaccaaggctcgaggagccatggctggttgcgtcctcgccgctgttctcggtatggccagtgtggtctggtactcgtggggctccctcgacgaggctgaaatagaggccgaggagcagaggagacacgatcagaagatgctcgacaaggccgagggtcgaaagcacggtgtgcttggtctcgccaacaagcttgccggaaggcagtgagcgtcttgttttctttcttcatctagcttacggtcctcatcattcttctatgtaccataccacacgtcatctgcatggagtctaatctcccgatcgactcgatccttctctatttatcttcctgatctattaaagaagaaatcttatgtatcaatctcaacctacgaattaaaataagatcgctcgatccatatgatcgttctttcgtcctggcttcttttcgttatcaccctttcctttttcctttttcctttttcctttttccttcgttatcttttctggggttcttcgtattttctacttcctcgctttacaaatatatatagatctggtgaagggatattgctgtcgttctaaatcgtaatgacgacttcccaacaaaaacaaaaactcttgacattgaagtgaatatgaagaaaacgttgactgcaagcctaaagtgattacaagtctaaattgcggggtctgaagctcattcagtggtatatgcttatgagacgctaaccctaacaagtgaaaagaaatagaaagaaggagaaaaacctcatgactacacactttgacaacggtaatgtctctatcctttttgtattcgtgtatagtcgtacttcgaatatccttcgactcgaacttgtagagacgaaggaaaagaagaaaaggggaagacagatatcatggcaaagggtatgcagattacaacaggaatcgccatcaaaattgagaggaaacaagaaatgtcaaaaagaagagaggaaatcaatcacgaggaaagagccgtcgtcgtcatcggcagcaatgctactggtggtggtggtggtgatgatgatgatgatgatgacgataatttctgctttgattccaagagggcaagacttccgacgaggatctcccatgctatatctagaacgcgtgaggttcaaaaatacgaatagaaatagaaacaaaaaaacaaagaggaaacagaggaggaaatccgtgattcagtcagcatttgtacagtaagagaaagatggatggcgttttcaaacttagcaaagaaagacgttggaccaacccatagttcgccagagagccgaatcagcgattcccaaagcgcacatgttctcccatgtgccatgaatgaccgcaatcctgtccatcagatcgttcttccctaatcgattggccatatcattcatcaatcctgttctgcccgacggccgagttggttctaggacattcaataacttttcgagcaagtcgtccggcctttgagtgtacagaaaattattgatgagaggaaattggttcggtgagggtagtgcgatgctgacgacaggaagttgatcgactggaagatactcgaatgacggaaaagggggtacatgagcgcaagaagcttggtaaatgatagcgtggactgggagcaacgtgcctgttggcgttgcgagatcgttggaagggatggcagtcggccggatggcgagcatatgagtgggaaggacgtcagaggtaacgtttggagggatgtcgaatgtcatgatcgacggaagaggtgattgaacgatacgtcggtccgatagcgagcaagacagagcggtccggagaagttctggacctcgttcagacagtttttccaacagataatctagtggctacgaattctcaagccaatacaagacaccacagttcaaccgatctgaatcaggactgctcgcaagttcaaacacggtcttatgactaaccacttctggatccaagcctttgatggctccgatgtcgatgtttgccggtctgtctggcctcgggagatacaatggcaagaatccgccgcccggatgaggtagggttgaatcattgaggctattgacctgcctggtagtcgagtgacgagcggaagcctctgagacttttgatcgtttgggcgatggggttcggtttgatcgtcgcagctcgttctttgacgatgatatagaggtcggggtgagaatcgcctggcgggcggacgagccggacattctcgaacgaggacgcatcttggacgaacgactcgacgacggctgtcgtgatggagaagcgggcgaggatagggttatcggagttcgaggaagcatggacatcatcgtgactgacgtcaggcacagggatgtatgcggaggtaaaaagcggtgagggcaagggcaagagcgagagtgaatacaagtgacagtccgtgccaagacaagacgggagaaagacagtacgtacgttgtccaaaggaaaggcagagaagaaggtcagaaaaggtcaggtcggaagtgagtctgtgtatatacggggagagaagggaagagaatggagaaagaaacggatcaagggaggaaaaggaagaggacgaaagaaacaagaaaataaataaagaactgtctggcctttttatggcatgtagattttcttcctgtctgtcagatatttggccgacgtctgtcaagcacacctgtcggtacgtcagtcggccagtcaatcatctcgtcggtcagacagccggtcagccggtcaatcagtcaatcagccaatcagccctgtgagttagtaggtccgccagtcagtctgcctatcaatcatccggtatcgcttgatgagaactttggctctcaactctcttggggtcttttagtttagaacagtgagtgtgtgtcagagagaacgcgacagaccgaccgagccaggtgcgaactctgggatcttcaagcgccggaaaggaagcgcctggaaaagaattagaagtagaagacgatgacgataacgctggagcgagtgagtgtcgatcgaacggcagagaattaatcatcctcgccgaattgctaaccccctttcctctgtgcccggtgtctggtgccttgtgcttggtgccttttttctccactttatttgtcctctcttttcttcctttcttcttttctttcgcgtggcttttttcatttatttatttatttatctatttctttcaagcccaaaatctgggtgcttgctttttcatgccctcttccgatgagagcagacttgcccgcctcactctcaaaaacttcttacacccaactctattcaacttatttgtttacgtaacattcgtatacatatagcccaaaccgacgacaaacccaaagttcaattgaaagaaaactctaagactgtctaatttcaaagccgatcatgagatctagatgtggcgattagaaaataaacaaaacaaaagttggaaatctcacccaacgaggctttagctgcgagattcatagacatcgaagagcaggaaaggagagactccgtttttccgagcatccacgaggttgttagacgtggattgtctttatttacatctcttcggtctgctctctctgtcctgcttttctgttaatttattttcttcattggcattctcattcatatcatcatcattatcgttctcttctgtctccttcttaggaattcttgtaaattacaaaggcatcagaagaaacaatcaacggagctttattactatcccccttctctttaggcgtttcaaacacatactcaatctgtcggatcaggttataaaaagcaaacgtggcatcacttcctcaaagctcatcgctctacttgcatgagtctgatgatcgttagctctgactcgaggggtagcagttttcaattgagaaaagagagtaacagacctaggcaagtttgctcctgcgtcgtttaaatataatttctatcaatcttccataattttcacttaagtgtaatcatccttaatcaattacactgtcataaaattcacttgaaagtcgaagcattacgggatatttaagcaagtttaagatgccatcccctcgacagactgaatccaaaaagtggaaagcaatctatcgacacagatgggaagaaggtagaggaggtccctgacaacacaagccggcagtgcagtggcaaggtcatcgtgtccggccgtcgtgcaagcagaggatggccggacgggcaaggcaaaaagaagtaaaccagatgggtccggtggacccatataagtggttaaacttataagaacagatactacacatgatctaagccaaaaggccagagaggatgggggaaaagcaaataggctcaagaccggacgaggggccataatttatacttttccgacttgccatctttctctgaatttttccttcttgatcttctttaattgtcacgcttgtcacgctgaccatatggttttgcgatcagccgcgtagttctttagttttctcttcttgtgagatctgctgttcatgttcaatttcaaataacacgagttccgtccccttgtttgagagatcaaccagaagattcttcccggtatattacttctaaacaaaccgatattaatatgaagatgattatgtttgtcgctactagtttcaccacgagactcacacatatatacacacaacgagccttcttctttctccttctctgctgtggtcaagtgatgagaatcattcatgtcgagctcgcacatccgacggtccccaagatgagagtgagacaacgagtgacgaccgggcaaacaccatgtttcgactgtctgaacccggacccaacaccgctctgaagatgattgtctcattttgattttgattgaaacacagacatgaataagatttgagatattctctcttcaaataaattcatctccctccttggcgaacacgcatatcgcccaaagtctttgctccctatcatgcacccttccccaaagccttgccgggtttggcgaaaagtcaaaggacatagcttatcgctcagaaggctttgatccgcctttcgttaggatgttttttcggaagagctaaagaagtcaaccagaagagatcaagatttcacaccccatcgaatgtttacaacccacacttcgctctctttgttcttttcttcctcctccttctctcgatgaaacaagcataaaagaatgtaacaagaggaaggggaaggaagaaagggggggagaagaaagaagcggaaggttgctgagtcaagaagtaagaacaaaaagggggggtcggttcgaccggggggtttgacaatcaataggttgagagcttgtcggccaaggcaaataaaaggaatgtttctaaatcaaagttattccgtcgggctcatcggcacagttctttcgtccgctggtttcatttgaacctcacgattgactgcgcggatgtgtattatacgctttctatattcccatctacctcgtcactgatttagggttatacagcaatacccccgccacgtcccgtaaattcacaaagtcagctaacgaacaacagagctacagtggatgatggattcatacgtaaatgaacagatgcgaattttgcccgaagggatatacgcacgcacatacacaccatgaatttagggaacagagtaagagatcgggccgagtaagcgcacggtttcggtgaaccctactattcatgcgccgagcttggtattgcaggccgagctcgggccaagccgttcggctgagctgtcgaagtttttgtcattaggttttttggacttgtgctgtagctgaccatttaaatcaattcgaacaaacgaaaaaaaactcaagatatcgccaacttcggggattcttctttttaagataaaatagaatgatccatggaaatagaccataattacacgaactgtggtgatgttcgtgaagtcaagatgcgtgaacccgaagactgaggccgtgaatgtagatgtgagtttgagtgaacgtttggacagatgactgtgccaaacgggcacaggccgggatggtcctggactgtgagtgagtgagctgtgagtaaaataagattgatcgagaggattcgagcccgaaagaagcatgcaaagtgattttcattaatgccggctgagtgagcaggctagatagatgactcagaaggctacatgggcatatcacacacggccgccaaaactcacgccttcatacgctcatgcttatcctcatggccgcatctacagtcatattgatatcctcatcctcacgcgggcacacacacacacacacacacacacccgcgggtgtgtgtgtgtgaaagccaaataagaataggggtctatattacatgaccgaccgtgtcaaacaaacacgcagccaagaaggcttgtcccggagttcaatatacggaaaaaggggccgagaaaataatttgactgggtccaagcgtatcctcggcaacacggccaccggccagctctccatccccgccgttcgccgtctcggctgacaaactcagctctgtggaagatatccgaacgttttcacttataaagaagcccagctcgaggtatgcctttcttttgatcttcgtttagctctcccatcactcgattgaatctctagacgtattttcccatcacaaagacaactacttctacttagagctacatatccacattcaaaagatgcctcttatcactagaaagaacacacctccttccttcgtgatcggtcaatcagcttcgttcactcagccaactcaacaaatgagttcccctccagtcatcatcttgactcgttagttcgaaattccttctctttcttccatgcgcctgtgagactttgctgatattccatcatgctttctttccaatcagctcctccctcagacatgccaactcctcccgctgacacccagctctcacccactgggccttccctcgtcagacgagtcagcggagcaagttcatcagcttcgtcaaagtcgtacgatgtgtcctacttcctgccttcccgtcggtcccgacgaccttcgagcccgcctggaccaatcccggttagacttcgaaattcaaagctaattctggaccagaacagtccgtttcgggcgagagcactaggattagatctcgtcgttccttgaattcagtctgaggatcttgccaccaattctccaaaggaatcttcctctcataccatgtctttccaaatactcgtccgaccgagcacgtgtgtctaaatccaatcggaccgtctcggacgtgtatactctacggaaacactcctgatggagtttccctcgtaggaaacaatgtcgtctctcttttatcagtgactatatgctctccgaccggctggttctttttcggatctagagcttatctctgatcctatctggccatgcgtctttctctactgccatgcgtgcttcgctcatggcttgtatatttgtctcttggtagtgtcctcagtctggtgtccagttggaatcaccatctgatttcttactctcacactcagtatatagtttttacgttcctcttacaactcgcatcgatctagatactcgattatcaatgcacatcctctgtttatttctgcctgctttttctttctatattcctcgagacaaaaccgagaattatcaggaagttccgacgacgtcgagatgagatgactcgctgagagttatcggcatcgagtcatatacttgattgagatttttgaattgataacattatttatatgtccaacagtgtagtcatcctcggctgggtggagcccacggtaaaagaggaagagaaaaaaaagaccgccttagcttctttcaacccatctatcatcccgtttctcttcatcctcatccagacatggctcagttaatcagagatacattcgcaaactccaaggctgccggcaagcctgtgtttgtgtccttccttaccgcaggttacccaaacgccagctcgaccgtccctctcatgctcgccctccagaagggtggggctgatatcatcgagctcggtgtgcccttcagtgatccgatcgccgatggaccagccattcaacattccaacaatgcaagttttttctttttttttttttttt

SEQ ID NO: 1633 - DNA, 6962 bp, Xanthophyllomyces dendrorhous
aaaaaaaaaaaaaaaaaggtcgaagctttactaaccgattttcatattttcatcctcttacaggttgctctacagaacgacattgacttcaagacatgccttgagcagatcaaagaagcacgagctgtcggtttgaccactcccgtcttgcttatgggttagtactttcttacagacgttcccctctttctgtaagtttgctgatcggctgcttcgtccgatttttactcttgcaggttactacaacccagtcatgtcctacggagaggagaaggcagtcaaggacgccaaagacgctggagcaaacggattcattatggttgatcttcctcctgaggaggccatccgattcagaaccacctgcactagcgaagggtaggttttcacgttttaccttgtcttctttctgatacatgtcgctcacatattcattttcctcgtcatggtccgcaatagactctcctacatccctctcatcgctccttccaccactgatgctcgaatcaaattcttagctggaatcaccgactctttcatctatgtcgtctcccgagtaaggcactgtttaactcatatgccctttctcgttggacaaagtctgacagttcaactctttgttcgtaacagatgggtaccactgggtcttccgctgcagagtccatttccgactcccttcccaaggagatcgctcggataagaaagttcacccaagctcccttggccgtcggattcggtgtcgccactagggagcatttccagactgtcgccaatgctggatccgacggtgtcgtcatcggttctcgaatcgttaacgtcatcaaagagactgctagcgatgacaccgctcgggccgagcgtctggaagagtacatccgagaagtttgctcgtctgagccttccgacaagccttcttcgtccaagcccccgccgacagccgagccagagattgcttctctccctgcaaagccggccgacattccggaccaaaaggtcgccaacggagatgcgcttcctgcgcgattcggaaactttggtggtcagtacgttcccgaggccttggtcgagtcgcttaacgagctcgagcaggcccacaaggacgcgctcgcggatccgtcgttctgggaggagttcagagggctctacggctacatgaacaggccttcagaattatacgaggccactcgattgaccgagcatgccggaggagcgaagatctggttgaagcgagaggatctcaaccacaccggttcccacaagatcaacaacgctgtcggccagatccttctcgccaagcggctcggaaagacttgcatcatcgcagagaccggagccggtcagcacggcgtggccaccgcgaccgcctgtgccaggttcggaatgaagtgcaagatctacatgggagcagaggacgtccgaagacaggcgctcaatgtgttcagaatcaagatgcttggaggagaggtcgtccctgtcacctctggttcgatgacccttaaggatgccatcaacgaggccatgcgatcctgggtgaccgacctatcaaccactcactactgtgtcggctctgccatcggccctcatccgttccctacgatcgtccgagatttccaaaagatcattggtcaggagatcaaggagcagcttcagaaagtccgaggaaagctcccagacgccgtggtggcctgtgtcggtggaggaagtaacgcgatcggaactttcttcgattttattccggacaagaccgttcgattggtcggtgtcgaggccggtggacatggtgtcgacagtgacaagcactcggccacgctctcattgggtgtacccggtgtgttgcacggagtgagaacctacctcttgcagtccaagactggtcagatcatcgagactcactcgatctcgcccggattggactaccctggagtcggtccggaacactcttggttgaaggataccggtcgggcagagtacgttgtggctgatgatgagcaggcccttcgagctttcaggctgttgacccagttggagggtatcattcctggtaagtcttcgcgcttcctttcctttcatgtgggttctgtctagaacttcgtctgatctgtctcggtgtgttctcttctgcccagccctcgagtcggcccacgccatccatggagctatcactcttgccaagacgttaccgaaggaccaggatattgtcgtctgcctgtctggccgaggagacaaggacgtcgacgaggtcttccgaattcttcccgactgggctgatcgacttgactggaagatctaaggcggagggatgaaggaagtaattggagggaatgaggaaaaaaaaaggcgagggaacgcggtcttctttcctggcaaggcaatgtcgtgtatctctcttgattctttcgttgtatcgacggaccacactcttttcgaatgaatatcactatcgcatccaatgatcgctatacatggcatttacatatgccagacatcgctgagaaagagagaacattcctttggaaaaagcctactgtgcctgaagtcaggctgatgttgattaaacgtctttccccatcctaagcagacaaacaacttcttttcgttcaacacaccacctctctccgaaaaagctcttcaatccagtccattaagatggttcatatcgctactgcctcggctcccgttaacattgcgtgtatcaaggtccgtctgcattgtgaatgctgctcgtttgccttgtgtgcgtttggtggatctgaaagaacccttgcttgaaccattccatctctgctctttttcttcctgtcctttcctttttctcacgacaaaaaaaccacctggaccctttgtgttcctttccattggtgttcatacacctaacacagtactggggtaaacgggataccaagttgattctccctacaaactcctccttgtctgtcactctcgaccaggatcacctccgatcgacgacgtcttctgcttgtgacgcctcgttcgagaaggatcgactttggcttaacgggatcgaggaggaggtcaaggctggtggtcggttggatgtctgcatcaaggagatgaagaagcttcgagcgcaagaggaagagaaggatgccggtctggagaaagtgagtttttctcctgtgtgcgtgtgtactctgtataggtaccgttgacaggacagtctttctgaagagtttggatcttactcttttttgggggggtggtggtgtttgaaataatgaccaaaataaagctctcatctttcaacgtgcaccttgcgtcttacaacaacttcccgactgccgctggacttgcttcctccgcttccggtctagctgcgttggtcgcctcgctcgcctcgctctacaacctcccaacgaacgcatccgaactctcgctcatcgcccgacaaggttctggttctgcctgccgatcgctcttcggcgggttcgttgcttgggaacagggcaagctttcctctggaaccgactcgttcgctgttcaggtcgagcccagggaacactggccctcactccacgcgctgatctgtgtagtttccgacgagaaaaagacgacggcctcgacggcaggcatgcaaaccacggtgaacacctcgcctttgctccaacaccgaatcgaacacgtcgttccagcccggatggaggccatcacccaggcgatccgggccaaggatttcgactcgttcgcaaagatcaccatgaaggactccaaccagttccacgccgtctgcctcgattcggaacccccgatcttttacttgaacgatgtctcccgatcgatcatccatctcgtcaccgagctcaacagagtgtccgtccaggccggcggtcccgtccttgccgcctacacgttcgacgccgggccgaacgcggtgatctacgccgaggaatcgtccatgccggagatcatcaggttaatcgagcggtacttcccgttgggaacggctttcgagaacccgttcggggttaacaccgaaggcggtgatgccctgagggaaggctttaaccagaacgtcgccccggtgttcaggaagggaagcgtcgcccggttgattcacacccggatcggtgatggacccaggacgtatggcgaggaggagagcctgatcggcgaagacggtctgccaaaggtcgtcaaggcttagactataggttgtttcttctaaatttgagccttcctcccgcctcccttccacaagcataaaacaaaggataaacaaatgaattatcaaaataaaataaaaagtctgccttctttgttttggaatacatcttctttggacatgacccttctccttcttttccgtatacatctttttgggtatttcatggtgatcaaacaacattgtgatcgaaagcagagacggccatggtgctggctttgagcgtctggcgttttgtgtgtcctgcacttgagcaaccccaagctgaccgctaggaaaactcattgatgtgatttatatcgtacgatgaaagagaataaaatgatagaagaacaaagaagaacaaagtagaagaacgtctgagaagaaagacaggaaaatgacacgtacatagtgttcgatgatgaatgatataatattaaatataaaatgaggtaaacgtatagcatcacgggatgaacggatgaacatgtagtggacaaggttgggaaataggaatgtagaatccaagaatcgttgactgatggacggacgtatgtaaacaggtacaccccaaagaaaagaaagaaagaaagaaagaaaacacaaagccaaggaagtaaagcagatggtcttctaagaatacggcttcaaaaagacagtgaacactcgtcgtcgaggaatgacaagaaaagtgagagactacgaaaggaagaaaccaagacgaaaagaagaacggagatcgaacggacagaaataaaggcatgatttcgtttcttcttcttcttgttctacccttgaacacctctaccaaactcttcacttattctctttgattctgagcctgatcctgagcttgaggtcaagttggtcgagccccttagcttgaaaccaggtgaggccgcgccgagtcctatcgaaaacacagcgtgtggtgcaaagtcaactggcataccatcttccggatgtgaatgatgagtgttgtgttgggaatttgattgtgaatgggagtgatggtggtgaagatgagggctgagagggaagtgagacgaaggtatatacctcctcggtgagttgacagatgatcgtctagatgtggctgtcgagggtgagagtggggaggggaaggaggtcgggatcgcgtcagtggacgatcgacgggacggatggatgagcgagagtgtcggcttcggcctcgattttttgtcggtttcaccagaagaggacggagagagagtagcgttgtcgacatgttctggggatacgttgacgttgaggcctaggccaagcccagatccttgcgtcctggcaccagcttgagaaatcgaagcttcttcttcttctccctcctcttcgaccttccacgggttatgataatcgatcttgttcaacaaccttctcctttgctcttcgggatcgttagtttcgtcctcatcgtctcgatatccggtttcgtcgatctcagattcagcctcctcaacccaaacaccgacgtcgacgccacctgcacctttctcgcctgtcagactgacaacgccgacacccgcgagcaacacggctacaccgacgcaaacgagcgcgacgctcaaatccgtaagcacgttgagttggttgaaatagacgagtcctccaaacacactggacacgttgtagaacgaaaaggcgaccgggcagacggcagttggagaggcgagcctgagcgctttgttcagatagatgagttgcgcgagtgcgagtatgaccagggagacaaccaagtacacggtcgtcagcgagttgaattggttggacgacggatgggagattgtgatgagaagaagttcgattgctgattttgcgatcagaagacataacccggacagagttcccgatatcgcagcgtaggaaagtgaaagaagcaactgggtccgacgctcaggcgacgagcaggcgttaggggcgcatgggctttcggaggacgttccgtcatcggagcatggcttggatggcgaagccgtggacgggaggggtcgtgtcgggccgagggaaggggaaacgggtagttggattgggccgggctggctatcgattcgtttccacataaagtgttcgaggatatgactctgtcagagggagacggttgaagagctggttcaataagagacagtccacagggaatgggagaagacagaaaacgggaacaaacggtaacaagagcgaggacaacggcggcggcaaggatactgatgtacgtcgtccactgcggtcgtccaaacagacgaacgaggtcgtcgatcgtatggctgggttcgggaacgaccccgaatgtggcaatcaggattgcgccggtggtgatgaggatggtccctggaggcagggaaggcgaagagcaaaaaaggaaacatgatcagacactccagctgcttccacatatgaactgaaccaggctgaacgtaccgaggatcatgaatctggtgaacgagtcaccgaggaggaacctggcgaagagagcgttccaaaggagggagattgctccgagcggtgcgagaacgacgataggaagcgctccgacctggaagattgtaccgagaacattggatgtgataaagatggcgaacccgatgagccagagcggacgtttccactcgaccttccggttgtcgggatgggcctgctggttgatggtgtgggacttgcgctgtatggtcagtccgagcgactgaacgaatgatgagacgaggccgatggatatcccgacccagagagatatcggtccgtctgttgctgtttggtgtgacggtggttctgtcatcgcattgaggatggg

SEQ ID NO: 1634 - DNA, 6966 bp, Xanthophyllomyces dendrorhous
ggtttgcttgggggcacagtgaaaccctaatgacggccgggatgttctacctggccagccgtggggacaccgaggcgtgtctgtcgtgcggctggaacgagtacgggatcgatgaggatgctgatggacagacagcatacacacctgctggtctagaagagatggccagaggatatgtatgtgtgtgtgtgtgtgtgtgtgtgcacaccatgtcggatctatcaagccaacatgctaagccatgctaccaaccaacacccgcagatcgttgcccacaagcgacagacacatcgtcaggatgaatggcaagggaacagagagcacagagcacagatgactgatcaatctgagagacaacacacacacacacacacacacacacacacacacacatacatgctacgacagaacatcatagagatcccatgaacccagcaacctcgtgagagcaacgctggctcgtcaacttgacggtcaatttttctgggcaccatgtttcttccatcttggcacgtctcttgctttgtgtcgactaccactcgctccagagttgccaacaagacaaacagaacatacacatcgtctacgagagccacgtctcggtcggcaaccacactgagtacacagctacaagcgcttcttgtcgacagtcaagctttttgggagatatacactcggaaaggcttcaagtacatcattcgttgccgtgtttgtgtacatcttgtgtctgttgtagcacccgttctgatcatctcttgtttgtcccaacaggtcaggtcgttctagtctcctctcgtcagcggaacaaacagttgaagacagatctccctggcttgtctttttgtcttggaagcaatgtcctcggccatctcgaagcatggtgtctctgggatcgtcaagattgagcctgaagatgatgagatcatctttctgtctgaacctccgccaccccagaagaagcagcctgtagaaccttttagggaccagactgctactgctactgctgctcctgctgctgctgctccggtctctgcatcagtcgtcactaaccctcctagtgctcctgcttcatctcggacagcgtctggttcatcgtccgacgcttccttaccagcaaccaaccctcgtctcccaggtcgacaggccacccggtctaacggtccgcctccgcctcttccttctttccaacgtcgtatcggtgcatcagccgtatccagactcaattcgaccaggcctgacgcctcggctgtatcagcaacaggcaatccttcaatcgtaaactcttttacagatacggcacctcggacaaggcctgtgagcctgctctcacggatcgagccttctgcaaccttgcccatcgtccccgtccccgtccctgtcccggcacctgtcgctctgagacccactccagttgtctcaaccgtttcatccgcgccaacaactaagaagcctcctcagaggcccttgtcgcctaattcacggccaacagaccccagacgagccgtacgggccaggcaactggccaaccaggcttctgtcgcgccatcttctcaacagatacctgcctttgcctctggccctgcacctgcacctggctctgtacctgcccctaccgctgccgctgttgttgtccctacctctaccgccccccctcctatcgcaccgcctatccaatcggcaccaccggtctcccaaccagcgcctcttccgcttcctcaagcgaccgcatcctcaaaatccaatgccaatcgacccaatcctcagcccaaacccaagcccaaacctaagcccaagactacagctaaagccgtccccctctcgccaacctctcatgcgccttcctccagcaggcattccaagtctcctcatccctcaccacctatgcccgctcccactcatcccgtcgatatgtctgtctttcccaattctgatatgacgtcctatcttcctgcattccctactactccgttcgatagttacccgtacctaggcttttctccagccaaccaggctatcggcaaccattcgggatcgatcgcgtcgtatgactattataacactcatccttatagtgcacctgttcctcaatactttgctccaccgtacatgctagatcccaacttcactcctgtctctcaacagcagtttggccacccctccttccaatcctctcttccctcttgccaatctgtctacccttcatatcccgtcgacccaatcccccagcatacttttcctggtcacgttaatccccctggacccagctcagcgccggaccagaccaagtcgacagcatcacgaaagagctcccagtcgaaagagccgcccttaccgagcgcatccgttttactctctcactcatccgtacctggctcatcacatccatctcgctctgttcaacaaccgcccgtgacgctcgcgcaaccgtcggcaaaggacacgcaacaaccttctgcacaagtatctctggttcagatgaccgatccggctcgccgagagaggactcttcccatcctgtcggaaccaacacaaatcgctgcgtcgaacaaaccgccccatatcccgaacgcgaagtctgctgatgctgttgtaaagggagtgagcgctggaacggctcatgtcaaagatcgacagtcgaatgagtatcgtgtgaacatgagaactgaacctaaacattctgctgttccaaccaatccacaggctgtttcaggaaccaagccaaacgaatcatcccaggttgtccttccatccgatttggattctcgtagtcctgatgactctgcaacaaccgagggccgtcctatggctgtcgatgtacccatcggcgcgtcgcagaaaaagcccaatgtgaaagagctaaagcctgatctgaagcctgacttcaagcttgacttcaagtctgaattcaagcccgattcgaagcctgaattgaagcccaagctggagccgagcatcaaaccggacgtgaaatcactgttgaagacagaaggacattctcaacccgaagttaagaacagaaagacgcttcaagaaagactggccggggagaaaaagctggccgaagccaacagatcgaaatcagctctttcttttccaccttctgcctcacaatcacgttccgatgaatcgtccagtagacctttggacaagcccactgaaaagtctcgtgcaatcacttcaaatgctgctaccatccccccatctccactctttgccacgtcgtcgtcgtcggcggcggtttcagctccaagctctcttcacgcagctcatgcagatccttctcagcactcgaggtctgattatcgagaacgatctcctcttccccctccttctgtccctcctcctccttctgtcccttcccctccgcctcctcgcagagagatgcggccctaccatgattactacccgtctccatctccgccgcgaagacgcgaatatcgtcgaggttggctacctgactctcctcctcataggcgtcgtgaatccacaatagacagaggaagagaccgatcaagatcacctatgtacgatcggtacgagccgagatctcgggtttatcgacgatcaccatcatactcaccatcgccatcgccgccaccaccaccaccaccgtcgaggatgagaagagatctatctccccttcgcgattccgcttggacttcgacgcggcgatcacgttctcctgtgacatacacaaggcgatcccccccgcgttggtctctggttaatcgagtcgacccgattaaccgagttgaaacgcgcatggtatccccaccacgcagccgcgtgcgcgatgacagctcacgcgttgacatgggcgtcagaacggcgacatcccaaaccagttctgattctagatcgtctcagatcccatcgtcgttccgaaatgagaatcttgataggtctttagaattcgacgagcgatcgagagcaaaagaggtaggccgggattgggagtttggtaggcggcgggagattgaacgagaacgagcacgggtggcggcaatagagaagcgagagcaaagagcgcaagaatgggcagcagaacagcggcagcaccgacagctgaggcgagagcgagaggaagcgcgagaacgatccgaagcgattgagctgaggagaaagaagaaccaaacgcaacaggcagcgtcgtcatcatcggccagctatccaaccgatcctgattccatcgggcgaaaggtcagtttgcatcaaactgacaaaccttgtccccggctttccgtagcgaacgcaacgttctgtccacctgcaatggggacgaaagagcttcccgaattgcctattgccatcaggccggtggaaagcacgtctcgggagtcaaacgaagctttagcggccccatcccgaccacgaccatcagaagaaaaagccgagcaaggggatctcgaccttgcgcgcgtcgatccggttgacaccgcctcgctgccgaactcactctcgcagcagcgcgagctttcgggtgactctacaatcgacgttcctcctatacctcggatctcacccgtgagagattgcccgccgccttcggattatcaacctgaagtagatgaggttgagtttttgttggacgaaaccgacgcatggcccgttcatcctcctgttttcaacgatcggaatgaggatgaagaggtatatcagccagacgtagtgccaacaaactccttcgtaccaccagctttgccttctcctgttcgaccttccagccgatcttcctcggaaggcctgttgatcgattccctttactccgccactggtgagcctatcgcgaactttctgcccgaattatcttcttccccccctcccgggaagaagaagaataggaagaagaagaaatccggacccaaggctagcaacaagtaccgaatcggcaacgacaatcttgttggcaacaactccattaacaacagcaacaaaaccaagagcgaccaagtcaaccagatctacaacaagaacaataacaacaacaacttaggtgaaaagagactgagttcaaatatcgcggtgacggatcttgctttacctgcaagatcttcgaacactacgttcattgcgcctctgccaaacacctcgactagttccacaccgcctcgagtgaacactttagcagtgacttcttttgttaatgacgaaacgcccacgtcctcgcccagagtcaaccctctgcttgtccgtctgatgtcaaccgaaccagcgccccctcaacgacggtcgcttttagatcgcgcaggggtttcatcaactcgagacataaacgagggagcagacgggtgggcctcaccaagctcattaatcggccggttgtggaacaggggatcaagatgagaaaccatggtgatgaaaccgtgagtgcttctattgtagagttacttcgatttgctttgctgacgcttcctcttcctcatcctatttcgtatttgcttgactagtgatgtacatgaataaaccgtatttttttattctctgatctctttctttttccttactccttttgtgctatttgctctgctttctctctccgcgcatgtcaatgtttctcaactatccgtttgatgagcctcgggcatctatatatcacactatgctctttcgactgttcattcaatgtcgattcttatgtttagatcatccgtgcccgccttcctaagcttgatgaaaggaagatgagagaagcagttggtaatctcagagatatctgctagaaggatatgtcgatcaccgccgcggaatgaatattgataagatcgtgttttcctattcgcgttcatttaccatcatcaccacaaggtgcacccggcttctgcagcctttttgtcatcgctcccgccatgtccagtctatctgcagctcgttccaggcagtctcggatagactcatcgaaaagcgaggccaaagcttatgtatcactcttccgagcgtttagctctcagattcaaccacccatccgacagatcttggacctgaaggatgcgaaaccgtttggagactttctaacaatcctgtgaggcttgatccttgattcagaccacgacctgtagccttttacttgtggagtttgaagctgacgtgtcccttcttcctatggtatgttcaacgccttgcttgaatggtcatctatagagctcccgaaagcttctctgagcagtcggtgaagatcgcccctcggtcttcaccaagggatagctcggcgaacgactgggtgacccaatacaatagtctgaaaagacttcatcgggctctcaatatatttgctgagaaaagtttgggccagcctccaaatcagtacccggctccgaatttacaggctatgtctaaaggggacgagaaggaaatcctggccttttgtaggattgtagtaggcatcaggttcgtacatgaccctgagttttctccgtttttgtacgtgccatcttgcttacttttgaacccaactatgatgcttcgttccggtctgtctaagcgttcaagctactccggggaacgaggtgattatttcaaagataacaactttagagcaagccgatcaacagtccatcatgttgtccatcaaaccggtaagctttctttgcctatctgtgacagtttctcttggtgtctttcgtgttgacttattcctcgtttatatacaatggcgtctctattcgaagcttctcgatcgggctaatccatcagaaacgcctacgttgtcttcatctctaccgagcgcttcaaacgaagccgaagaatcaccacacgaatctgaacgggcccggttggctctcgaaaagctgtctcttgaaagctcttataacacattgaaggaggagcataacacgttgaaggaacaattggccgatgtgctcaaaaagaatgggaaggaaggttcaatggccgctgatagtaatcgggaggattcgaatatgaggtcggagatcgataggttgaaagacgaattgtatgtctttgttc

SEQ ID NO: 1635 - DNA, 13211 bp, Xanthophyllomyces dendrorhous
cctaacgtcttcttctgaattcgatatatcatccgagtatctagacgtagaagtgaggataatctgagcgatgcggaactagcactcgataaacagacacaagtcatcgagagcttaacgagacgggtaagctttgagacttatcattagttcggtcccacagtgatgcattatccatgctgaaatacatcattctctatttaaacaggtcgaggaattgaatcacgcgtcaacagagaatgtcaagttgaaagatcagctcgatgagtgaggtcctggtacatcgagtcgcccatccgtgactatctcgctgatcggttatcatcgttcttgtctgatcaggtacaagcatgcagccaataggctacagaagagtgagaacgctaacaagaagctcaatcaaaagttggaagagtcggccgggcggagacgccagctcaaagtgcgcatatttcgatcattcttcctttctctctctccttttccctgatacacccaactgactctgatggtctatccattacaatcgtccaataggcgttagaagaagagaacgcttcgctagtagacaaaaacgcagcgttagaagaagatatccggaaggttagttcatgaatagtctcttttcatgaatcatgcgcacagatctgattgtatggccaactcgtcaatttggaacaggcagcaccacttaaacgtatgaggttcatgtacattcaaaacacaaagtcgaagtgatcactgactcatcatctagaacatcaggcttgaacgagagttatacaattcaaatcgctcgatgtgaagatcgagaaaaggctcgactaaaggaaaattcaggtgcgcttggcttttggcttggtcaccgccttaaaactcggtccctgaccgtttgtgttgattaccacagagctttccttcgaactcgaacaagcacgggcccgcttgcagaaggcagagcaagacttgacatctagtcgggatgaactcgaactcaaccacgaacgcatcagggagctagagctcaacagtgctgatggaaggtctcgacgtcgatctgaatctgatgaggacgaagacggggcaggagatgtgtcgatgatagacgagctgaatgagacaatgcagggtaccacgaaaactgagtaagcttcttcagattctcgtcttgtcctaatcttcaacttcggagtggcctgttgacatccagagagtttggactcaaaaacggtgttcagtctcaaacttcaagttcgtcgcctgcaacgagagcttgagaattcccgaacagacagtatagagagctcgaaggtagccgtgttggaaaatctcttggacgatgccagaaagatgaaggatcgatacgagcaggattatctggcatcacataaggccaatttgacgcttcaagccgatcttgagggaatccgaaatggcaagagcttgggagatgggtaagtttgaacaaaattcgattaaatagtcattcatgtgtgagcctggtcggcatgtccttactcgtcgtaacatgcaatggtttccaggccggaagctgcttcggctctgagactgaagttgaatcaggtaattggggagttagactcgacaaaggaagttcttgcagaattagaggtgagagttaacaaaatggtctcggccatgttaaattgggtgcaatacatgacccgtactgaacgatagtgtttgtactatagaccaaatacaacaaagcgaatcaagagcttacggtcgctaaatctgatcgtgaatctttcatttagtctaatctcggccaatcgacattgtactgacatatttatttctttgtcatagtgacacttgttaataaggatcagatcgacattcttcatatgcttcgagagtcggtcaatgaagataaagtccagctagagtctgaccttatgactctgaagcagaagttagtggaagcaaaagagaagaaccatatgcaagtggatcaaatcaatgggtttgtgtttttgttatctgatgagttagacttatagccactgatctatgtttgtttttggaatttcgatagactactgttagagaagatcaatctgcagagtgatggaattggccatcgggagaagatgatagagcgtgagcgcacagttgggtaagactccgtcctttgctttcatattatactcaaaacacaactcaatatctcccctcaataactttcatgcagagatcttcgtgttacgctggcggggcgggatatcccagacgacgtcaagacgcgtttgttggacctaagcgaggaaaagctctcgctttcgatagagttagcgcgggcgttagaacaagtcaaatctttgacagatcatgtccagaatgcaaagaaggttcgtttgatgtctcttttgtttgtgcacgaactcttgtcaattaaagtattcaccggattaaatcttcattgtcatggattggtttcaccaaagttcatgcgcgagcaagataccgtgatcaaagatcagaaggaaaagatgacaacaggggtaggagagcaattcgccgaggctcgacagagttacgaaactcagatttcgacacttcagaaggaagtccaaaagaagactgtacgtattcgtgcaaggagatacagagcgcttttcttcgtctcgatttgaagaaaaaaaacttagtgattgatctgtttgtggtatgttgtatgcatcaggccaatatcaaggagatttcgcagagctacgctcatcagttccaagtattgttgtcggcctatcaagagattggcttaaagatttcgaaggatcatgcccggggagtcggtgtcgcttcatccgtggaaggtcgaggcaacacgccgcaaggcacgagctggctagctcagcagcgaatgcaggtatgttttcgcactttctttcttttcaaggcacctgctgaatttagaacgattgaagcaaagaggaacttactgtttggtatgattgggtttcacaactagttgactggtggactccgacgctagagttgaagacggatgcttttactggcttttttttcaaatgaggtattattcttctctccgaattgttgctgttctctcttgggcagcgtacagacggacgtatacaccatctctttgatcacctttattcccctgaggattgcctttgatttatatatgtttccatccgtagatacccgtgaggacgtgattttggaagactggaggatgagaagatgaaaagatgaagatgacaatgcagggaggagaatgtgacccggtagtagatgtcgataagaaccgaggtaatgaatgaggcgagatagcaagacaaaggaacgcggtcgaaagccttcctttggatttgaacgactcgaacgaagatgtgatcagaacttcggctcagaatctagaattgattccagaaagctcaaacatctctactgattacaacaacctcatgagatacaacgacaggtataagaaagatcggaaggggagcgaaaatgggcgacggattaatcatcgtattttgaaggaactgggacccgtgctctcttcaaatctgaaatgttgtattgatcgtttaggcaggcatatatgagaacgaagacagtttcagtcaagaatccgaatcggctgccaggctgaatggaacaagatgagagatgtctgtgggggcccactaaccaggataagcataagggatatcttcgatcctcggaatgttgttcactctcttataagtacggttgccaaagtagtatgtaggacctatattcgtttggataaattgacggttattcaatcatgcaacttgatggcttgtgttcgtgagtgcatagaaacgaaagaggaagacgaaccgactagaaagatggcacaacaccatgagtagaccggatattcatgaaaggctttttgctgataaagcgaaattgacatgtaaacataaccttcaccattgaattaacaaacacatgttatatatacagactcacgataggtctgtacacgaacgacatgatggaagaaaagagagatgagagtattcaaagatgatgatggttcaaacagaagaagagctatggaagatgcgacgggagaagctgtaacactcacgtgtgtaaccactggctatgtttggtctagggttagggttaaatcacatacaggacgagcagggtatgagtgacatctacaacggtaatgatacggaaaggagccagcaacatcctcgctgctgttgctaatgcttctctatgatggtatactacagttctttgctgcttgtattattaaatcgagtagaaagagacatataattatcattccagtgctcaattggtcaagctgaacatttaagtcgtctgacctgaagacctttgaacatggtgatcattcttgttggccgtgttctcaccgctatcaccatagttattgttagtaggctaatcgattcataggctgaggttagatatctcgctcgaacttctctctcatcttgctactcaaaaaaagaaacaaaaccccatcagcctcttctctagatatgaattacatctacaaacatacacaacaccacaacgatccattttgccatttattttgaggatattccgtccatcttgtgcacggacgacattgtcatcgcaaagtttagtatgctgagaattgtttcgtgtatacttccagggtttgcttgcgctcaggctaacaccgacacaagctcctcgtctgcggttcttctagttatatccagacacattacattcgtcttttttatgtcttcgccattcttgagtctttgtacatattgagctctgcacacgacggacagatgatttcgccactgttgtctgtagctctccccatgtacaccagccagtttatcgcttcttactacgataatattgttaaggattcagagttacagattacttacatcgaggttgaagtcgatacacttggtcccaatccctacttttagtgaagctatgtcatgaatcactcgggagtccaacttgatagatcgtttactcatacattgccgttgccatcaaactcatattttcttttcttgatgcattccaaggatctttatcgctgaaggaattatgtctctctgtgatttatgatatccatgttcatctcgagcttttcatctgctcttgcttctgacaccggaaatctcaacttcaaacgatacatttggcgctgtattgttgctgtctggctctcctcaaaaagttgcttttcagggcttgatatccctattcgctgtcccactgtaaacgtacacagtgtgacccggagttgtttttcgcgcctctgtgatagcctctcttcctttcttactaaaatctgcatttcagatgagcatacattgtaattttcaaagtatcattacgcatcgtcccaatcgtcgttttgttaggagtttgacgagaacgttcactaaggtgatttacctaaagaagttcacaatctgtttcagagtacatgaaagtgactaaccccagaacgccaccttctctttagcactccagtcaacttaggcttccttcaatcaaaccagtttgactgcttcttccatcttgattgaaacattttattttaaaatgacctcggaccaaatactgcttattcttgtcggagtggtcggttctgggaaggtatgacggacgttgttatctcctcttccgtttggaatatcccgatagctgacagtcaacactaggtttgacgtcatctttgtgttatgaaacacttatacagtctacagtagcgaacgagttggagaccgagcatggctatgtgcgttgtaatcaggatgaaatgcaagggaacaggcatctggttgagcaaaaagtctatcaggctcttcagaatgtgaagatcacttctcattctgtcaatgtcatcttgctcaaggctaattgaagagactttggttgattcttcaatagggaaagaacgtggttgtggatcggacgaatttcgactcatcgtacgtgtctctttgcgttgagctaatgtcttcagatcagcttcttatcttgttttgatcgtcatattttactgcacaaagccaacgatcaaagtttctgaatatatcctccaactttccgcacgttaaaaaatgggccttgttttgtaagtctgatatgtcgtcatatgtttcctgatactttcaggagtcgataacaaccgaactgaaccaaaggctttgatcgatacagtggatattccaaaagatgtctgtcgaacgcggcttttgaccagaacaaaccatccgacacttgagcccgagagagctatcatggttcgtctctgttcttactttgcaattctttcaagctgagaactcacatgtatgcgctcgtctcgcgaaataggttctcaatcggttctctaaagaccttcgaccgccaacggtcaacgaaggttttcatcgagtctatcgattgacaaagtctcccgaagctggtacattagatcaagtccttttctcggtcgagcagaacggactcgtcggaaatggaatagctcctttcggaggaaacaggcaaaggcatgacggatcaggcaacgatagtggagtgagagaacacggtgtaaatcatagtaggcgcgctgatgagcgaacgggatggtcatcggacccaccgcctagcctatggggaagttcaccctgggctggcagaaatgggcgttgagactctttctgtatcgttacaaaaccacacaatatgtacgaaagcattttaacgcaggatgaagccgatcaccatatagaatggacgaacaaataagttttgaagttgatgagcggattttaaactcggtcaccttcccccgtgcggggtgggtgactaagcaatcccgagacccgaggcgacagaggagaaacccgccccttgagacaacagtcttcctttcttctagcaattcatctaaaatcgcttttccttgtctccgtcccgtttccttcttcttcttttgccaccccatctacattctacatcgtcacaaacccacctatttcatctgcatctcatctagactctcagctcaatcatgctctattccattccttttgctatcctttcaagtgcccttctcgctgctgcatctcccatcctttccgccaggattgttcccactttgtcctgcaaagctatagacctgtccgagactcctaatctctttgtccgctcccagaccgtcggtactcaggctgtcaagcttgatgtcgattggaattccaatctgacttggcaaggccaacctgacgcagcacaagtcgtcgatactggtgtgtttggattcgaagagtgcaaaggccgagccatcaaggcgttcgttcatattccatccttcccgtgtcagatcctgccgagaggcatgataacgaatcagattgactaatgcttttcttttctttcctttcctctttgtcttcctctcatctacagaacttctgactcattaatctttggacacgtaacttggactgtgctagatgttcaaggaaaaaagatgaagttgtgcctgtctgccccctgtcagtctccgatcgtcccgtgttagccgagattatgtcctgtgctctgactcaccgaatgctgtgcttgctcggactttcttccatcacagatccctacacgggtgtcactccataccttgacaagtgttcggagagtgacgacagttctcagttctggtgtgtagtcatctatccgaatattcttatttcctttccttcgactgacccgcgtcttgtgatcattataggcaatactgggctcttgatacttcggattctgctcatcctgttctttcattcgtgggtccggccggttcggttacgacttacaagaaaggatatctttcgcccaaaacctttgacgcggacgccccgcttactctcgcatctgtcaactccaccgagagctactttgcctacggcattgacgaataatctttggatagtgttttactcttaattaataaaattcactcttcgtatgtgcattggtttttgactgcttggtaaaaaagctggtctgcagccctgcagttttatgtcttctcagatctcttattgttactattgtgtattctcttgccgttcatccgaactttcttctttgttccataatgtttcatcacgcttgtcttttctttcaatccttcatcttcgttgtacaatgttcatgatcaatgtcttttgctctgatcccaagagcgtatgtgtaacgaaccggctacttgaacggggctcaatcgcagtaatagaatgtatgataattcgtaactgttcggatggatggcttaaaaataatctgattcggctgacgtcactcatcgaaaacgacgacgacgacgacgactacttcttcaatatcaactatatttaactagatatggatcgatttcgaccacctaaccatccatacatcaacccacacataaaccttcggtagatctgagaacgcacggcaaattgggttgcgtagaatcaacccccttcgtccaaaaccctcaactcaagtttgtcaagtaagttttagtgaggaaagagacctgttgccgcgctccctttgttccttacattgtagcttctttccttctgctgactcgctgaacgttatatttgaagacctgatcgattgcgataatgtctcaaactaacaagaaacatccttatctgtctggtaactttgtgagttcgcgggtggtttgcgttcttattgattctgttcaacccgatccatggttgcttactctgtcctctctttggaaaaacgttttagcgacctgtttcggtggaacatcccctcacaccatgtgaatacactggtgtaatccctcatgagtttcatggcggtcagtacgtccgaaacggatcgaaccccttactttctgcaaaagacccacatccgacgtatcactggtttgacggtgacggcatgctcgccggcgttcacttcgatcgggatccaatccaaactgggaaagcaatacctaaattcgtcaatcggtggatgttgactgatatacaccaggcgaaccgttcgcttcctatcgccaaaccgctcttgccttcgatctccagactacttcttcctagggctcatgtaccaaactttatggaaaacgtccgaacattcttaactaccatccttgcgcttattcgctcgattttcatgtgtatcgttctcagagtggcgaaactctctgcagcaaacacaaacgttatcttccatgacggacgagcgatagcattatgtgaatcgggatccggatgggaggtgcggttaccagggttggaaagtgttgggtggtggtgctttgagggattggtcgaggatagaggtaagactaccagtggcctcggtggtcgaagtggctggattggtaaaaaattccacgagtgggtgacggcacatccgaggacagatccacagacaggcgatcttgtgctttacagctctgggttctatccgccttatgttcatcactcggttatcggtaaagatggacaagctaagagaatctccatcccgatcccaggcgtatcagcgccaaggatggtaagtatcggctcctttgtgtggtattctttccaagattcatgactgtgtgtcaagtaagattgacatatcatgtgtttcgaccctacatagatgcacgattttgcctgctcactctctcgatcattgattatggatcttcctctctcactttctccctggaaccttcttcaggcagaatccatgatcaaattctaccaggatcagcctagtcgatttgggatcttctctagaatgtatactggcgcagaaggcgaggatggtgtcaagtggttcgaagataaggaagcgtgctgtatctttcgttcgttctcttctccttatttacattcattacaacgttacaagatctagagattctgattgccttgatttttcaatccgaaagacacagcaaatgcgtgggattctacgactgactcagactgtgcggggtcgttcaacttgttggcttgccgatttcgatcagccaagctcgtatccctggctgggaatgttaccgcacccctacctccaccgacagtgacacctgaagaagaagacatttgcctgttgacctactatcggtttgatatgtcctcctcaggttccgaaaataaaatcctggatcgattcccgttgctgtccacaccgtttgagtttcccgcctttccgcccgcgcttggaatgcagtccacccgttggatctatggctgttcgctttccactggaggctttgatgcttgtcttggatctggagcgaagatcgattgcattctgaaaatcgatgtcaggtcgcttgttcagaaaggaatgaccctctcgaaagagcatggtcttctaaggaatacaccagtagacaagcggagtgtaggcgagttgctagaggcgagaaacagaggcgaacaacctggaccgatcagagtattcaagtttccggagggtacacatggccaggaagttggatttgtccctaagagtggatggaaagcggacggggagcatgagatggggaaaggtacagaggacgagggctggctagtatgctatgtattcgacgaggcagtaggactcgatgaaaccggagagtgcaaagtgagagcaaggagtgagcgtaagttcccaccttcttgactgtttcttcaagcaagtctaattaccgacactaacagtcctctctcgtcttggaaaattcaagtgtgggtcattgatgccgctcagatcggcttgggtatggtaggcacatctgattccacggccgttgtttgcaaaatccatcttcctgctcgaggtaatccagaagtcttctcacagtcaatcctcattcttgaagaacaacgttaacacttctcatttctggtttttggacatttaagttccctatggtctccacggtgatttctttacagaatctcaaattgcctctcaaagacctatctcttcaacaacatctctgattcaaccgagcgctcctatcccttcttgggcgcacgatccatcatcaggcccaatcttctcttcagaagggctcacagaggttgtccatgaaaaggcgaccgaggatgaggaagttatcgacatcaactgctcatggactaattccatcctccaaaggtggagggatcgttcacgcaaagaggttctagttagcactgtccgattcagcatgctctttgtgtgggtttggacagtctgggcaggtgcgcttgcaaacgtcataaaattctagttgatatcaccactatttatcttaagtcttctatatgtatcaccttactatttcttgatttcctggaatgtataattgcttgtgtatcgatatatgtttatggaatgttaccgttaaatgagtttccacatgaaccgacgcgtcaacgcgtcagttcatcgaagcaacgcgtcttgactacacgcgtcgttaatgtttcctccttcgaccattttcgtttgaacggccatcaccatactcactgagctcatcgtttctttatctttcttgtggttcgtcaatctgaacacttgctcataaaatatatcaaaatatggcacctcaagaggccatgtccgatcagatcgtgtctctaccagcccacacaccaggtctcactagggccgcgttttcaacaaacgggcagtaggtgtttgtcgtcatgaacataatgcaaacacaacgtgtcccgggctgaccacctctatttcgacctctatgttatacactacagactcatattcaccgctggaaaagacacaatcgttcggatcttcgaaacagctgctggagctgatgtcgagcctagacttttggaagaacattcagacgaagttaactggctacattgctcggtacgtttcttttccttgcctcccctttcttatatatatatagcatagtcctaacgtcattctctgatggggtgtttaatccttcggcagaaaacccaccttataacggcttgttcagactcgtcgttgcggctcttcagcttgcccatcaacggggacccttcaggacaaatcacgtttgctggcttgctgacccgtgcttcgggaatggcaattcgatgtgccgtgtttgacccaagcggtatgcgagtagcatgtgcttccgagtaagttaaccatatcattcaaacatgtcaactggaatcaaacttactgaatctactcaacctttgggctattcgacagcgatcttcacatcaagatcctcccggtctctatgacttccctcagaacacctctcgtccttccgtcagcgcactctcacacaaagccgcctcggtctctcacatggtctccagatggaacaattcttctttcttcaggctgtgatggcaaattgtcgatctggaacacctctctctgcgtgctcaagccaaacacgtcaaccgatgatgacgaatttgatgatgacacaaacgacgatgctactggaaacacgtggaacccgccgacattattgaaaagtttggagggcatgttcgaggtaacagagccagaagatatcaaatcaactacatccgtgtggcatcctagtgggaaatggtttgttgtacctacgaagtcgcatggttcgtaaattctttctggagcttgtacctgattatatggaaaatcagtaccgacgactgacaggatgtttcaattcatagaaatattacaaattcaaagagattcttggtcgaagatgggtctgtttgaaaatgggggtcataactcgtcggtaaccgaactttgtttctcaccaaacggaagatacctgggctcgtctggagttgacggaaagatcctgatctgggaggtttcgactaagaaagtcatcgcctcgtgcgtttctattctctccgtgatttttctcaagcatggtttgagcgctgactgtttttgactctaatccctctatattatcgttttagatacgtaccgtcaaagtcttcctcctcggctatcacgtcactccaattttctcccacgtccaacatccttatatacgctgacgcatccggcacctttggcagatggaacgatccgattccgtctactttccttcatccttgcgagatagcaccttcaactgaagcaagtcgccgagcgagatcacctctatttggcgacgacgacgatgatgacgatac

SEQ ID NO: 1636 - DNA, 4928 bp, Xanthophyllomyces dendrorhous
gatgtaaacaaaccgcccagaaagatcaacgccgatgacagaaaagctacaatcaagaagaaatcccgagcaagggaggaagaggatgacggagatgataccgctttaggagatgaggatggcgaagagttagaagatgagatggacgacgatgatagagcattccttgccgacggggatgaattcgaaggcggatacacgggttgggcccgtgatgaaaaatccaatggcagaatcagagagaaggaaatcggtgagcaggtgtatttgtatttctttttcttctagatgatggcaatcttcgtgtttgctgatcgctttgactgatttcgtccaatagtcagcgtggctaaatctcaacctgcgttccaacctggttcaactgcctcacgcggcaagaagcgatacttaggtttgtgcttgcagttcgtttcgatttcctatcaaaggtcagagctaatcatatacatggtcttggtgattgtagctttcaatatggttggcgccattgatatcaccgatcaagagacccataatgtggttaatgtagagtttcacgacacgagccgtcgaagagggtttcatttccaggatcacatcaagtacgatctggccgctctgggttagtctcgagttcttttcttcgttctcctgctatacgcgctcccgagtattgattaacagaaactgagttcttgactgcaggcgagaagggcgcagtattcgcctccacaccggattctgtcaacccgatttctacacttcattatagactgttcgatacatggtcatcaacatcctctgaatggactcatgaccttccgaaatcagagcgcgtagtcgctgttgctgtcggtggccgctcatccagtgatgtcaaatcatctaggcaagatgatacaacgggcatggtcgttgcggccacatctaagggctatcttcgatttttctctggtagtggagttcaacggtatatttggatgctgggggaggaagttgtctcgatgacggccgggcaacaggaacttctggttgttcaccgagaaggtggaacgagtcttgatggtatgttcatctttgtcgatctgcactctgaccataatatattgctaatgagcattataatcatcaggctgccaaaacctgcggtttaccttagtaaaccttgagtctttcgatataatccaagaaggtcgattgcctcttcctaagtctactactctgaagtggattggattctctgatgtcggagtacgtcgatccataaatattccttctaattttttaaatcctgtttggcgaatctgaaactttgttcttttatctttagaatcccctcatatatgattctcggggtatcatctctgtccttgatcgattccgccgccctcaccaagctcgatgggtgcccgctctagacactaatttattggctcgaaaagagggcaaggatgagagttactgggctgtgggggttcaagatggaaagtttatggccgtcattctcaaggtttgtgatcatacttgattaatcttccacccctcaataccatcaacagaactctccaagagctaagcagtttgttcttacgcatagggtcgagtaacttcaccttactttcctcggcctctcatctcggatcttgatatgaacatccctctcctcaacagagaaaatcagcatggccagttagaagagtggtaagcaagatgatagtaatgtcatttgggagtcaacaaaatgttgtctaacctgccacattctttttgattctagtgtggtccgacagcgtatggaagctctcttctaccgcgatgctcaaattgcaagccagtcgacatactttgccgacgaggtcttccgacttgagatcgcccaggataaatctctattacaacttatccaaactgcctgcaaagccgacaaacttgctcgtgcactcgacgccgctcgtctactcaactctactaaatcaatcgactctgccgtgcagatcgccgcattctaccaccttccgggtctccgggaaaaaattacggaacttcgatccttgaaggaggacgaactttacgagcgtgatcagctggagcgaagggctggtaaaggcggtagatggggcaatggagggggtcaatatgtccaacctggatcagaatttgattacgttacttctaacgccgttcatcccaagacgacgaaaccatcgaccaaatccgtgccggcttttgcgccgaggcctgtaggcggcaaacggacgtttgctgctacacctgacccaacgcctgtttcaatctcttcatcgagactgacagtggactcgtacgcggtagatgaaggatctagagaagagtcattcattccagaatcatcggtagacgttggctcagaatcccatgaacgaggccatggtgacgaagaagagttggaggacggcttgaagaggaagagaacgggagatacggtgatcgacgatttcccggctcctccagagcgcaggaagcggggaaatggggaaggcgatatggcgccgcctctgaagatggcaccgaagaacccatttgccaagaaagatgccaactccgctgcctccaatccttttgctcggtcgaatattggaaagccggtgactgtgggcaaaagcacctcgttctttgatcgcatcgacgatgccagatcggttgaagattccaaatctaaagatagaggcaaaaaacctactgccggaacgacagcggttaaaggttcaaagcagactaccctattcggtctacctcctggtcaagagcctgtcaagaaaaagtctggacgaaagcctcttgagaagaacgatagcttgagaacggttgaatcagatgacgaagaattggatccgcaatcggtttccaataaaaaggcggatgggatgggacgcgctcaaaggcaaagttttgagacggacgtagaggagtcgttcgaagatggaacagagacgcagagaaacgaaggacttgatttagaagaaactcaagtcgattctctaatggagaacgatgacgaggagccgatgatgatagatttgggggacgaggacgacgttgaagaggccgctgtaagtaatattctttgatctggccgcgtctaggtacttttcctttcttttaacaattcatctgacacatgcttatgttttctcctacacgaacatacttcgctctgcagaaagagaacttagaacctgtgaagaatgacggggtgtctaaactagctgcgttccggatgaagactgttgcttaggctatgatcttcataccttacgatcacttctgcgctgtccttcaatctgtatctttccttttgttcttatcggtgatataatcttatcaaaacaattcttccctaccactcttcgtgactccggtctgtatgtattcattgtgcgataccctttataacgaatgatgtttaactctagtgattggctccacaacaagtgacggtcagaggaaagaccatatattgaatattcttctaatgctttacacaacgctcttgttgacgttggaaaagccgacgccgagacaactcaagatgaattcttcctttttgggcgcagatactgccgtcgactcgtcgtcatcctcatcctgatcggattctgcagaagattttgaggcgactgtgggtttgacaggagtaattttgaaagtagtagaaaagaatgtccgaatgtcgcgcataagttgtatgcttcgttggtgtcaagccgagataaaatatgaaaagctcgacgatcagtaactgtcatccgatgcgttgtgttaagaaagaaaatcgtcagagatactcacgaattggcacttagtttgcccagcctaactcttcccacatcttcacttcccaataccatagcgagtaagacgaaaccttgaccgtatgttcccacacatccacctccactgatctcacttaacaagagcgccgccgtggctcgtcctacgtcttccggagtctccaacgaacccttctcgtaaccaacctcagcacaatgcattgctcccgtcgttgattctgaaagaagagagagtccatagccgggagacaatcctgattctgcagacttgtagggatcagtgtagatgtatatatctgggatgaggggattgagcaaacttctggaagactcgactaatcgatttgagaactgaggcgacactcggaccgaatgagccacacctcggattctcttgactcgacctgggtccacaaagttcaacgtcttgacagatctgatggatggacaacggaacagaatttctccaccaccgagcggctcagctcctcgcttgacgatcttgagttcaagtccttcgagttctccaaagagttgcatcgttgggagaaggtaggttctgatcagatcaacacccaagtcttttcggccagaggtgatacctctgagagttaaagagaggtccttctttccccagaaagcaagctgggataacggctcaaggaaataaccaacagaaacggagagagggcaatcgtgggtgtggtgtccgccgagaagaacaccaggggtaaatagaagggaggtaccggtagtagagatatcgatgatggaaccattggtgatcttggagagaagtcggagaagcgaaatttcatgatctgaagagacgttttgagaaaaaagaaatacagacaaccatccagagagtgaattccaaagctctgagaaagaaaagggctagaaacacacgaacctcggagacctgggttcacatcgtcgcttcggatacctcctatccgaacggtccttccagacagcaaactgagaacaagacgttgcctaatatagagatgcccggtaaaccggagaatgtttgaactaggctgtgccatggcgagaacgaatgagcgacgatgatgaggacggttggttgtt

SEQ ID NO: 1637 - DNA, 3406 bp, Xanthophyllomyces dendrorhous
gatgaggacggttggttgtttggatggtatccaacaggtcttgcttcagctaaacactcgaaaatgtttttggaatttttggcggtcatcggttagtaaccgggaactcaaacattttgttcatcctgcccaaccaggattcttgctttctcaaccaccatccgtttcttcaccaatcatgtccgaaccagtttcttccgtaaagtgagagagttttgattgatcctgtatggtagctgtgcttgagagctcatcgttcaagcgtttcgacatatcagaacacctacgtcctcggcatcaaaacccaaaaaacggttcgttgggacgagctcaacctcgtccagaactcgagcaggtgggccgtccaaggcgagagtacctctcaaccagatccccgatgagatcttgaatgatccagaaatcaaccgagccatcggggcgcttccatccaattataacttcgaggtatgtgtctattttaagggataagtacgttttatgagagaatcagtcaagataaccactgacaaacgacatattaacttgatcagatccacaaaacgatacatcaaatgagaagagacaacgtgcaagccgttgcgctgcagatgcctgagggcttgatgatttacggatgtctgatcggagatattctggaaaggtaatcgactgggacgtgaccttggaaccgcttgacgtttcaaagctgacattcaatcgacccttttgtactttcaaaggttcacgtcagcacatcctattcttctggctgtaagtggagtatggaacaacgtcttttcatttcggaactgaatgtgactgacaggtgtctcgaattgtttcatcattcaatatctctataggatgtcacatacggtatgcctccacttttcatacctttcatttcactattcaacatcaaacgtgagcctaaacaaagtgaccgcaacgtaatacataggcgcatgttgtatcgacgatttcactgcccgatctttgggtgctgatatgattgttcactatggtcactcatgtttaagtaagcttcttgtaacttccgtatgcttcgatttgtcacgttcaagctgacactgatttgttctgcgcgaaatcatcaacccgacagttcctaccacgcaaactacactcaagacgctctacgttttcgttgaaatctcaatcgatgcgcatcacttggtgtcaactgtacgaacggccttcccgtcttccaaaaacgcctttggccaggcggttttgcatgtcgatcgacgagctgcaggacatgcagtcaaccaagaagtcaatgaacaactacgagcagaagcggctgaaaaagtcgcggcagccggagagggaaggaagcgtatcatggttggagttgagccggaacctgtggaggatttcccaaacccaactaccgaagaagagaagaaaaacaaaacaaacgagaaagatggtgatgatgaggaactaccaacaaagttggccttggtgtcgacaatccagttcgtagcttccgttcaggttctacgtaatcaactggaagaatccctacctccactttcatcacagccaaccaggagtgagcctaccgtcgaaggagatgctcaggctctggcggtgctggagaaagagaatgagaaagatgaagaagagaagggactttggagaggaaagtatgagattgttgtcccccaggccagaccgctctcgccgggagagattttgggttgcactgcgccaaagttagcgagcgacgtcgatgcattgctgtaagttgcgctgtattaatcctttcaagattttctcgttgattcacaatcggtctaaattcactcttccaaagctatgttggagatggtcggttccatctcgagtccataatgattgcgaacccgactgtaccagcattccgatatgatccatatagcaaaaagttcactcgagagctgtatgatcacgaatctatgcgagagagtcggtcccaagctgtaaacgtagctcggaagagtttggtggttgatacaacggagaaaggaaagggccaaggtagctgggcggtcgtgttgggtacgttgggccgacagggtagtgtaagcgtgatcgacgtgagtatcttctgttctctatatatgcgtatgatttggctactaatgatactttttgtctcgttcaacggtcactcgccagtcaatcacgtcgtcattggccgagacaaagacagatcggacagaacctcctctaccattgctgatctctgagctctcacctgccaaggtgtcattattcccgccgtcgatctcaatttttgtgcaaacatcatgtccgagactttcgatagattggggtgcagctttcgggcggccagtcttaactccgtacgaggctagtctggctctaggcaaagtcaaggtctctgctggggagaggacggctggatgggaaggaggaatgactgaccgaggcgaaggctacccgatggacttttgggctgtgagttcctataccaacccaatattgattgacaagaagaaccctcgaagcatgagctgtggctgactatcgaaaatatcggaaccttttcctaggacgactcgttgggaccatggactcctcgtcatggcttaggtcgacctaaacgaagcgccactggagcaaagccagccgttgtttcgggggtggcttgagggagaaagcatatgtttgcgtgtgtgaagaacactttgtacgactcatcgatgaggtaatgattacttatgattgcaagattagccgagcagctctctttattctcaagaacgcgatctatgttactaccgttcatacaacctgtcccggctttcgttcaattctctatcagatacaagtgcaagataaccattgaataattctcgatatcaagtaagatcgagtcttttagattgaaagtcatgaacagctagacaagagacatatccgcacgacgaatatatgatcaacaaaactttaaaccagaaagaaatgggttagaccgtttcagacgtccacatgtgccatcgatatgaaatatgatcttgacgacggaacttgaaggtcgttctcctctcactccagatgaagcagcgcttgctcaattccatagacacatgtgttcgtctgtggggccaaagtcacggacgacgattattgacaatacaccattcatatctgatgggattggcaaaaccttgaagacccggtccttgtgatttgagcgtccggatggtagaacggacggtcaacctccttccgacttcttcttctggcttggtagatggccgactcgagatggctcagaagtttttctcttttgggagtgatgctgaccatcgatctctgtacaattcactcgtccacacctttctctacatatctaacgactgtatac

SEQ ID NO: 1638 - DNA, 13872 bp, Xanthophyllomyces dendrorhous
gtatactgaccggtgatcttgcatcattcgaacgatggatcccttgcatcgatccgataaagactctcttcttgccactaccaatcgttcctttccttctaatcttaccaatgccctcgaagcggatcaacggtccctccgagcccgacggaagaggtctaccgtatcgtgccgtcagttatgtgtagtatttgctgcttttgtcatcttgttgacctttgcaggaattatctttattatctacactgtcgcaagtgacttgtatgagtacatccgggaacctcatcagtttgctttcacaaccgacgacacagtttcggtgatcaagatattatggagaacgtgtgcctcaattcgatgttgtggccaacgtatatatcagatttggaaacccgctcacggttttagagtcgacaggaaacgattcaaagcctgagcttcccagtgaaaaagagatgtttggagaatgggagtcaattttcagtaaagtgatctactcgaacatggatatcaattccacaaccaagatctttcacaagaccgtcgagctgcctatctcttacgatgttatgtacgtggttattctttggaccttcttatgaagattagttctcgtattttttgtccctaagtgttgatatccgactctgttgacgcttgtcttgctcacaaaactttggatcacgaatgtatcaacctcacacgtactttcctcagatcgtcaacacctttgttgtcgttccatccgacccggatcctgtcttttctctccctcacccacccaccttgacggcgttcaacttgacagacgctattcgtccagaccctgcatacacctcatggacaaaatatcctcttgaaaagcttgtccgtcctgtcgacccccaactgaatactatagacagcgatgacacgtctcgttggagaaacatctctgcatcgcttgatgcgttttacgacaccgccgccgtcaaagagttcgccctatggcctgtacaaaacagatggactagctggagccgtttagactcctccacaaacaagacaaatgagacgacgaatagtatctttccagtaccgaacgaagtggatgagaggaagctgcttcatgtccgaaggaatgcgagtgtaaagatcaagacaagcacttggatctcgatggcgaagcaaactcccgtttatgatttggaagagtatttgctttacagggatagcgtcgttcgttcgatcttgttctcaaatcgaagattctgtaaattcaaacgccaatcatcctgatttcctcttattcttttttcttcttctaggagttcaatagtgggatgacagatatcttgagcaatattgatcaagaccagctgaatcagcgaggaccaggtatcctacaaagagattttcacatcgctggtcatcccgtctcattttgttcaaaacgcctctctggtagacacacctaaagagagaagccaatctgatatcgagattgagcgtgatttggcattctatggacccagtttgtctttacgtatgtaaaatcagatcaaataatttttcttactttctctttttgaagcatcaattttgatggacattggttctgacttcttgacctcgttcgttcttcatcgttgctgatgtcatgattgaaagatggacacgcggctggcccgtatgactggatcactctgcctcgtgttaatgcatcatcgagcgatcaacctggtagggattctatctcattcatctcatacaatagatggaacatagagtgactatcatcatctcgagctgagcgtccgttccacctttgtatttgtcgcgactaaattctgtcatcttggacagaacatttctttgtcccgtggcatataacattcgaacttcagtcgaatctgaaggttttcgctgtagggaaagcaaattggttcatcaaggatccgaaaagcaaaccggacgagcatccgatgaatttcgcatacaatgaagagaaagccttagaaagtcgagaaatctggcgtatgtgtcttcaaccactgtgttggcatgcatatgatttggggtttacctgaatactctttttttgtcttctgatcttgttttctaacgcgcgtttcattttgtatcacatgttgatggtcaaacttcagactcgattctgggtcaccataatggatcctctcgtcgacctatccttcgggcgatattccgactcgtaggacacttgattcaatttcctggtcttatcattcttcaggtcatgttcgtatacactcgaaactcaagtgcaggtatcagcatcccgtcgaatcttctgcttttattcctcccgatggttcgagtagcatacaagttcagttcagaaccattaatctcgaagggagtacatactatagaaatggtgtcctctctgtcagcaatctggctatgggcttgtctctggtggggcttcgagatccaatggggcggttggaacgctttattaccagtgggagtgaagaggaacaaaccgactcattcagagagaaggagtaagagggtcgactctcaatttacatggtttcaacggggtctggtcagtttacttctcggctttccttgtagacagaaattggatcgacgaagaagtagaagctaactgcagagtcttgtgctttacggccatcagtttgtcgtcgttctgaccatatgcatggcccacgtccacaagctcccagaactaatcacttctacccatcgatacactcggttttcgacctccactccctctcttccttgatcatacatcggaaagctcctccaaaaactctcagagtcaatatatgccgaatcattttcgcatgcagtggacctgatggctaccacgagtcagatcttactgaataagagattaggctgttttggtggatcgtatccgtctctcgcgtgggctgaatttgtatcaggaatatgtacgtttctttctctccttctctcagtctcttgaatatcacatattcggttgaaaccaaagacgtatctctcacatataactaatatggacattggctgaaacagtgatatgggcgcctacagtgttgcactcgatgtttggtaaatataacacgtcggaccctgttcatactggggtcgtggtcgcattcctcatcaaagggactctgctttggcaggctttgaattaccccgtcgtgaatcaaaatgaggaggaggatgagtagttactcgaagacgagatccaaagattgtttatgtcgttatgctccaaacaaggacttcgcaaaggaaatatcagaagaagtaataagtgaaagcgaatgcagtaagaacgccgaaatatatagtgcctgccggaagattcttctgagtctaacagaaggacagaaaattctaacatcgtgtttcagcatgttgggatattgctatatttgactcatttatatcgagcattagaaaggaaagatgtaatctaacggagaagataaagagctcaacgaacttctgaataatatcccaaggtgtcaattgtcggtcgaacaatacttcttcttttctcccgagacgtctgccttcgtgctctggttgaattgttgcgtcgacggcgcaacatccagcgcggggttctgctcaaaaaagtgaacaggctacgaagggtaaaagaatcacattatcagataactgtgaatgcaactgagtctcgatagatgacttggataagagacagcgcaccttgaaatgcatacggaaggtctcgacaggcatgacgggccagtcttcaggcttggttgcatgggtgaatccaagggtgaaccaaacgactccctcgccagtcttgacttcgcgctgacgagctgcccaggttctgcatcctccttgacctcccacagattgccatgggtgtctgttgagaaagtaaggacaagcagaaggatcaagttttaagtgttttggtacctacactaaacaacgtgttatcggaatttgatccaacgaaattgacttactctccagcagcaaataattcttcctcgtcatgcttggtgtaatggatatgattgttgacaaactctcctcgctggttatgcatactggtctcgtgagccagccccaactgagttggcggtgcgacaatcttataaccgactggcttgccactgtgcctgttgagctttgaaggattaatcatcttcacgactcggtttgtttgccaatcgaggttaaatgctccctctctgttgaccttggtctggcgcgtctcgaacccaacgccgtgaggattcttctcattgcgctccattgggtgggtctcgtcgtacacgactgtagaagattcgtaaccatcgatggcgggatcgattcggagattgaagatgtgttgatgatctgagatatgtacacaaccggaatcagctgagatctctatatgtgctgtttggtgtagtactaggaaggcttacccggtgcaaaaacacctggtgcgacaacactaccgtatttgatcgtgttagctgcgtcgactcctgcttcaatcggggtcacagacatgattccagttgcacgaatttcccaatgaagcactccagccgtgtcgaagatccagtacaacgcatattcgtagtttcctacagtcagaatcagctggagaacgagctcacgggatcgagctacgtcagcccgaccagttcgtacgttggtatgcttccaaccaatacctagatatcaggaagcccattagtgactgcagaaagagatatgtaagaagttttagaaattgaactaaatttacctccgtcttgctcgtgtacgcatatagtgttaggcaacacaaggggagagccatcgggcttgactgcaagcccatcgatatctgtgaccgtgaatcgtttgttgatcagtatggtataagctgactcaactctttctacaatgttgaaactcacagtggatgacaccaaggcaatcacaaccaagttgtaagttgtttgccatttgtccagctccggcctcaccaaagtcgtaggcactctttcggtggactgttggtcgtgtgttgagatgtgagcaaacggtcttaaccttatcagcagatcagatcgaaacttaccaggcgacctcggatctccataaggcactgtcatctcactagtactgactcgatagaagataggtcggccatcatacttcacatccctgagaatcatgccctcacgcaagtcaaagttgagagtgaaatcccacttctgccatctaactcgctcaccctcgatcgtgaagctaactccttggggctgagtgatatgaatcggctttaaatcttgacgaagaccaccaggaagcaactcaggggcatattcagaatcggcatgatgctgtaaagtttggacaagattgaatgaaaaacccttcagatcaagcactacaaatattgatgaagcgcacctcgtatgtcttggttggatcggtcgaagcagaaaattctgccgtggtgggcatacgatcgatccggattactgaaaaatctcggccatcaacaacagcagctgattgcacgttgtcaagataaacaaatagtcaagtatagataagtaaatggtctagattgtcgcagaaaaacgacttaccaaagtcgagagggtggccatagaagttggcagaaggatggtgttttgtttctttcgaattgaggaacatccaaacctgtaatgaattgcaatgaaagtgtttagcttatggtgctgacaaaggcaaagctagacaagagtattttacttcgaatagtcgaagactctgaggttcatcatcagttccatctatgatcagaatgatgaattacgaaagaatcagcaacagagagtaatgatcgcaacaggtaagaacttacaaggccatggctccgcgactacctcgcatccctctggaatttgcaacctcttcaattcagcctgtaccattggactcgcaagagcgccactttgggtcgcagaggatagatgaggattagttttgtgcaacggtgtaaggatagttatgttgacatcactggtactcacgccgcaactttgaacatttcctcatcatcaccaccaccgtgctaaagaagccaccaagacaatcgttgacagcgtcaggctcaaaggattacacactatggaccttctcctgtgataagacgaaagcactacttaccataccctcgagaactctttgtccaataactttaccagcgccgatgtccactaacgtctcgatgaagggcaactcgccttgaaagtagaggagcgcttgcgctcgtcgaggaggaggcgacggcaatggatttccagcgttgaaggcaaccaagtaaggtaaaacctgagctttaggcggttcctttaggtatacccttcggaacgagcatgatttagtcgggttataggctttgacaatatcggtgaccttgactagttcttctgaagtgagcgaagcgagaggatgaagctgggaagctgcagatgagtctgtgctaggcagagccttggcaagagtatccaagactatcggggacatgtttctttgcaagtgatgggttgagtgaggagaatgatgaacggaatctcgcctggttaagttgtttttttatctatcacttccaatttctgacgctagtaagcgggcaatcaagcgggcgatcatctaaatgaactaatcataaaccggcaggcgcgacaggcgcgatgaatacgaaagccacatcaggcgcgataggcgcgcaactcgcgcctgaaattagagataagatatcgatttactcgttcatattgaccggtgagcgggaagcaaaataacgatgaagcagctggtgaaggtgaaatcttcagaactagacgaaagtgtcatgctctccgtgttccatccacaaaatctatacgataagaatccaatcattgactttcgtagcttacacaaacatctttcccctcaaagttcttatcatcaaagagccgggccattcgtcaagatatgtcagacatataacgctctatcaaattccattttccgacgattttttctcctactcccaaacatataccttctgtctcaaaacttcataccgtacccattccgtgaaagatggatgatcccaagaataaaacaggagtatacgcagtcagagccgtcgaggttgttagcgacgctggaggagagctagaacgcaggaacttcgtcagttgtaccgccttctgcttcacccggtttacgtttcactgaacatgagccatgatatctgtagggtactgcaggtcttcgtggactcgcttgtattgtgagcagaatctgactatagcctcaagattttaatattgatactgtgcctactatatgcatctctcgtgacccgtcccgcttccaggtcacatgcgtgtatttatatttcgcatctagacgttcaccaatcattcatggtcgatactgactgaagctcttatacagatacgcgacgattctcacgaagctttcaacatgtgtcaccagcggaggtcctgtgttgatggtttggggtttgatctatgctgctgcaggagctatgctcatcgcactcagtttgggagaaatggcatccgcgtacccttcttcccgaggaccaatggagtgggcatataacttttcttcgccgaagcatcgtcgctttatcgtaagcaaacttggctgttgagagatatttgggtttgtacttccagtgattgattctttctttcttcacacagtcttattgcaccggtcatctcaattatatcgggtactgtgtcattcttgcgggcttcggggtgctgataggtcaacagattcttaccttagtggtgttgaacgacccgtcatttgtcatcacgcaatggaaaggttcgattgtttgttgacattctcttttacaatctcatgctaacctggtgatgcttatttgacagtgttcctcatcgccgaagcggccattttggccgctaccctgttcaacatattctgtatggctatcatgcctatcatcgatatagtctcgctatatttcttcttcttctcattcttagcatacctaattgtacctatcgtgtgtgcacgtcacctcaaccatgcgcttaagactcccaagtttgttttcactgagtccatcaatttgaccggttacgactcaatgaatggaggagattttgtggccttcatgattggcctttcgggtgtttcaacagcgtttggaggtgagcagtcagttattcatcggtacaactcgctcatgatttttctatcattgaattccgacatatgttgtgcctgctgtaggtacggatgcagttgtgcatatcgcagaggaatgcgagcatccggagagagatgtgccgagaagtaagtggcacttacgttagttcatacaccatcgattcttacttcggaacttgcttctcttaccatctgagcagccatgtggttaaccgttgtaattggattcctcaggttagcactttgaaccttttattgtatcgattcaaggaaacttgacgacttatcacttttgccctttctgaatatcgtagttcattcgtgttgctcatctcgcttcttttcgcggtggtcgatatggactctatcctgggcaccgcaaccggagtaccatacatccaacttgtatataacgccactcagtcgttttcggggacagtatgcatgtctctaatgatcattatcatcactttcttggccatgatcggtacgtcgattttcttgctggtcgaaatctactaacatgctcatatccacctcttacttaacaggcatggttctttccaccagtcgaacggccttcaccgtagcccgtgatggtggcctattcacacagacatagtatgctgcacctcatttgaacgaaacttgatcatattgactgatgcacaatatttcgaccgacgatctttttgatgcagcttcgctctcatttcacctcgctggaacgttcccatacgtgtaatgatggtaacttcagggctcagcgcagctttggcatgcactatcttgggttcaacctacggtgaagagacctgatcaacattatttctcgcagcactcgcatggatgggcagctgactatgtcctttttcgtcctgcagcgctctactctttcctcatctgtgttttactgttaaactggctatgttatggtacgagtggattcccaccgccgtgatcatgatctcgatagctgaatcgttacaaccctaggtatctgtatcgtcgcacttctcatttccggacgaaagtaccatacgtcaggaccgttccgtcttggccgagtcgggtggtcaattaatatcctcaccgtgatctacatggcatgtcaaagcatcttttttgtctttccgtatggtttacctgtgcaagccaaatagatgagtacgtcatattttcgcaacatacttagtctcgaagctgacgtgttgaattaatcttctctttcttaaccctgtctgctgatggtagactactcgtcagtcgtttttgttggtttggtcagtctagtacaagtggcttggttcgctacgggtcggaaatactatctgttgacaccaaatgaggtcaagtaccaaaccgagctaggaggtgggaccaccatttatagagacgagcgagatgagtcctatgtgggtgcaagtgataaagatgatgccatcaccactgctgcttgatgaccggcttgaatgatcaaattttggtgatattgtggtgatattttagtgatatagaatgctttatgcaaaactattagattttctatatgttgtttgcggaagcacgaagcagaaggatcaagaaagctgccaagcggaatgtttgcttcttcaggggctgggtgatatacaacaaggactttgttcaaggagtcagcaacgaataacttttgctatgtgtcataacatcatctaaatcagttttcctctaccctctatctaggatgcacaagtttacgtgagataggaggcgactgtaccatgtgttgaaaccaagaatctttgaacgtgatttagccgaatcaatcctcttcctaagccggcgtaatcaagaatggagccaatgctcgatcttcgataagatatcggatccggccggttacttgctgcgcaatctttgcccacgtttttgaagtttgtttcccatcatgcgctattcaccccggaccgactaccgacttactaatcctaacctgcatttacatctacatactaccatctataacatagccaaaacgactgtcgatctcattgctctatgatgtccgagcccactactggtcccaagtatttgaaacgtggcttggcgtgagtgtcgtgcatggtttcaattatgtcttgttgccattctcatttgaacactgtgatgattggcaatctttgggtttatgctgataatacaaacagctgctcaacatgcaggttggtactcatatcttttctcaagaatcacaattcaaacaatatacctgatcagccatctgacatgtcaagtatgttttgtccggcttgcttttcacagaaagaggaaaatggcaagttgacttcatttttgaacagacccgctacaccattacaacgttgcataacctgggacagtgttgtctttccttcgtcggtgggaattacatatcagaaatggtatgagttttgccctgttcctcatcatttcaatgctttcagttcagacttgacatctcttgtgcagtacgggtgagaggcctatatgtggaacgtgcaagaaagtgagccgtgcaatccttgcttgaatctatagatcactctcaaaaatagctttgataaaagcatgaacatcagccaacacaccactaatgttattgaacctcacagagctcccaaatatgcatgtatgatatcgcatctcagcaggagtcgagaaggaagaatattagaggataagatttgttagtttttcctgaactatctgtactgagtggctgaggttttgatttagatatcgcctgtactgtgtcattcagctcgactagaatctattttatccctatcagaatccaatgagtccgctggtttctctctatctagcacggatcagaggaagatgtcctctgccatatatccctaccctgtccttgaatatcccaagcccagcactccttcgagggtctctcatcccagccgactttctaggcggcaccagcaggcgacgttcacccaagcgttccaggagctatggaacactagctccagtgctgataatatcacagttggtccaccatccatgcaaatcaatagcgtgactcaatcgaccgtttcatcgaactcctctgccgagacgaactcaagtcccatgcatgtccccacccagttcctcgatcaaacagatacaatcaggcgcgaactcgagccatgggagttcgacttttcttcactagatcaagagaatgtatcgaagtcaacggcggctctgggagaccttgctccaatgcagctcggtttcttttcttctttgctcgactcgaatcaatccttatcagaacctttcctgatttcaattgggcaaccgaatgaatactcgccctcatcattggctcaagagtcaccctcagtaccactcgtgacttcttcgactgaagatcgtacagctactttgaagacatatattcaagagcatggggatgttccgataagaattagagatcttcttcttggggctttctttaagcagatgaaaacatcgggagttatgattcatgttgaacgattttggaggtatgtctcgttatgaaaggattcaatgagaaaatccgttcttctaatcagtgactgagctaacaaaacaagttctggaacaatattgtggttttacctcaatttactgattcatcagtaagctcaaagatccagtcaagaacgaacgaccacatcctgctttcttgttcgctatggtccgttctctcatataccatgactcccctattttcgaaggttcaagaggttctcgttcatcaacatcgttttactcactcaaagcacaatgttgatttcgtatgtttgacggagatagtatatttctgccagtcagctctatccagacgaatctgttcaggcttcgcaaagtttgttttatcacacagctaggaaacatcttgaggatggaatcgatgatcaggacgagcggatgattgacctgatccgtgccgcgacagttctgggcactgtagcatgttagctctttctctataagcatatctgatgaaatcacataatcacgggtcatgttatctgatactgatattcgatctcggacttgaaccaagattcgaaagcgagattccgatcggcttgggtcctaggaggagtaagactatctccattgcgttctcgatgtgtctatgatttgacatggcctcgtcctttcaatcctactccattgttgacgagatgtatgttttatcttgtacagatcgcaatgcggctttgcgctctcgctcgccttcaaagcattagttttccattctgtcctagttcattccagaatcacagtttgggccctcctaatccattcagagcaatgctggccagagtcaaacgtcaggttcggcccccaaaggacggaatcgaatgcggagagtatatatgggctttctggcaagcttgggtgagtcaactcttcacatccaggcgcatggttgaatcattccagagattaccaattcgtcgtaaactatttctgggctgtctttgtcatcttacatatattcagggtctagagaggtgtcattcaacggctgctggatggacccctgtaagttcttggtaatatcctgtgaccaagactgagatacatcaaaaatctaattaaatcaattgctttttgaagtcaatgcactggtcagagattgagacacccttcccattgccgctggaacagtatgaacacgtaggtcgatcacgtatgatggacaggatatgacactgctccgtattgaccatgcactttgtttccttcagattgaggttgtcaacagtcgacctataacggcggtgtatggtttgtttgatgactcccaacacaccctcgttggagacctgtatgtttttcgatttttgcacatctcatccttctagtttgcatctgctgactgatctattgggctgaaacactaggagtgcatcatgtcagtttatcggaaacctgttgttaaacgaagcagctcgactcttggatgaattcatacatccttcgactcgtaataaatacctttctcaaatgtcgaaccgaacagattcattcagtccttcttcgcaggaagaggtgttgtctgaggatctgtcgaccgaatctgacagctctgctggcccaataactgaacctgtaccatctgagattttgcggttgcaagacgcgcttttaaaattcgtacggtcacttccatctgaccaggcagaccctgcgaagaaagttcgggggggaatgccccctggactctggatcctatgatgagagacagtctgggtatgaaatcctcgtgggattcatggggagacacttggggtgtcgactctgaagttgtattgttacattgtgaaatccttaggtatttaaatcgtacattgtgattggtcaatcatgtcgaatagagacatactcatgtcttctgtaaacgtcttcactcagtgcattcgctttggtatatcgacaacgagcggtgtttgatacgagtgcacgcgcgaaagccgtgttgtctgctcgatctatggtaaagctcatccgtgtcatctcagatgtgaacttcaggcgttgcagcttcgttatgctagttcgtttttttccaaaattctagaaagctctctcctcttttaagat

SEQ ID NO: 1639 - DNA, 1823 bp, Xanthophyllomyces dendrorhous
ctctcctcttttaagatatctaagatgatggaatgaactgatgcccgaatgatatggttttatcgataactttgtaggtctcttggcgaaacgcagctcatattttgcttgaggaagtgagacgtcttaggatgcttggaaatgaggaaggtctgtcaatatttctctgtctgcttaagctagctctcttttcttacagaatcaggtatctcatacactcgacaacattcttgctgatgtttccttcacttctgattgcattttcgcggtaacagaagcattgacagtatcgattgacactgagcgtacgtagagttgtaaacttcactttgaagcaagacaccgcaccgctcacttttttttgtttttgttgaatgcgatgcagtcattgttctcgcaatgcagcgaatgggggaagtgtacaccgttgggtaagcatgctagacatcaaaacttcttggtttgagtttgatcatgtcgcctgacgtaaatcctgttcaaactgaagtgatacctgtcagaactctgctatcgaggcaatcaaacgctaccaaagcgattagagaaggcgtctctttcatatatgacctagtcaaactgatgaatgccataggtcgtcatcgtattgccagtaatgttttgtctcttcctcgaaatgattgtttccatccggcctttatattttgttttcagtcacagactttgtgtctgatcctattcatgtgctgttcattcccacttgacgtggtaatttttgcgcacattgataaaaatcaaaagaatatcagacaaggtattctggtgcctttcgaaggttttgttatatttgagatcatcgatatcacaacaagtatacaccaatcatatataaaagtgtcagccaaactccttcatacagccttgaagaaggaagcatcagcgtgcttcatctcgtcgagcaggagctgacccttaggctgccagccgaatgttttcttagtccagctagtactaaagtcttgatgagcctgcaagaggatgccgaagaagccaaagtccttggcctgctctttggtgatggccttggtgtccatcttagtcttctcgccaagcacctgagcaatggccttcagttgggggaattcttgaacggcatggacaatagttccgggctcggccgtttcaagagcgagcacaaagagaagagcggcgtcgtccgcgttgcaagccgaccagttgagcccctcgacatatggaatgaaccctgcgtttctgcccatgccgaggaggaaggtgtgaaacatgtgaatctcgtccgggctgtgggtattcattgccaatcggacgacgatggatcaaattcctcgatccttgtacgccaagacagccttctctgtctcagctcttggtccgataggcgcactctgggaatgctcgtctgatccaggctgcacagcgactgtaccattcgccgaaatcaataccttgccagatccttcgagtacgtcggcgaagaagtcgagagcctcgcgctctcctttcatctgactgcccaaatcagcgtccttgtggtccattgcgcagtgaatcacggcgtcattctcgttcgcgccctttctgagaagtccctggtcggcagtcgtcccaatcaatgcggtcgcacccagtgcctcaatcttcttagctttttcggtggatcggacgaggccggcaacagtgtgaccacgagagatgagatgggggataattctagagccaagtcgaccagaagcgccagtgataaagaccttcatatttgttgcgaaaaaatttggttgagaggtgtaggtcaagatgagtaggtt

SEQ ID NO: 1640 - DNA, 1945 bp, Xanthophyllomyces dendrorhous
agtaggttgatatgggtgagagtgttgttgagatgtgtaactgagccgtcatctacaacttggatagagcttccttatatacgaagtatccttgaatgtatatccgtcgatctcttggacaatctcgggggatccgctgagtatttcttagcctttgtaatagaatccgaatccgaatccgaagccgaagccgaagccgaagccggatatgagttgcgcccgacccggaaatgcttacctgaggggaagtggtaagtgttaacaaggctatggggtgtgaactggaaccaattcacatgatcggttgctatgtactacaagaattgatattggattgtttttgaacagaagaggtggataaagatcgcgtgatatcagtcagcagttgttgttgtacaggtcagcaacggtcgtttatgagctgcacgcggcccaatgaaaccgatcatatctagcggaagtacttcaactttttttctctatctctttgtttgttctcgttcttgtctgtgatctgaaaagctatcacagttggccttcacagcgttgtttataaaggtcaacgacaaatcggattgatcagagaaagtctctacgagggaggaggcatcacctcaagagctgatgaaacgcaaagaagctgaagtaatgggataatctttcacatcataaaactcatcagttgcgtttgaaaaagctcgatcctcttgtgttagcaataaagcgcaagagaacagctctggccatggcaggatctccccccgcctctatgcctgacacttttagatgtatagcctgacgtcaatctgttggataggtcaggacttgacatcgctcaaatcataatcatttctatggatgattcatcttcttaatttgcagaaggtgccgctcggaaatatacgtctagcgagaatggaaacgctggtatataggtccagaatgatttgataccaaggatcttatgtggatctgcttatgtaaacccctgtgatacattacctccacattgtcttgtgtagaggaaagatgtgaccgatgcttcgacattgagatacttcgccgatgtctcatcaacgatgttgatatctttgttggtagatggacgtatggctagtccccttgattgggttactttacctcatgtcgatggaacttccaacgagtgttctagtacgaatatatcctctgtagtcttcaattccgagaagaatagaacgatcactcagtatcatctcggacgcgccgattgtatctctaattatacttctacttctgatcatttgttcatataggatgagatatagaggatggattgcgatggatatatcctcttattaccccgtggtaaaccacattcggacgtcgatcgaattcagtgacttataacatcgaatgtattgctattgtctcgaacgtcgtcgacatgtaaaaggatgaacatccaatgaacgctgtccatagaagaacggaagcgctcgagagccgaaacttttgaaaatatatatctttttccttcgtattgctcttcatcaacttcagagctcacttgatcatgttaattgagtttcttccctattatctttcctgttgagccttccgttcgcgtgacctcttgctagtcagatatcggacgtcattttggaacacagcgatgaatatttgtggtcgttcttcgcgatgtaaaatgagatgaagagctgccttcaatcctgctcttcacgcaacgctctatccgttcgtgaatgttgtcttgcttcttaaatgactgtgctatgaaacgtatggctttccactaacgccgctaagatcctatgagctggttcactacgtttccagacatttgtattgtcatacttcttatctatgagcaatgatacaacgccccagagatatgtgacctcggtcgcgcaaattcaaattagttattctgatacatgtgatt

SEQ ID NO: 1641 - DNA, 6351 bp, Xanthophyllomyces dendrorhous
ttggttcacttttcatttcgatcaatgtttgtgaactttcaaaaggctgggaacgtaattgatataatcattcacgaggactacgagtacagatacaaaattgacagaagaaacagagtgaatgcggtctcgacaatgttttagaaatcgactgataggtttctaggtatctcaaatacagagagctatggtgctatgtttttctgactatatgtatgacagtatcactctataacaaagttgtgtgtgtgagcaaagaaaagggtgacaataaaacaacagacagagtaggtcggggcacttgcattcagctatcacctgaatcaaatgaaaaacccgaccttcatttgttgttcctctaggaactccctccaacaagccggcgcgacccctttttcatcaacctctctccacagcctctcgaccgctctgagttgctctctgtccagctcacttctttctccttcgagtaggccttgtcgacatgcctcacgatcggtttcggtgacagcgattgtgctagcaagaaaccagattgcgttccgcgacgaagagcggaaaatatttgacgcaggatgacgagtagacggttgagacagtgagcttgaaaggagaagaatctgagaaagcgattgacggaggggtagagcaagcgagccaagttgtgccagggatgaaaagagatagatcaaggccgcctagtcgagtatgcagctgatatcagcaaagacaatctttcgaatacatagacgaacatacatcaaagttgtgactcacatgacgccacgtttcctgcgtcgctaaatctgatataacctcggcactgttgccaggtccagctgtgttcctagccagaactgcatccgactcgaaggcttcgatgcgagttttgatcgcattcaccttcgactgtattcgctctggatctgcgttgcgggcctcggactcgtcaacgacagcattactgatctcggcgaagcagcacaataattcggctggtaggccaaggtgtaccgataacgtgcgctcattaacggtcgtcagtttgtctgtaccatcttctgcatacgtagtcggtgatgtgtcattgaatactcgaaaaaaagtgcggcgcttgctcaatgctactgttctaaacacgtccgaatatatatacgctcgaaaggcgagagattcgactgttgctgttttcccaaagtcgaattcaagatgatccgggcccagaagttcgcgaaggaactcttgcgctgtcagcaagagaaaataggctggagtggtaccatgtcgatcaatctgagatcagtgagaagagaaaggatgataattatcaacacaagtatcacaagcattgagtacggcaggaagaactgctgtagctacctgagcaagtcgaagatcaaggacggcacctagtcggttcttgagaccatacgctttgtcttcaagtagaaggacagtttgctgataatatcgtccggccttgtcatgccattcttcccacctgaagaacaaaaaggacgagaagcttagggaagcaacgatgtgtatcaaagagcttcagtacagaggatagcttacgcagggttgcgctcctttgcaagcaacatcgaataatgtgatgaacaccatgccgctagagagtgcccacagatacagtgcgcatggagtttagatacatgttgtgagtcgataagatgaaagaaagcataacacatacaaattgcgccgcgattcacgtcgctgtgtgcagtcagcatcgagtcaaacatgtacttcttgacgatagttctcgccggtataggaattgaactaaagtaagattcattaagcgagttataaaaagtccaccactcattggcgaactctctcatctctatcaatgtactcgcacccagtctgtcctcggaagaatgtgttgataagtcatcctggcctgagtgctcgggttgaacagcggagaacccagcaacatcggatctgatttgttgaggggatgcagcgtgcctcgatataaagggcgcagcattaacagaagagaaaacatccatagagtagaattgtcggtccttttgttctccgctatccgatggattggagggttccttcgatcccgtcgttgacgttgtatttggattaggatatctctcattctggtatatctgctgtatctccgcctcacttcttggagaaagtagcaaagatggcaaggcttccatccttgacgaactggcgtcgattgtaccaagcagttcggggagcgagaggtcagactcgaagccagttgggaacaggaaagacggcagtggggagaaatcaatcaaaggatagttggataatgaatcagattgcagcgaagagacagagaaggaattattgtgatttccctggtcgtatgaagaggattgaagtgacggtagtgacgaaagaggatagacagttgaagattcgagcgtcgaagggagctttgatgagccggccgttggttgctcaggcggattttgatccgagagttgttgcgatgaaacagggcgtagagacgattcgtctagtaggtttggagtcgctggcctatccagctcacgacggctacgtgatggcctggttgattctttcacgcatgtgtatttgccgacccgacatcgtgtgcagattccggctctatcccactgttcatcacatttctttttgcgcactgtgatgatgataaaattagcagaatcatttaaattgtcaaaaccttcacttgattcaaagcgcgaatggagttgagactcatttgcaagtgtcgcagcctatataatacgaatcaaccgtcaaccacatgtgtaatatttgaacaaagccattctgatattcgtttgattgaccaacctgttctcgaccgtgaaggtgtttgaccgctcatctttgtgctgctgactgttgttgtcgtttctgtaagtagaagcgactcgaccgagttattcaaactagtcaatgtgatcatggttgagggtatggatgtatcggtgacgatgatgtttgatcaccccgcatcttggtcgactttctatagccgcggctaattgtatccatatcttttcggacattttgctttgatcccgacgaactagggtgaacggtcaaggttgagccaatcttacatcttagtcctcaccgtcagtcgtgtttgcacctaatgctctctatttcgtgttatgttatttcctttatcgagcgtcactatggggaacaatctcgtgaatgtagagattatacaaagtgtttgcaaaagggtcttacataatcaaacggtatcgaaacttgcatgtactggttcaggcctcaaaccatcattttcgtccagcgatgcccacctcttacgttatacatcattcgccttttactaacgatgtcacggagtgcgcaccaaatgctgagacttctagaatttctttccactctactttgagtataaaacttttgctgttttttcctttgtctgccacgttttcgagaaagtacgtgcagtcagaaacagttcgtcttctgacataccactcggttctgtgcaatgaggtatatatattcattgaacgaatattcgatcatagatggatgcaaacatatgctgtgttctttatcacctaagaaacgatacactgaaattgattgaaattgtatctctcattcggtctttgtgtttgacttccgtactgtcgcgttatgaccaagctttactgagaatcatgacaatagacacaacagaccgccctgattctgaatagaataacggcggatggaacgtggcttgactgctgctgaagcgtctgatacagtacgaaagtacaggatctgaaattgaaaagaatagttggcgatgaggacacaactcttattctgttttccctgactccaatgaggtcaagtgagtagaatgactcttttcctctacaggatgaaagagttcgagacgagtagaatttttttttgtcaggcagtgctccttaggctggccgtttgaggaggacgatcttgggaggctcctgaagtgcttcgtttcgacttctgtgatctctgccccttgctcttcctccgcctctgcctctacctctaccttcgcccccaccatcaaacccacagcctcctcttcctcctccacctctaccgttgccaccaccgaacccagatctactgataagagaaggtgcaatccaaaatgtctcgaccccgtatttttccgcagccggccccacatcttcacccgatgcacggactgtatgatcatacttgtccgattcgaatcctccgtcttcgtccgtgcctagtgattcgcccgcaagaggagatgaaatgagcagaataggttttgaagatgacgacgatggtattgatgatgatgatgcaattgatgaagaagccggaggttgagccaagtaaagaacagtgcctatgatagaccgaagccaattgtccatgggcggagtatcatccgagcaagcgatatctggcacatcggttcgctcagaaggacgagcgacccgaagcccacgaaatgattgatgcgacggatttatggagttggagatggatagatgagtttctacgaatcgagtggcgatacgaacggcttgggggagggcagaggaaccttttttgagaaggtcgagtgtatgaaggactagagtttgataacagatgggccatcatgaatgataaggaaagaaagaaagataataaaccagtgtcacaagtcagatagggagacagagatattggggaacaccatattaagcaaatggcatgggcttaccctcagcaggaatgatgatttctctttctctgcgagccaaaattctctttacactgggcaaagcccaaataagcgcactcccatcaaccacaactggcccattaccaggaggcatggacattgtggatgaagctgtgaccgcaggcaaggggaaacctcgaatctgaggagaaacgctcgagcctggaatagaaaccgaggtagatgccgatacgcctttgggatttcgaaggaggatactgggagaaggaggaagctgtggtgacttggtgtatgatgtatctattatgcgagtcgttttcccaggcacaccgtcttcttgtctacctgacggtctggttgaatcacttccatgacgacttcctctccctcccctggtacctccaggaatgaggagaaggcctgctctatcagagccccttgttctcgagccactgtggcgatcctggaaacttggcggactagaataattagaacccacgtttatatcttgtatctgttgttgaagctcttcgacttgatgagcaagaaacgcggcagcgagcgctttgttaggctttggcaaagagggtgaatcggtccgcattgtttagtcctggagaaaaattgattcgtgtcgacagcgggatcagattaggacaagagacgcgatagcactagtgtgaaggatggaggaaggaaggcaagcgatgtgactggcagtgatcatgactcaagcagatgagagccacggaacgttgaagagctggatgatagtctacgagtgaaaaaaggaaagtcatccggatcgcttttcgttgaaatcgcagccgccagatgtcgtcagatgtgattacagcggttcgtgtatatttttgatcattttcttcagtttctcaatcgtcatttcttaaaatccaagtttcaaaaggcagcaggatcattgataaaagtacagtctaggaattacatacaagccctcgacgtgccggtcaaaaagaaaaagaaaaaaaggcagaaaaaaaagaggaaggtaaaaacccctttgaaaagaaagaaatgatacgggattgtcaagagacagattctagtttccgaaaccgtagagcgttcgaccctgtcgcttcaaagcgtagacgacatcgagagcggtgacagtctttcgcttggaatgctcagtgtaggtgacagaatctcggatgacatctggggaaaatgaggcaagatgagaaaaaagagcttggtcagcaagaccgtaccgaagatggtggtgaccaaagataagagtatgactcactctcgaggaacagcttgagaacacctcgggtctcctcgtaaataaggccggaaattcgcttgactccacctcgtcgcgcaagtcgtcggatggcaggcttggtgataccctggatattatctcgaaggatctttcggtgtcgcttggcaccaccctttccgagtccctgaaagagagaacgtgagacgtcagttgtatgaacatatcggcaggagtgggacaaaagagagatcttgaggagattacaaacctttcctccttttcctcgtccggacatgtttgt

SEQ ID NO: 1642 - DNA, 7676 bp, Xanthophyllomyces dendrorhous
gtcgctcttcgagagatccgacgataccagaagtcgaccgagctcctcatccgaaagctccccttccagcgactcgttcgagagatcgcccaggacttcaagactgatctccgattccagtcttcagccgttatggccctccaggaggcttccgaggcttaccttgtctctctctttgaggacaccaacttggctgctattcacgccaagcgagtgacgatccagcctaaggatctccagctcgctcgacgactccgaggagagcgagcataagcgtctgtccgtagagaggagaagtagtagtgtttcctggatcagttgccagttgtacaaccctgtaccaatatcgttatataatcaatttatccatccattctctgaaacatcacattaaaatgattgccgacaagataacagcaagttacacaaaagacacgtgagcgtacagcacgtgacattgctgatataagcgacgataagatcagacggccgatcgagatgaatgactgggcatagatcgtatcaacatcgtcgatcggccaaaattgggtgagatggccgaacaccttgatttttgttcggcgatcaaacttctcgttcttcgttcttgtttgcacttctcttccacctcttccaccctcgccgaatctaacttgacacataactctagtatctatactcgatgggaaaagaacaagatcaggataaacccacagctatcatcgtgggtgagtgtcaggccatcaccttttgaagcatatacccatcacttgattgatgggttttccatttgattcaaaccttgtttccgaatggttctcctagtttaatccgtatcagctaacattctcttgatcacttgttgcttttgcttactcgttactctttccgttcctacttgttaggatgtggtatcggtggaatcgccactgccgctcgtcttgctaaagaaggtttccaggtcacggtgttcgagaaggtatgcttcctcgctcactcatgaaatgtacctcacatcggtcaaatatggaatcgagatcgtacaaaactgatcgacccgctattcttattgtgtcccacctctttcttttccctctcatcattcgtccacatcgctaatacccgcttgtcaaccttagaacgactactccggaggtcgatgctctttaatcgagcgagatggttatgtcagttcctccgatcatcaggcaagagcatcgttcatttctccaatactaacccagcggccttttctctctctctccgtctcgaccctccgatttaacagcgattcgatcaggttagaatactctcttgcgctgtctctcaacacaatatcaaaagactgacctcaactttaatgcttggccttccaggggcccagtttgctgctcttgccagatctcttcaagcagacattcgaagatttgggagagaagatggaagattgggtcgatctcatcaagtgtatgtctagagcttgtatcttcagaatcgtcttggttgctcatcctcctctcatttccttttctttcaaaacaaatataaggtgaacccaactatgtttgccacttccacgatgtatgtaccctcgtaggctcgatatcattcctctttccaagaccactgacatcctacaaccattttcaccgttcaggaagagactttcactctttcaaccgacatggcgttgctcaagcgggaagtcgagcgttttgaaggcaaagatggatttgatcggttcttgtcgtttatccaagaagttcgtgaatgtttgtcatctcactcatgaccaagtggtggttctgactccatcgcattacggtctataggcccacagacattacgagcttgctgtcgttcacgtcctgcagaagaacttccctggcttcgcagcattcttacggctacagttcattggccaaatcctggctcttcaccccttcgaggtcagtgacatctgccaaacatattcgtttcacatggcctttttttgactatcgatagtgtgttgtcaatatcaccagtctatctggacaagagtttgtcgatatttcaagaccgacagattacgaagagtcttctcgtttgcagtgatgtacatgggtcaaagcccatacagtgcgcccggaacatattccttgctccaatacaccgaattgaccgagggcatctggtatccgagaggaggcttttggcagttcgtgctcatcctgatccttatgtttggttctttccgcttcagagaattaacaattactgacagaaaatcgtatcaacgcacgctttctccaatagggttcctaatactcttcttcagatcgtcaagcgcaacaatccctcagccaagttcaatttcaacgctccagtttcccaggttcttctctctcctgccaaggaccgagcgactggtgttcgacttgaatccggcgaggaacatcacgccgatgttgtgattgtcaatgctgacctcgtttacgcctccgagcacttgattcctgacgatgccagaaacaagattggccaactgggtgaagtcaagagaagttggtgggctgacttagttggtggaaagaagctcaagggaagttgcagtagtttgagcttctactggagcatggaccgaatcgtggacggtctgggcggacacagtgcgtagtccatcccgcgaaatcctctttcaaaatcgtaagtgcagaggctgaagtttatttttacactttatctagatatcttcttggccgaggacttcaagggatcattcgacacaatcttcgaggagttgggtctcccagccgatccttccttttacgtgaacgttccctcgcgaatcgatccttctgccgctcccgaaggcaaagatgctatcgtcattcttgtggtatgtgctattctctgtactttcgtttttcgcccgccatgatgtctcgattctcaaacatactatatcgaaccccccttagccgtgtggccatatcgacgcttcgaaccctcaagattacaacaagcttgttgctcgggcaaggaagtttgtgatccaaacgctttccgccaagcttggacttcccgactttgaaaaaatgattgtggcagagaaggttcacgatgctccctcttgggagaaagaatttaacctcaaggacggaagcatcttgggactggctcacaactttatgcaagttcttggtttcaggccgagcaccagacatcccaagtatgacaagttgttctttgtcggggcttcgactcatcccggaactggggttcccatcgtcttggctggagccaagttaactgccaaccaagttctcgaatcctttgaccgatccccagctccagatcccaatatgtcactctccgtaccatatggaaaacctctcaaatcaaatggaacgggtatcgattctcaggtccagctgaagttcatggatttggagagatgggtataccttttggtgttgttgattggggccgtgatcgctcgatccgttggtgttcttgctttctgaagcaagacaacgatcgtttcttagagttttttttagtctcttcctgtgttctctctatatacatactctgctcgtctgttctcttctcgagggttcctctttactttgtgtcagagtcatacccggtctctctcaacgtccgtttgagggctagacaattgttagtctcgaaatctccatcacctcaagtctgatgttcatcatcttttttattcgttgcaatatacatgactgttatggaccgccttctcgatcgtcaattgataagtcaaaaattatgtttgatttgataacaacatcaagcgtatatacttgatgagaaaaggaggaggagaggtgtctgaacgcatctaaacccgctcaatagtcggttcccctagaaaccacctctttgcacgtgggtcggagaaggatggtgtgctcgtactgagccgtcatggatctgtcgtggtcaatgaagaagagtacaagagtgagttgatgatcggatcggaggtttatgagatggatagaagaagaggagccgtgtctaccctttgatgtcggtcaacggcgggtagtccatcacgattccagtcgagaccagctcgttcaactacgtattggcaagagagagagacatgtaggaagataagagcgagaacaggggtcagaggaggtaaaatgaagcagaataagagaactgaaagtaagaagtgaaggaggacgcacgccgaggagatatccgctttcacctatccggtcgagataacgtctacagaacgggagcgagtcaaagttcttgttgattgtcttcagaagtgacttcgaggattcacgtctgagtgaacgatatgaaatttgtctcagttgaacctgttcgacgcaagaacgaagataagatagcagaaacattacctcagtccattggcgttgtaatctttggatcgggcgtagtgtgagcatacaccatcctcgatgactcggcctcgaccggtggaaccgaatgtttcaatagcaaagtctgatgtgccaaacgaagacacgtccccatattgatgacggtgaaaatcagataggaaaagtataaggggaagacgaaacagacaagtgcgtcttacattcgccctcttccatctttgtttcgtcgttgttcttgacgatcgggaccgatttgcctccgtgaatttcataagggttgatcgagtgcccattcaagttcgcaattgccttgactgatatagaaaagtagatatgtgaaagaactttgtcaagagtagatacaaagagacatggaaggcggcgcattcggaacaaatcaatactcaccttgcttcgtttctgttccgatgacgacctcataggattccataacctcctgaatagactctccaatatcacacaatctcacatctattccagcttctttgattccagtgttggtagcgtccttcacagccttcaacaactcgtcatacgtgggctcgaacgacatggtgaaagcagagtcgacgattcggccgttgacgtgaactccaaaatcgaccttcatgacgtcctctctacgaagaactggatatagagatcggaaacaactaattgaaaccctgcgctccaagtgggagaaacaaaacataaatcacataaatcactcacttgtcttgtctcctgcgtttggacctggagaaagcgttatgccatgaagagaagcgtatgagctgattatatcccgtttcgaaaaggttacgtcaaacaacgtactaaagtgggcagcgatctcgttcaagttaactccggtggggaaaccgattcctctatccaacccatgctcttccacgagcgccctagtaccagcctcgatattctctgcaatctccgtcaaagtcatccccggcttgatggttcggttcgcgtgagctcgaacaagtctgtgaacttcggctgctcgtcgaatatcctggtacgtctgagcaggatcagcctgaagagtcttctctagcgctcgaagttcagaggaggagtatcggtaggcattgctataaagatgatccggacacatggcgaaatagccatttagttgactgaattgggtagtagaactggcccccccccaaaaaaaaaagaacagaggaggacaaactcgttggtatactccattatctctccttccggatagataccatcggtatagatcttgctcaaaccaactctaggtggatcagattggacctgaggacctccgttggctgccttggaagccgcagacttcttcttcttgggcttctttttcttcttcttcttggtggcttctccgttgagaggagtagccgagatggcctcatcgtcttccgaaccggacgagtttgggtcatctttggtgatcacttgttcatctatggcggcagaagccaaagcagactggatagtctcaacgtcggcagtcatgatgtggctctgagtgaagaggtgtaggatggtgaactgtctacgttttccatgcggattcgaatgatatgaatttgagaattctgctgactaagccaagctgccaaatgtggtccgcatcatcatcattatcatcaatcgcattcgcacatcgtatccgctggtgtaggatcatagaccggacatcaagacatttgtatgaaagtatctacagagacacgctcagaccaagacttcgcccactggtttccaggcttctggctcaatccccttcgtaacacagatgctcactctgtcgaaggagaccgtttctatcagtgtctcactctgttccgcttcggaatctcccaagatgctgggtgagctgacgagagctattcctccacaaggcatcgagcgcactcttttggatcggtaaagctcgtccacaatgatctggcggtcttcgagagagatgtcggagtacaacagcgaaatatgaggaaagtacaccggccgttcggatggtgaaggcaggaacttgagcgttagatcgtggaaaagcataagatcaggatgctctgtattgtatgacaccccatgaagaatgacagtcacagtttagatgaacatccgttgaacaaacacttcaggctgacacgaaccttccaaagcaaccaacacacatcgaaaatactcttcgcctctccgtacatccttgaaccttactgtcagttcattcttgtgcctatccttgattgagtttctccactctgccaacgcatcttcgactcccttcatgacatcttcgagggatgttccgtgtggtgcggatccgaggagtgtagcatgtgccggaaaccgagggccaggaagagagctgatcagagttcggaaggtatcagaagcaagagatttcgaaggcgtcagccagagggagtatgaaggttctttcgtcatatcaattgcagcggagatagtttttgatgtcgtcgactttgacgtactggctagctggcagtagatgttgctacaggtgatgttgttagacgtggttagggttgcgggacggttccgagtttatttccttctcactcatggtgccatcattctccataagcaaacattcatcatcaagtgttctgacttgggtttgtcgttcgtttgtacaatacataactcggtctgatgtgctccattacacaggatggtcaggtttgggatctatcctcactctcaaacgaaaagtaggcctgaactcatcgattagatcaaacacgtatcatctctgatcgtaaagctcaccattttctgtggctttctctttccatacgcctcagttttgattacaacttgacaacctcgagcggaacaaactttttgttgaacgtttgtagaccgttagttgccgagttatggagagttttcgatccggataacacgatggccgtcatcagaacttctcaaggtgataggtctattgggttcgtgtaggatgtttgctcatgtgttcagttcacgttctcttccttcgagggaaacatgtttactcatcatacactgtcatcatatagcgcgctcaatcgaaattttactcttgcaccaaccttgccacccacgccgctattgactctaacttcaggcgctccgtgcccttcagcacctgatacattgatctcaacattgatccattttgtctgcgccgctaccgatcaagccaactctcaatcaaacaaaccggtcttgataggtgctcttccggtg

SEQ ID NO: 1643 - DNA, 24064 bp, Xanthophyllomyces dendrorhous
gtcttcgagtggaagacaagtcatgcttgctcaagctcggccggcgcatcgggagtactaggtgatttcggagcgatcgccgtctttttcgtactgttagtcctctgcctgctcgattggtgatctattatattttgtatcgattgagaatacaatcaactgatgaaacatgttttctttgttcagcgcaattaccgtcgtcctggcgtacttattcggcaccttcctatacaatcgatttattcttcaacttcgcggtctcgatcagcttccttctcttccgtctcttccaaaaatctcgaatccatttaaaagacaagggagctcgggatccgggtctggacgaagtctttggggctcttggagatcgagtcatagaggggatggtgttgggggatactacggaaacttggccactcatgaaagaggtgatgatgaagaagaggggctcgtgggtagattcgggcttgatagtagcgacgaagaagacgatgggttcgtttacgactttcattttctttcataatcttctcgacataccctatcgctttcacggctcgcagaacgatcagcttactaattcatattttgacaatgtatctacagtgacgcacctgccttgtctagtgattcgagggtgtggaggactccagtaataaactcaaacccttcccaggcttctgatggtcgattggtcaacttgtagtgcatcttttcctccgtaatcaaaatagaggcactctgttcccgaaagagttgctcgtggtgttcttcgataaggaagacgtatgcatacaatgttctcagaaagacaaatgttgatcagttgattttttatgtcccaagctatccgatccagtaggtatatgtataatgattggaagttatgatggattagagatgctctgaagatgcgttacagataaaaccatacaattaaacagatatacactgacaggaacgagttcagtttggtcagaacgtatgctacagaaaatgatgtgttggaatgaatctgttctaaagggcaaaccacataaagctctttggttcccctatctagattacgtctccaatgaagatacccaaagcagaggtcgcattcttctggtcctcaagtgcacaggctttgacaaagtcaccatactgatccttccttccttgaatataggtgataaactcgtcggtaggacaagtcgatccaggaccggactgacaatcaggaataggaatcggagcctggttgactcgactgaattcaatgcaacagtttggccatcagctacaatgagtccggttcaacaaaaacgtaagaaaatatgatcacgcacactcggatgtaagaagttccattcaacggacagctcaggaactcaagcccgacgttacccaaaaaaggcagaatctccgaggttttccaagctcggtctctatcaatcgactcggtgctcatcgtgttgttgatgtctccagcaatagtcagatttccggcaataccaacagagttgttgaagatacctaacgcggtggccaggaaggcgggctcttctctgtgggtgaacgaaaggaaaagcttttgctgggaggcgatgtcaatagtcgtgttggtagtcgatgtattggatggagcgagaggtgaggatagcgtgatgttgaggagctggtcaacagaggctagtacccaaggaagtcctagggaaggagactcgggataaccgtaacccaaagaataatggtactttaagctgagacgacaattctgatcagcgggctatcgataaaataaccttgcatggtggaaaccaaacgatatagaaatgaacactcactcattagcgtattcaaatccgagccagtcctcattggtgaaagcatcggtggtgcagaacggagaggtatcgtttccgataacggtatcataacctatacgtgcgcagaggttgagtcagacaaccttttagacacgcaagacaaacaaagacttaccgcaaagctgctgcatcgcgtacacgtcgtcaacagtaaaattgaaagcaggtatctcggcgttcagtcgttgaacaatcggcgaggcgtacttgttcaaccaagtggtcgactcgttcgtttcagatgtagcatcataagtctcgcaggaatcctaccggtaacgaaaggggcataactcttctcaatcgttgcatttcacaggaggtcactctgaaactatgggactcacatgaggagtcaaagtttgtgcggcctgtagctcgccttcggctacagtcacgacctcaatcaaggaagtgtcattgacgaagccagagataaaagctcgagtcgtgtcttcgtctcgatcggcagaggcagtccagacctaagccgagcacacatcatggcgtgagaacaatagtttctatcgctttgattgaagaacatatatgaacaaaccttgaacgcggtcaagttgtcggtcggaaccaggtggggaatatacgacgagaacatacggcccaaatcagccgcgtcgctctgtttgaaggtagaattcaaaggtcagaatacgctaaggaagtctgaacagtgatgtctatactcacaagaccgatgggggtaacctcggaaacttgggaggttgcatttgtaatgtttagcaaaggcacgtaatcggagaggagggatagagatgtattggcgaagtctgctctggccgtgaagttgagaagcttcgataggaaaggctcgagataatattcgtagtcataactgtatgaaagatgagagcgataacttcagtatacattgtagaaactgatactccaagctaccgagctcactcgttggcataactgtaagacagagaaggaacaacgagtgaagcatggcatcagaagaggctgggtatgttatatgactcgctcaacgaagactcacatatcggtgtgtcggaacagatacgaagcactctcaatcatgcaaccctcgggaggggaggggtttagctcgactcctggagactgtgaatagaatgaataagcttctgcgctatggaaacggcgactgtatcggtgaaagatagcgtacgatgaaatatggagcgattccagccagatgatgaagaggataaaactctggatcacttgcgttctgggtattgtgaaagaacgtggaaatttctggtctacgagcaattggtagtccccgaaggttgggagtagggcctccaagcgcaaaagagctgaatgatgatagaacggcaagcaggacgatacaagacgacatgaccttgagctagtacaaagtagaatctttttcctcttaagatggatgtttgaataaagaaaagacttttcgactgatcaagttgaaaccttttacggagagagaaaaagacttgagggtaaaacggcttaagcgacgtcccgagtgacgtcacttgaagcctcacggctcggaaggttttaccttgccgtggatattctccggcatttctggcgttgttacagagctttctttttatagtggccttctcttccttatatcattgatcatgttgtctgcaagacggtggctatgtttcaggtcaaattctagtatcatcatctactctcagtctacaggcaacaacctaggtttcccatccgacacaaaagccagacttcccaaccgttcgttcttgcgctcttccatccctgcagcgaatgcagactttttttttttaaaagaaagaaaaaaaaagccatgtatgatcagatgcaagattagagaatatttatccgttcaatatctcaaagttgaaatactcacaggaacaagaattccacagcagtccccaaacccttcggccttgatatctcctaccgtcctcacatgcttgtgatcaccatggtcaaccacatccccctcggtaacatcatccattccctcaggcataggtaaaagagagccaaacagaaagtgctgcatgacaggtaatcgaccgagtacctcagcagtgaacattttgatcatcccttcgttcacctttgaccaggtcttgacggcggagatatcgtcaagcatgggcgaatgccaccgaagagtcgcagttttgatctaaggacagaagaaagagcaagttcgaacatttgtcgttgtctccgtcacaaaacgatgcaatctgaataagacatacagagttgataaactggatacatgcaagatacatataatccggagagaactgctccaaaatctcgggatcatgaattgacttgggtcgtagatatttgtgtgctgaatggttgaacgaatcgttcttgattcatctttcgggacgatatgttatactaacccagagaaaggagctgaaagacagacattacctttcaattgtcctgcgccccataagaatggcaggaagtgatagctgttttgattcagaaccagattgagcaggaagtcgttactatctttgttgctgctttataaactcaaataaatcgtataaaaggaattactcgtccaaaccccaaactccgtgcgaccctgctggctcaagccagtaagatttctggagatgtcgcatagtttgagtgtatctgttgatcgaaatgggaagaaagggtttgaacatgaagaacaatgggaggtgacctaagccaatatcaagcagagaatggcacgtacctccaaaagacccgaatgacgagagctctcgaatcttcaacgaagaaaacgttcaattttcgaagacataacctatccaagaagaagtaatcagcaaatttcagggacaggaaaacagtaaaggaacaaacagccagcaaacaaagtttagttccatcccacttccgtaatcgacccttgttcggtttccccaactttcgttgaaatatccagcaagctcagggatagccttcgacggtacgtttggtagagttgaaataagatcggccgagttcttgttggcgttaatgagaaaagaaaagtcagctatcgattatcggtataagtgatggtatgtttgctcgaacttgttgaatcttgtcgtaaaagtctcgaaaggccgggtttccaaatctagacattttgttgtccaccggtggagtggatcgtgctaatgattcaacttgatcaagtatgaggagagcagcctccaccgcctgcgatacgtcgcaaagaaacagtctgaaaatgtcagaaatccatcacagagcttgaagaacaagagaaaaaggaaaaaaagggttgtttaagcaaggaaaagaggacgaacaggtgaacaaggaattggctcagtcagtttcacaccgactattgcatcgttgagattctggatgaattcgagaagatcagaatgaacagtcgattgaccgaacttttctagatgggactgagtgacaatatatttctggggagcaatgaataccatgctgatgatgatagtgatgatagtgtttgataaaaaagcgaagtgtgatggaggttgaagagtaaaagagaaatagtgtttatcttatctggcgaaggatcccaaattcgagttcacctagagaccacaacatccatggtccatctgtcctcttcctccttgccagtatctctggctatcgaactccagaaagattggccatatcgaacacagctcattcttcagcctgtcggtcactcccctctcagtcagctcagagacgctttgtttagcttgcctgatgtcgaagaacgtcggttcaactccgttttcttcgcagccctcctcactctggcccaaaccaagatttcatccgttccctacagtcaagttacactctcttctaggtgtttctatacagaggtgataatagtatggactatccatgaccttctgtattcttcgggcaaacccacagatgacgagcactgggagactgctgtggctaggctcgacatgacacttattgttgctggcgcacccaatcgagaggagactattcatactcttatcgagtttatccaaaggaattatcttcctccatctgttaggacgtcatctttacctgctgagcctcgaaacaaacggacgaagtttacgcacgattctccttcggaagaacatcagctcctactagcgcccaatccaatcttgtccttcgatcacgctccttcactttcggcctatctgaacaaatattctcaaacaccgttcatcgtccgttctcatttgattgaaacaggttggcctgctatatgcgaacaagattcaacctggaaggataaaacttatctggttaaagcagtcggtagaggcagaattgtcccagttgagataggaggggagtatacgagcgaagggtggggacaagggatggtcccttttgagcagtttttggatcgggtaggatggggcagttgtgctgcctggtccgagagatatgaaagcgatcaagaagcatcgaaggaaccagctctatacttggctcagcattctctgctcaaccaattcccagttcttagaaaagatattcttttgccagattatgtcttttctggaccggaggaagacgttccaaaaggatacaagcctccctcaaacgaagaggcgctagtaattaatgtctgggttggagggaatggaaggtctagtccatcgcatacggttagtctctgctccctacttccagatgcagctgatctgaagaccgctcatttctccgagttgattttgttttatacgggctttgaataggatccattctacaattgttatggttggtcgattctttatcgatatcttattaatcaacaaggatgcataatgacatgattgaatcaccaattttctgttgatagcgcaagttgtcggccagaaacgaatatttcttactcctcctactcaatcagacgccatgtaccctttctcctcatctacgtcgtctgctttgtcggactcttcttcgaccgaatccacatcgttcacagctcatctactatccaacacctctcaagtacctatcttcacaccggataatcgacctccagatcgagatacttatccaaaattctattcggacgcgctgggatgcagcttggaaggtgtgctgaatgagggtgatatgctagtcatgccgttcgtccttaagtcactctaaacaattttcttctgcagatatacacaccaaagctaacaaatctttgataccaaactccctgtccttttcttctgttcaagccctgggtggtggcatgcaatgagacaggaaggaagaggatggggagtctctttttggtattgaaaaattaaaattcataaaacgtgtacgaacatgttgtcggagtcgatgcggtctctgtattcaaaaagaaaaaaaagaaaaaacgtgtcaagcaaaaagagtaagaaagaagacgaaaggctgaaacatccatgaataaagacacaagaccgataggatttcaaggataatttatccgatgagaaaattcaccatggtacacagacggaagtgagggtgtggaaaacgcgacaagatacgataggaatacacttgacaagaaagaatgtataggcagaatgcccgcaagaaaaagaatagctatacgatgttttggttggaacagtcctacatagagaaaagaatcaacgaacgccaagaaagttcttgtgtaaaccgctcatagctagagactgagggagaatgtatattgatcggatgttgcgaaaaacaggtttcgtgacggatccaagaagcataagacttagacgcgacgggtagagaagagtaattgaatgagtgttgtacagatggattattgaatacatgaaggaaaaaatgaccagccttgtggaacaaggtagaaaactactactaaatggaccaaatgaaagaagggtcttaatcaacgtgccaaagtctctgttgctactgacagatcctgaggaccaaatcttcgtatagcatatccgtctcctgcccctgtctcgaaacttcgtacaagatcggcgatctcgggatgactggcgcttcttgatcttgttttcggtggagtgggaggcaactgattgatcgtcgcgtgagaagtggtcaacctgttcagagttttgctgggagaagatgagagactgaaaggtaatctcgatcttcggctcagaggtgaaagaacaaccgaagaggaggacgagggttgacttgagaatggctccgaaggtgatgagatagtgggaaggtaggacgtggttgagaacctgagcaaaccggaagggcgaatgggcttggagatggacgaggacgaaagtatggaagaaacagcttgtttttcagccggcgagctaaaagaggcgctggcctgacgggaccgaggcaagctttcacaggggtcagcaatttgcaagctttcgtccttgatctcatgtccttccaaaggagtatgaagctcgccatcatcaacagtaatgtcactctgagccgtcgaatttgttcgttgaggggttacccgctcggtgaatatagtcgtgaagacatcgggaagactagtcgtttcagagctgaatttatctttgggcgtctcgttctgcatcttggcgtcattttctccatcggacgattccatatagttggtctcttccggtagagggacttcctgacggtcagtattgacaagcttcgattgggatgtagacaattcgctgtcgagaagatttggtctatcgttccgttctgatgaagaggatcgcgagaattgattgggaagcgcagggagaaagtttaaaacaaagtcgcgctgggactcgaacgcgattttggtactgtttgtggtcaaatattgaaaaaagaatcacagaccaacatatcgattgagaatcacaatacaaaaaggaacagtaccaggaagaaaaatcactcacgcctcgaggaaaggaaacgtttggaatacatggacgcaatcctcaaagacctcatgtctcaccactgtaccgctcaaggtagccttgtgcgctaacaaagtgatctcgtcccttagaacttcggcttcaccagattgaatgagcaaaggagggagtcctttgaaatcaccgaagagaggagatgcgctgttgagtgtaaagtcaatttgtaaaatgagaacatcttagttacggccaagcaaagggtgtgatggacttcagaacctactaaggatgagtgaggtattttttcaccccttcttcacccagatagcagtataccggattcaagtgatcatcgagcccaggtctgggaacaatatcgaaaggagctgcgcgaaacataaaggatacatgtcggtcatgaacaggcggcatagaggaaaatcttccgcaaaatactgaccatttgaatcccatgaatcgcacgacatggtcaaatccacccaaggagacatcaatatagctcccgatggaagcggatatcctgagtagagagaatcgtgatagaagccgagaggttcaggctgtgtatgaggtcaaagaaagtcatgcaacagaaagggacaaacaacttaccattgtctctcaagtacagtaacgtacccagtaccaaccctccaccggcagagtcaccggcgaaaagaatattttccggctttacaccgagctcgtctgtgagtctgaaatatgcgctaacggcgtcgtgtaggggacccggaaaccgagtttccggagcaagtcggtagttaattgcgtacactctggcctgacattgagacgagatctgtgtggtgatagatcgatgggttgccgctgagaatacgtagtaggcaccttaacggatgatacgacagcgaatgaacgatcaacaccaaaaaaaaaacgagaaagaaagaaaccaaaaaacaagcaaggaagtgtttagatcaaggagattaagaggatatcatggggtttgtaatcaggcttctgagcatgtatcaaacaaaccaaacatacctccgtgcagatagagcacaatgcgctctccaccctttccgccttttctcctctctttccactctctttgccattttgcccagagtaccttgtcgacgacccattcacctccaacttctcttccgctgccgaaaccaccctcgattgaataagggtcatagttttcacctcccagttcgtaagaatcgaagtcggctaagagacctctcaatccgcgagactttacacggaacgaaaacggagtgacaatggcagaagaaggaagaggggctaaagtagacagcgagacgaggccacgaataaacggctgaggtcgagatcggcggttgttccacatcccaggttgcggtgaagaaggtaaagatataagtcataacaaacgggggtcagactaaacttgagatttcatgcaaagtgaatggttgattagggaaaaatctttcacggactatgtctgccagatgagaatgtgcaccaacatcccgcatcatggatgtgatgatagtcatcctttttcgaggagcaacaaaggtacaataaattcaggcaaggttaatgaaggactaggctagacaaacgaggaagaattgacgatgaagatacatggcatgaaagaagacctttaagataagccggggtaaaaagccttactctaatccccaagatttcttacgaggtccatatatggtatgggttgcgagttcggttgccagatgactagctatggccgtcaatatttgtcacaagaaggatcagaacatagcctctaggattttaccaggagaaagatttcaaaatacatggacacatggccatgcaatcgttggaatctttatcttgcagagtgcaagggctgataaataaacatgtgacttacctttggcgacgacgaaaccagcgagcttgaagacctcacccacaccccagccggtgaggaagcgcttgccttgcctttgtaccagactattatctattctagcagatgctggtgtgtctggagacgagtagtgagccaacctttggtacaggtcggaaggaaggtcggctgttgagccgacgggagttgccgacgacgtgctagacggcgtggcagaattcgccggcggtttgcgaaagaaccaacccatgctggggaaacgagaaatacccagaagagaaccgacgagcgtggggagaggagaacgagattcaggtgaccgagagaagcagagcgaacaagcgagtatgagtgtatataagaaaaggttggatgaccgaaacggcaagaagcggctgaataagagaaggtgtgttgagaagaggattgagggtgaaactcgagaccgattacgtcgtgttgttattgtaacccatccagccgaaccggccagatagccgggggttcacacaggttcacacaggttcacaagggttcatctgggttcaggcaggttcgatgtcgaaatagagtcatacacagccacatgatgtaatcaaagttacgctatccttacacttcacgcccctccatcaatcctctctcatcgtttgccggggttcgctcgttctctccatccttttctttttgctccttctcagatcgtccgccatcccatcttctcctttcgctcgtccgtcttgactcgtactcttgatcttacagtccaatatcgagagcgttgttgtacgtgttgtgcgcgtgccagtgtcggttgtttcttttttcttcttttcctcttcgggcgctctgttttccttgcgccttctgtaaactctacaacatcaccatcaggtttccattatgagcacgaacaaggtctgtccgctcttttgtacacatggctgacctgatcagatctctttcctagttcttagcctggatcattcctacgagacctatcaagcatctgatcactttctgttctctcaccttgtccttcatccgggccgacataggctacgttcctcagagaatataaactcgtcgtcgtcggtggaggaggtatgtctgtcatcctgtctcgcatcattgcatcggtcaccatcttaccaattaatttccgtcttttgtgtgctggatggtcatctcatgattcgctcgattacggaacgtgctgtactcgccctaggtgtgggaaagtcggccctcagtcagtcctgatgtcttcatttcgcaattcttgcacgcgtcaggataactttacttcaagcctgaacgtttctcatactttccgctcttccttctcctcatcaattaatttgtgtatctgtgacgtcgtgtcaactacatgcccgtcgtatcaatctccctcgcctggaccacggtcgatgctttgaccggacatatcttcctgcgtgatcgtgaacatgttcttcaaatatcatgcgacccatctcttatgttacaacgtccagccattcaattcatccagtcgcatttcgttgacgagtatgatcccacaatcgaagactcatatcgtaaacaaacaacgattgatgacgagattgcattactcgacgtgttagataccgccggtcaagaagagtatgggtacgtggttgattgttctcaatttaatcctttgaggggaagaagttccagtcaattcttgactgtatgctcgaggaattcgtcccgtacttctcaagcttgtataagaccacaagtctttgccactcaaagaacactgcgtgtcaactttctggacatatggcgctctatctgacgttgatgctcatgttttctgattctcactccgattcaaattctatatgtttgtcacagtgctatgcgtgaacagtacgtatttgtgcaatattgtatatcttccttgcggttatcgatctaatggaatatgatttttgggccaatggtcttctctttcacactctgaccagatatatgcggacaggcgaagggttcatgttggtttactccatcacttccagaaactcatttgaagagatctctcagttccacgctcagatactcagagtaaaggataaagatgtgagttgtaataatttgtagtttctcggagttgggttttcttccgcaaatgtgctcataaataccctgtctatggaacgccaccgctctaaggatgtgccttgtgtgattgtggctaacaagagtgacctggaatacgagagacaagtcgatgctcaaggttgttacatttcaaaccatagtctagcccctttggttgtgtcgtatgctaaatacgacgattacccctcacctcatctgcgccattcttcaatcagagggacggcgtcttgcccagcaattgcgaacgatttgcatcgagacctcggctaagcagcgtgtgaacgttgatgaggctttcctggagctcgttcgaagcatccgaaagcacaacaaggtctgtcttccagcatttatgagccggctatttaggatgatgtaattgactgttgtcatgactttccttgcaatcaccttcgtctagccggtagaaacgggccgcaagacagatcccgccgctgcgtcgtcgtccaaagccaggtccaaatcatcgggcggaaaagattcccatagtagtggatgctgcgttatcttatagatacctcttcttccctctttcatatccaatcttttgatttcttattctacctgtctgtagctctcacatacttgtccatacctgttttcttttgcctctcggttgcctttcggaaacatcccttctcatttttcatctcgttagtgacgtctatctctcattctctctatcgtccttgtcgaattcgttttgatcgtcaactctcctttggttctgccatcagacctgttgccgttctgaatcattagaagggactagttttcctcttgcttctgcaaatctaatcctttttctaactttttgctctgctcctgtgttattttttccctctttccctccgtcaaactcacccaatccagaattcaaaaaatacaaccacctccgttaatgatctgttcctagtttgctaagggttaatacgtccgacgatgccatgtttattcttccttattcgaaaaatgtttttccattgaccctcaatttgtgcttggtttgctacgtgtatctgttggctggatgcaatctatcggctggtctttgccggttgtttaatcgagagatgcgtggtccggatgtgatgaagaaaaagaagagagttgtaaagatagaagacagtagagtctaatttaatctgaagccgtggtgaggagaaaagattgacgatggactcgggtgatttgtcaacgtcaatcagtcgctatcacttccagatcccgttcctacagaaaagaaagaataagaaatcatgttagtctagtcaggacggtatgcaagagataccccggtccagagaatagttacctggtccatcgtcctcttctgcgagatcgccagaatcaaacatatcaatgcctccttcctcccctcgtgcctcgtcctcctcctgttgttctttcatgatctctatgatctccacgtcggacggtcgggaaggtgacagtagatcaactggaagctgcctatatttattcggtatctgcgtagaagatccggcttcaagaagcgagcgcacttaggagaaccgagatggtgaagtagagggtgactgtaagtgcttggaactgaatacggaagcagtggatgaggacaaaccaagatatattctcagttcttgatcttgaacttgcatagcgagatgaatgggagtcaagccctccaatcttgtctgcagatcgacatcgcaatcatcttcttccagaatgtgatccaagctacatatcgtcagggccgagtagaacacagtaggtgagaagtaaaaataagatgtgctcgggctttagaaaagatccaaagagttgaaagagcgtgatctggccttaccagtcagttgatcctcgttgaacagcgtagtgaagagcagtaaagcctagactaagagtgagtgtttatgatcatgtttatctttgtcagatgaaatttcatctccaaaacttctatcctgatgatgcggaaatgaataatggacactgacccatcttgatgattgatgtcaaaacggcccgtcagagacaagacggatactgatcatttgtgattacaacagaaaattcagggatagggaccccaatcgtaagttgatgagaaatacaaggcgactctcgttgagacaatgaaaggaactgacacaaaagttcttcattatccgtcttggctgcattgagaagctgctcatctggtaatacagatagtccgtatcagcatgttttgaggtaagggtttcgcaggaagcgatcactgaaagaaagaaaacttcgacacttcataagtgatagactcactgggtgatgcaccttggtcctgcatgagtgagatcataagagagttagactggagatgaaatctgaaagcctcaattgcgatgtctgatgagtgcccaagatgatcagaatgattgttaaagtgggcgtatcgttttgttgtactcacagccgcagttggccgacgacattcccaagccgcctgcttctgactgtaatatatttaccaagatacgatgacgaaaaggaactcttcgttctggcactcgttcccagtcatctcctcactggtttctcaaatttgtttccaacaaccatgtacacactacccagctgtctcagccaaatgcatcgagaaaccaggaaaacagaggagagccagctagaaagtctatagctcattggagagaaacccttggaactcggcgcagaaacaagtagaaaaaagaatctgtggctttggctactagagagtaacctcagccgatggtggtcgatacgtgacttttctggacttgggtgccttcagtccacagaccaccaaatccccgttggtcatgggtctggtttgccttcttgatgagctagtgttagcttcagtgacaacctcaacatgatcctcaacattcaaagcagcagctgtgtcgtcaaacaccaatactctcgacccctcgttgtccacctggtgcagggttaggtggagtatgtagcgggatgcatcgacactcatatttcaccaagtctgagagcaagcagagaaagaatgagaactcgacattttgtcctaaaacagagacgaacatgaaaggaaatcatcagaaaaagagacaaatgaacagaaagactaatagacaaggaggtagtagagtaaagaaggatcttcttcataaggatcacaagtttgtctctttgtttctctcggtctctggtttttctcatccttctacttatccagttctctatctctttgtctgtgagctgcgcagccttcaccaggtcgttcatcataacccaaagccagtcgaaccgatcaagagggattcgttgcgaacaaacaggcaccaagcttaacagctggtagagacaaaaaaatgtcggaggcaatgaggacaatcgtccgccttgaacactcatcagcggtgctggtaattatcactgctgcttctgctgctcttacagctgctgccgccctgttgacaggaaccagactacatctatgactcatgggagttttgattgtctaaggtctcgagatacccaagttcgatatagctatgtatcgaccactgtcagttgaggtcacttacttgtggccaaagccatacgatatatgtttgtaaatgtacagtgtaccaccctgcgatggacaaaacgagcgcattgactttatcgaactgtaagcgtatcacagaactcacgcgaacatatcatcgttgttgttgttagtcaccggttagtaaccaaagtacactccttgtactgttccttcctaccaattcattttcgatactttgacctccactccgttcattctttcattccgttctcttcaagcttcttttactcttttgttgtaatgaggttttcttcgattttttcaggagcgctcattagcttcgtcgctgcgagcttcggtttagcctctacactctcggatggctcagtgacagcgaccgcgctagaccccaatcttacaagagtacgatgaatatttgttgttttcattgatcgttcctaactatgtccatcttactgaatgttgttgcaactttctttgaattttttttggccatatagtcttttcatgggatagcttactccccatcaggtttgatttctcctgttcattcaaacatcgaattaacagtaaagttcttggcgccgagtccaaagctatgtattctattctcttgctaacacacctctgtggcttcctattttgttgtaaatgacatgtcaggtgtgattcttccaaattgtatgtcaacgttctcatttacttgtatacacaactatacagcatcattgacgacttctttgtctccataggtggtgctacccaggaagccgtcacgaatgatgttctcctgctcgctcagctgacccctcgaattcgtacatagtaagtcctactccatcccccttcctacctctcctttgcagctcgtacgcaactgatgcttggcgctattcctcttagcgcctccgactgcaaccagacgctctacatctttgaagccatccggcagacaaacgcagatctcatggtatggatcggcatctacctctccacaggtaccgatatcgataccgtctacgaacgccaatggactgcgatcgagtcagtcatcaatgagtacggaacaaaaaacatcggtggaatcaccgtcggaaacgagttcctcttgctctcttacggtgacggcactgcaactgatgccactggagtcgccgccagaactacgttgctgagctacgtgaccaaagccaaaggtatttttttttgtacgactcgacctatgctaggagcttagaaactccgacaaatgattaaacatctctcgttggcatatacagctgcattgagtgccctagacctgaatgtgacgatccctgtgggaacgtctgatgccgggtctgccgcaacgctggctctttgtgaaggcgtcgattactatcaggccaacgttcatccttggtacgctcattgctgcctttggtccgagctgtgggctttcccaacatctgcttaccctcgtctttgatcttctgtgtcgctgtgcaggtttggctcggttgactaccgtggtgctgcagcatggactttcaactttttcgagaagtttgatgtcgaagtttgcgctcccgcttctaacaatccgtgagtgtgctgtcatcgcgagcctctgaatcgaaaaggtagatgactgatcagccacacactcttcttcgtgttcgtcgactccagtactatgtacatcgcagagaccggatggccgacggttagttacgtcttttgacttatttcaccgctgtttgcctccatctgacatatcagtatgatcttgaatctttttgatatagtcttcggacaacgcttccgacgtcagtccttcactcattttgcttggtcagacacctgatcctctacgtttgtttggctgactatctgatctgtcgtcatcctggaatacaggcgaccaacggggcaggttcgcccgcttcgatcgttggacttcaaaccttcatggacgaattcaactgccaagctaacgcgaacaacaccgaatagttcgttggctatgttaactgtagaggcctgcatcccaatcatcacagtgccagcgatgctcatgcaccttgcttggcttccgctttttgttcagcttcttcttcgagttcaaggacgagacctggaaagagatctacggtggtgtcgaaccccactggggactcttctacccgtgcgttatccgttctactctgatggcccatatcccaaatgtccgaagtcagtttagctaaaaacgatggagacaacttggatttgaacaggaaccgaactctcaaggctatcaccgtccgttttgccgtcttcttttttgccatctcgtgcttgtgctcatgccgactcttgtttcgttcctggacatagatcccagagtgtgaagtgagctccccactgaatggaacggtcgctcagcttgtcttcccctcatctggatctacggcagctcagacctcgtctggagcgtctccctcgtcgaccagctccacagacgcaagctctgcctctaggagcggaactcagctgggtgcgggactgtctaccgtcttgagtctcagcatgggactggccacactccttctctgagcatgcgcaatcttccagcaacgcgggctcgatcgatccactcgttattctctactttattgcatttcactctcctttttcactaccactcgatctttctgcctatcatcgcgtttcatcttgccgagaacatacctctggacactatatcgaacacacggactcttttagagatacatttaccatccacatagctagctaccccatctcgtttggcgctctcgaacacgatttcaactgaatttgctcaacatagccttattccggtaaaatctttcaggactgtatggggttgtatctccagttgtttcgcacagttcgactgtcggatctggagggaagattttgacgatacgcactttgcttattatccacagccccgacagatatacttggcaaaaaagtgttttacacaatggctgtgccatccttttccaccaaaactttctgtggcgttgaacggcggccgtcgagcgaatgccaacttaccgcacttcaaggcggtgcaggggtcaaatgaattatattacaacatcgagctaggagcaccgctacctcatctccaatccgtaatgagccacttgagctttgactaatgagcggtactgacggcggccgtgagggcgcaacactaacatctttctgttgagcatcccttctctccgacttgcttaaaaatgaggtgtctagtagagagcatggaagaagcaacttaccttccctccgattctcattgacactcgctcgcaattcagctcacctcggcacatacttgaacaggaagaaacagatacctcaatctcgaagatgccctctcacaaggccgagatcaggctgattaacatcatccatgctatccaattcgttcttactgtcgctgtcctcgccatcggtctggtcaagatgtttatcatcaaaccgagaacatcaagctccagatggttgctcagtgtggtaagcattgactgatgttctattcttgataggacggactgtccagaagccgacactgatatccttatcgcttgtatatagtctgccaagtctctgatcacactggcatacatagtgttgagcgagaacgtgtcctacttccatcgatgggccagtttgaaggcaaacatgatactcaacatcttggaagccgtcttttggatcgccgccatcgttctaacaaccatgggattgatcaatggaggatgtgcggcaggagtcggctgtggaacaacatacgccgccattgccatcggatccttgcttgcgtgagcggtcttattatattcgaatgcatgcgattgtcgatcatcatgagctgacgatcatctctcaccttctaacagagctttggccctgccgatggcgtacctctctataaaacacttcatgaaccgaaacaagaatcagtatcaaatcaatgacgattcgagctctgatgggtcgaccccaatgataacgaagaactatggccatcaggttgtggtcaacccgacctatgcgaaccatccatcccgtgtttaaacatattttcccctgcctttcctcgctccactgagcctgcataaatactgctattcccttttggtctcgtttatagagatagatagttattcatgattttacgagcaaatagttcaacaagctaggacatcacccagattcagcactaaatttcatacagtcgcagatattgggtttgatgagctcaacctcaaccaacaacggtcgatacatggtccttcttggtcttaggtttccttggactagaatctaacaacggccagtgtctttagagtagcctatccttccaaattcttttttcattcaagctgtggccgctttggaacaccgccagcagagacaacccaccggatttcatgccttcaaaaacacacatcacgagtccgagcaaatgcagtatgtgtgatttttctgcaaaatacatatcattctgacctcatgatacgatacacaaagctggcaaagacatatctagctaccgagacctgtactacacgctctcagttgagccctcctatcctctcgcccacccggaccagggtttccatggcttgctcgcttgatcttctgatgtcttcatcccaggtcgtacttcctgtgggcgtcacaaggatcaccgtgctcccaccgtacctgttgacgtcgagatctcaaaacgagacgatccatgtcagtctatgctggctaagcatatctcgtttacccttctagacctgagcagcgatcagggcaaacgatcaaggcagcacagaagctcggtacgtacgcgaaccaaccaagctcgtctcctttctctaccttcgtcccttcctgggtgtgcgtccagttaatcgaaccaaccagcatggccccgacggcaacgacgtacacagtttggcccgaaggaagatggataggaaggaccgatctcgagttctcagtaaagacatccaggtcctcgttaatcgcttgctgcgtttcagaagatggccccacacaacagcacatatcagcccacgtagccacctcctagacggtctgaacggcgaaacacacgcagtcgaccacagcaggacgcaccgggtttacagtgtacagcttccctgggatgtttatgctctttccaagcgttccagacactggcgtatggaaccgatggtagtcctgtggggccagccggaagactgcaacagcaggactggggccgagagtggaggcaaaggcctcgctccccagtagcgcagggatagtaaactgctttcctttgatcctaggtatcgacatcaaccaaagacagacgtccagtcgcaaacatcttgagacagaggacatctagtgagatgcatcacccatcgcgagatccatgcttaccatatccgggtggcatcctcaacacactgccaaacagtcagtcggcagtccgcctgggagactaccactgccgggtcggaaggcgaagcgataggtcgagcatccgctctgagcttccggtagaagaactcgttgaacgtctgggaacaaggtatgtcagaccacgtgtcaaaacgctgagcttgacagtcctctcaatcagtcagacagatgacatacattgtacttgctcagatcaggttccaaaagatcagaaagcggcagtccaaactgatcgacaaacgattgtatgtgaggaagaacctggaagatcgagaatcatcagcatctagtcacgtctgacaagacgagcaggtgtctgtccggcttgactcacctggggacccatggcatcgaacgtctggccttgtttcacactctgagcgagtagcagcttttcgatcttggcctgagacatcaacggatggccagtcacgaagagtagatgcatgccactggagggaccacagttgggttccatagagtcatggctcagtcgaacgctttcaaggcaaatgggccgagtagagcgagaggatgtatatagaaactcgagacatatcactcacatccggacatagatcggcatctcttcaaagatcctctctcctgtcgaccggacgatcacaaagctacaagggtggacaaccagcggcagatcagctacgccggcgtccggtcgagcacggtcgctatgtccttgcaagacaggcttactttcccatatgttcagaagcaaaaagctgggaaacacaaagtctcatcagcagccagcacaagggaccaaaagaccgccagtacagaagctatagcaggcgacagacgccttatggggtccttctcaccttgttcatatcgtcctggtcaaagaacttggcaagccagcctcgcttcgagcctccttcttgagactgatacgaatgagcatcggactcgcaggagtctgtcttgccggctagtccagatgttggccaggatatcgacacaagtcacagatccagccaccagccggtcagaactcggtcgagatcgatctgacggtacgaagataggcggtcttgggcaacgcgagaacacaccttgctcaacgctctgcacactgcccggctggacaagatcctcgagggctgcttgtagtttgaccgggttctcgtctttgttggccgtcttgacggtctcatgagaaaccgagtttggagaggatttaggttggccgaagcttgggatgtgcatcttgcgagatgattgttcaggcgtgaacaacagcgagtgccagaggccatctcggtctggcgatgttgaccggtcgcggcgaatgcaatagtgacgtcaaccgagatacgcttcatgccagtcgcgacggatgaagttcgcctgtttttctactcaactccttcgacttggttttctatctagtagaaaacacattctgtctcagtttctgcccgaacatctgtacactgttgcaccggaagcgatgtccgaatatgagctagctagacaggaaaacatcagagccaaccagcttctgctagcgtcgctaggtatagatcccgttcaggtagatgctgctattttgtgtcgttcccgtaatcgtctatgttgctgatctctcgcttcccatgctgcatacggctcgatcatcagacgaagccagctccaacaccgaaggctgagcctgatggaaaaccaaagaaccgaaggccggctcgatccaagccgtatgagcgagctcgagcagtccctattcgacagtcagcccgaatatctgctctcgatgcgcctatatactcagaccacctttctatcgctgcatcgatggatgacaagcagggcagtattcgccgggtttactcagactcacctcctgcagtaagaaaggcgatccggcagctacctcgagcgccttctccgtatgttgaggacgatgtcgactactcgatcgtcgcgcctcaacctgcgagagacgacgacgggacattccgtttcgaggctggctacgaaggcttcacaccaaacatggctccgtgggagatgcttcgagagggaagctttggtggatcttactggaggtaag

SEQ ID NO: 1644 - DNA, 456 bp, Xanthophyllomyces dendrorhous
tctagacaccaaccatcgagtgttgcgcgttggttgactttctatctcttcggtttctcgttcaacatgttatttcatttctattttctacatcatctttatttcacttctctctcgttttatttccattctactttatttccatcttgtttctatatcgtttccatcttggtgatctcgaatatacagtagctagtttgttttcttttctctctcctcctttctgattctctcaatcaacttgctcactttgtgtgtgtacaattgtttgagggaatcagtttgttggaagaacttgatcaagtgcaatcagagaaacaggattaagagacttggaaatcagaatcaacatcagagaccaagggcataacgattgtgcttccattgaaggttttcatcaagtgaattccctaccaagtgctccctaattttattatgtcatacgctcaaacaaca

SEQ ID NO: 1645 - DNA, 7354 bp, Xanthophyllomyces dendrorhous
agtcatacagacaacaatgtacttccagtttccgaatgcctcaatggtgtttctctcgttgagctagaaaggtttcctcaatagatagacccgatggctagttctgattgcctgattctgatctgaattttctaatgggaaaacaaactagctactgtatattcgagatcaccaagatggaaacgatatagaaacaagatggaaataaagtagaatggaaataaaacgagagagaagtgaaataaagatgatgtagaaaatagaaatgaaataacatgttgaacgagaaaccgaagagatagaaagtcaaccaactcgcaacactcggtggttggtgtctagactgctatatccaatacttccatcgtggctgtttctcttagtgtctttttagcctctttcttcttatctttcttctcatccaagcacattgtgttctctcacatatatctgcgctcgatactttcgtttcttttcttttctttttctttttctttctctttttcccttcctcagtattcacaaaagactgtgttatgggcgcgggcaagggggctgagtggggacggtactctgtgcgcttgagctctcaagagggaagggatcatgcaatattgtagagggatatgaggagatagatgattgtacggagctatgaggagttaacgaggttccaaggtttggagagaaaaggggagatagctaacgactacctagtatatatgtcattcgagatatcaagccaaggaaacacaagcaaacacaaggaaacacaagcaaccacaagcaagagcgaagagataccaaggaggagctgagagataccaaggaagagtcaagatataaccaagagagagttgagatataccaagagcgagttaagcagtaccaagaggctgttgcaaaaatcggtctacattgcgcaaggtcaccctgcgcggatcaaaccgagtcagatcatgacatcatagtcccctacaaccatcctcattataactactctgctgtgttgtatgatcctttcctgcccaagagcctaagggcgccaagtacactcactactcagcccctctgcctgcgtccataacacaatctcgcgctataaaaaaaattctactgattctcaatggtctttttacgaattctactcatcagtatagaattcgagttacagatctcagcgttgatctatatcccttgaaggtcttatggcctgcttcgtgattcaataccacctaagtcaacaatcaagcaatcctagcaaaagctgaggaaagataagtagaagaaaacaacagaaaggacgaagagatgaggagacgagaagaaaagatacggtcaaacgttgaaatatatgtcaaagaatacaaaacggaacatggatgtgaaaacaggaagagaaaggaaggtatggggagttcgagggaatgaatacactcagaggaaagacggccaggatgtaagaagatgcctgctggatttccctactgaaatttgccgaacttcgataacttctatatcaaccaaaatcgtatctttgcggtatgctgatgccaatgatctcctaatccgtgaacatattctgagcttactgaagtaggtgtcatgtgcttcaagtcacgaactaaagtttcaaacacaagcgctgcatcaacttcaatgtccagcgtgcaaatcggcatcttcttgtttagctgcttttttcatgttgcgttccagctccactcggcgaccacctagtccaaatacaattggcttgcctcgaaagtcttcttctgtacgcctggtcaacaccaaccaaaactgatataagtgatcattggtaattgcagaacgaaatgcggaccagtcctgatgtttcttaaggctagttagcttaccgtttaatcttgctcatttcctccatgtcacctatcagatgatggatactcccgggtgaagattgaactatggatttcatggatgaatcatgtgcgagccagaccaaaatgttgggctcttgatccatccttcccagagaggtttgagtcctggctgaacgttctgtacattgaaccatacacagtcaacttgaaaatgcagtgcgagggatgaaaaggtgttttgaatctatagtaagccttacctatgtcttgctcaaaagactggtctttgtttccctctgcctccgagttccacttcttagcaggattctccccagccttatatgtaccaatagtggctcctctcagaagtgaaatatgatgcgctgcgtcgcctgcaaggatgtggtaggtggggcagggatatagagaagtcaatgccaggagagagatagatcctggatgatgctagttgatatacaaatcatatgaagaaaattagtccaatattgatttgtctcagaaaaggcgatattggaaagatgtatcggaaaagaacgaaaagaacggactccaggagtggacagaatgaaaagagaggagtcgccataataatcgaaccctaggaggccaaaaaatgcttatatacgtcatctgcctcaatgtaaaggtatggtaggtataaagggatcgcctaccgacccctaagggaccaaacatacccttaaagcaaccgacatcaatccactggtcttcatcgtttgaaagaaacctatatagtggtacttgcaaatctaagtcagttccgacacggagctagcttcattttggccatcttgaatgactcacctcacttcgcgtccgtcaatgccagatctatcgaccttaaactcgttcattaaatcgtctgttgagggctccttttctctagggccaagtacgattgatacggacttgggaaaggcagaaatatcggagacatgatcgaagtgggtatgactgagagaggaagtcaagagggcaatttgagaagagaatttagtatcaagagttgttatcatcaaacaaagttcgatatggatatcagtgtacctgaaaaacacagatgtgatcgagtcaagaggtatgttttgagaagacaaaacatttgccaccgacgtcggagcttctccgtggtatgccttggcagcatccttagtgatggcgtcgtatttcaagtcctggaggcgcgatcatacatacaactgattattagtatattcaacttcaagagcattctccaagtgattgctaatcttgatacaaatgtacaaagagagcatggaaagaacgatgaagattcggaacggatatgacaacagccaacctgtcttaagccaaggtcccagatgagtctctgcccatcagctttttctatcaagaagctatagtcctcgagttcggcattaccctcgtagccctccacaaagagggagccaggaattgataggtgcccagcaggaatgacggacagtttgaacggctttgctgtggaacgaggcgttgggatggcatagaaggggatgtcatgaggatctagcggatgtacagatatagaagacatggtgagcgagggtcaatgtaaagatggttatccagaggagatggtaaacaggtcagcgatccagacccatctttatgtcagtcagttcaaatgcagctgtggatgggcatgatggcatacgtctatgcggtgactcagttgtatcgagcctttctacgtaagcgagcaggcgatcgatcgaccccaagcgtcacatcgacactcgcaacttgtatctttctttcgataactgatttctcatatcgagcatgatgaaaaacatcagaggattctgacaagacattcatatatatagatgccgcttgaagaccagagaatgtctgactggttctggatcttgcatggtcggtagacggaagatcaaccgtgtgccatgatctcatacatttgaatcattaaagaagaggaaattacagagagtcgtgatgttgagatttattaacacaaggatgaaggagaccgcagaccacaagccgcaaaacaactataacgcaataagaggagggaaagcaaaaactgggtacatatcagcacctagcttgatactcctcgaaggctccaaacacattttcccctgaataagtgatctttatgtccaattgataagtcaatcgatgcgttcagtacgaagcttgacgaaacgttcaaacgacggtgacattgactaacatagagaaaaccatcttcgtccttgtgttcttcgtacactgcgctgatcaatgcagccgttggagggagaacctaaatagaacagaagacagcgacggatgtttcaaaggacatggtcattatgaaagtttatctgatgagactcaccctctgatgcgttttgcagaaacagagaaatggtgaaatggcgattttgtcaggacgtacctcatctacgaagataaaaatggccttttcagcaggcaacttgattcgcttccgaatcacatagacaaactggccgacagtaagatcctgtgagttggcaaacaacgaaagcaaaaggcaacatttgacatgagaacatagcagaatgatatagtgtaagacgaatgatcgcacagatggcaccaggtacttcttcttatcgatggtagggatatctgagttatctccgaaagaacaaaaggtttcaattgaagaaacagactttgaatcagttaaatgcaggaatacactgcgacaaataggtgaacacaccagtcttgtcccctttctcgcagatgactagatatatgatcatgttgagcaaaagcaaagggccgatgtcagtttcatcttcaacaaattttgctgagaacgccgatcatgaaacggacctggtattctgagaagatatcacggtcaatcgagacattgtcagtcttgattgaagtctgagtgatacgtggatgacgaacttcaggccaaacacaaaagatgtaagcatacctatcgctgtatttggccctgattctctgggcctctgcctgtcgcttctctacaatggtgatgattagtcgaccagattttcgatagaagcggaaagtcaccggtggaagcagatcagacagatatgatggtaagtgatgatgtacggctgtataagaagggattgaaatatctcgtatcaaagcggcccatgatcacgaagacaaaactcaccgaaaggatgttcgtccttgaactttgatcgaaccatggtatgttgagtcaagaagaagttttgttgaagagtttgagagcaatatctctagatacaccagatgaacagaggaaacacgaaacaaagccatgtcggtggcgataacgagaacacaagttgcgtaatatgcgagagttaatcgtcacgaggacgatgggtcagcgagatcattgattcggttgcacgacagccgccacgaacaattcacagaagatatgagagtattctgatcagtcaggcgtacacttctgtttcagaaagttgaagatgagaatgagacgaacggagagagatgtgagatgtgatgctttgttcggtgttgatggtgaaggacaggataaggaacgacaatgaactgtttctaggcgatgggatggatgcaagtcacatatagagactgctgcgggtctacgttggaacatcgctgactcagctgatccttattggttatcttagaagtataagctaatcaagaaagtgtgttgagagacatttccactcaccctcgcgtcatacgtgtcaacgcgtctcatctattttgtgcaaggttaaaaagggcgactgattttttcgcttgttgtggcccgttttctctccccacctccattccctcctccatcactttcatcagacatactccacttgaccagctctatattcctacctactcttcagcagaaacttgattgaacatgcctagtcttactccttcttcttcctctgcctcgcagcatattgctcctcttcaccatcccgggcaagaggccgtcgttgttcaacctcatgctcctctgagcaacagttcggccggtaagtagctttccttcctttatctcgacttgtgccctttctctctattctgccgtgattgtgcatcagttcggatctgcttcatacctccttggctatcagcaaggaaactataggtgcttaagacaccaaaaagtgtgagcataggtggtttgcaaagctgacggttgacttggtggaagatagagaaaatgttgttggaagaatctattcacatttgtccttaccccgagatcaaactaagttgtttgctgaagccttatcttctattacttgtctcctttttccgcttttctggtgacatctaggaaacaacatccctcctttggtcaagaacaccattactatggggtctcagatgggtgctggccagaaggctcttcttatgaaacgaatggcatccaagtttgtgtcctttcgttcaaagctgcttacattactacaattgcagaaatatttcggacccagaacggcgatctcatcagagctttcttcttgacaaacattctcatgttctctacagcaaaccttcaatggtatcgccgacggacaacatgatgtcgccttgtaccgccaagctggccggcgcaaagaagaagcactttgccaagtacgttctaatgctgcagttgatttttggagaaggtcaaacacactcctgacaacctcgggccgcatttactgacatttttgtcttttcttgtactgtatgttcagaggtcgacctatggctcttgcgcagtctttctctgcagtggctgattcggcagacgatgtaagctttcttttctttcttttgtttgcatgttcaaaggcgacatcgatcacttacagcctttttcatctaccgtgacgatcaacaggatgacgagaatgttgctcccaagtaacagtcctttgtcatctcctttctgggcggctcccagattctatctattcacttctcttctccattcctcaatttttgttttactataatgatgtacttttatcaagtatgttgattgatttctttttccctcttcatcttgatttgagccttgacagttctcgctaacaaacaatgctttctccatccccgtctttctaccgttttctaggatcattcttcgttcatatttgttcagtgttggtcacacacacacacacgatctttatttggatagcacctcgcacgtgttccgcgcctttcgttttcgcctttctagatttgttcttttttctcccttttttttcttctcgcgcgacgacctcctttgtcttctcagacacctatttttccggtatatattatctgtggcttctcattcatgctcggcttgctaaattgctcatgtcttttcctgcagtcgatgtgaaaaccgtatgttgattttcgatcaaagtatcatttgatcaatagtaaga

SEQ ID NO: 1646 - DNA, 860 bp, Xanthophyllomyces dendrorhous
gtataggaggatacaaaggttggcagatgcaagttctgaagagggcaatacaactgccagaacgtgtcgaacggagtgtagaagacgggctgggccaatcgtctcgttctttgaaagatgattcattaagcagaagcgcgctttccgttgccgatagtgctgatgacctgttcgtagacgtagaagacaatacctccgctcaactgtaatttgacgagagaaagggaagtagatcatatcagccgtcactagctggtaacagaaattcatcgtattgaatgacatttgatatcgtgaaatggtacgtacagtcaatcgagctaaccgaggtgtcgttcccttccaaaaccgaaggattccctcctcggtgaagattcggtaaccacaatgaatgaagttcctgtattcagtcttggcggcaagcgactgcatacgagttttgattacgctgacgtcggtgaaaaatgaaaataaaagcaataatgtgagaagactcgttcttgaattgtattgttagaaaagggtagtccatactcaaagggcattgtcgaatctaccagataaatgatacgatagtaacgcaaacaagacaaaagttaatgactatgaggagaaacatacgaagattgtagagatggatgcacttacagacagtaacgattccagcaagggctccgattccaaaagtgacgcctcctggtagaggctggccggggggaccgtttccttggactagctgcttcaaagtagaataggtagtgaatctgacagcagaattcgctccttgtcgaagcatctagcagagagacgacgtattttcagttcaacccttactcataactctgaatgaatatatagag

SEQ ID NO: 1647 - DNA, 9217 bp, Xanthophyllomyces dendrorhous
aatatatagagagagtgtgaacgcacgacggccgatagacctcgataaattccagcaaacccttcacttcgaatgattgaagatgttccatgcgcaagacctctgaactgaggatctggtcgtcttgaatcctcaatcagcttggtcctaagttcaccagatgacaagaacacaagtcagacatatacgatatgaaatgaggtcatcgagaatgcgccgtgcctacttgatagtctctgatggtgttactgcgataactgcttcagtcattcctgccccgagaccagctgttttaacaaaaacgattcggtgagaaggattatgcaaatcgatgataactctaagcagttgttacaccagatgcaatacaaacctaacaagctccgaggggccgtcaatttgccctgtatggcgtgttataaagcaagaacgcgtcaattgtcgtcgtgatccccggttgatttgaacatgggggtcaaaatatgccagacatatgaagctaacgtacgttctcatcttgaagcaagctcttgtagtaatcataactaagaaatctcactccagccttgacagcatttccagccacgagagctccacaacctgcgtacagacccaaagggcccttagcactgagtgtattccgaatgatttcaactggacccggaggctatgaaacccgaccggtttcatcagaagcaaaagcacatgagccttctcaaatcgattgatgaatttataagtaggtttatataccttctggccggcgacggcagtgaattgagcttgggtcttgacaaactcggtaggataggtcacaactccttcaaccatcccggctatcgttccggccgtcaacgatgcccaaagaggttccttctttggtatagcggacatgtatgcgtagattcaaagctagagaaacaagtgatgtcgaaagagacacgaaagcaagtgagggtgaaagagaagaaagtaaaagcaatgaagttaagttgatcgacttttcataattccacaatatggaacaagcttgaaacggtgaaaaggcgatcgaatatcgtgacatcggttacggctcttgcacagcttctatttgcgttttcaatcacagagtacgtgctcaaactattacatctatattgatctctactttatcaaccctttccgacatatcgactcgactcccaagcgttccacaccatcttgagaattcctttgcctcctccgtcaagcccgccaccgaccatgacagaatcacggtccttctctcccaccattccgcatatcgcaaacactcctggctcaagctctcgtctaatcaacggagggacagtcgtgttcaggtcagtcaataatcgagtatacgctagcagcagatacggcgcgtgttttgaaagtgggccagcgagcgactcggccttggtcgaagcagaactagctagtctggtgttcaatcttggaattgttttggccgtcagggaagtcaataatctggcaagacaccgagcgtcatcagcattcaacggttgatcgacagaattaatccaaccaggaagagtggactcgacaattcgaacttgtctgcctcctaggttcgatcgaactgtctggaagcatccgatcaactgagagagcagtgcggacaagtggacagctgcggaagacaccaggtctcgacgatgacgaacaagatcggtcaacgagcttactaccatccggaacaagtcgtgacgagtggtcgaagaggaggcggtaccaagcggccgaggtgcaacagctcgagaaagtgtagcaaggagttgatcgacgtctggcatttgcagatgggaagccttcaggtttttgaagggaaatttaagtttaaagaaacttagaaaatttgtgttcaaactagtagacagacttgacaaggcaaaacttaccttgtctgagcatacagtatgagctatggaaagagcctgagcaactaccccacaactattcttgtcattgacatatgcccctgcggcgatgactagtttcgagactatggctctgtttgagactgacaacagcaaaggccatgatagagtgttagtacggtattttcaaatcagctcgcaaaaatcacttactttcagaaccctctttgaggatgatgtttgtggccaacaacttggcctctgttatggccggttcggcctcttcactaagcaaagtctgaatgagactttgcagcagactggtcctttcttccgaatctaaagctttgctgaaggaaagaagaggagcggacaggatcgacatgcgttgatctgtagagaaggcaaattagtcatgcatcagctatatcgttcgagtgcatgaatgtcaaatcaagaaagccgtacctcgagcagtgaaggccgagctcaaagcaagccagccagccatgaaaactgtacaagcctcgcttttaagggttggatctcgtacagtttgaacttctaccacgttcaggcgtagcatagacgaggcaagtatctcgatttcagaaagattctgtatagtagaagccttgaggaaacgcaaacaagctttgacgagctcttgaggcaggatccggacacctaacgacatggcaaacgccagtgagcaagaaaactcatggtttttggtactataaatgaagccaatttaccagtagaaagggttcccatccagctctcgaaagttcttgtgattgctagagcctccagtaggtctgcaaagccgcggaccaaccttccgtcgataaatgactgatgaatcttctcaaaggcatagctgagagccttctgcagtgggttgacaagctgttccagataggtttcttcagagaatctataggaacaatgaaggaagtagaaaaagccgatttagatgtgttgttttgcaaagatgttcgaaccatgatgactgaacttacttttttgagtttttgacctcttccatgatggcctgaagtaactgtaatctagatcggattgagaagtccagaatgaaatcctccgcgtcctcctcgttctcatccatctccattatctcctctagagaagtttgcgcatcattcgaagtgaatgtctctgttaaagaagctaacccgtctgatgaagtccccctgatgatcgatcttaagaaaaagaggggaaagaatgagaacatatcgttactcagcaccttcagttatataattcgactaacatacctgaatgtgagattcagtatcgaaagggtcgattgctccaacgttgcattgaatgggctcgaagcatgcagttcgtcaatcggactttggagtatgagataattcatgattttattatcgattgtctataagaatttgaagcgtcaatccggcagaacacaattcaatcaacagtgaccaaatgttaaacgctgtacaatttgtgacaacatcggagaaaggtcagcttacaaagtttgcgttggttcctaatgcctttatgaacccgaacgccacctttctcagcaaagctcttgcccgcaacctggtttcccactcctctccaggaccagctcgggtcagcttcagagccttctcaagactcaaagcccgagcgatgagctcagacttttgagagcgaggtgtgtattcagaaggaagtgcaagaaggagctcgaaacatcgcgtatcagtagcagaaggtgatgctgcgatagtggatgtcaatgaatcgatcgacttcagaagagagtgccggatattggcaagttctggtagctgaggttgtagcatcatagcgatggtcagagagtgtaaggtgaagggtcggttggcctcattcagagcttcatctccattggaaatgagagagaaagagttgatgatgatcgagcaaacagcatctagctgagttcttatgttcaagtagctatggaaatgaacaccagtttgatcaatactaggtatcttgaacggaataatgcgtgaccgacttactctatgacaccgatccaacgtccttcttctcccgtgagaagagcccagagtgccacagcaacagaggaatcgatcttgtgcccctcaagatcaagatctgctaatcggccagaccaagtggcacttgctacagatcttgagatgaagcctagaacgtcactcagtgtctttgaacatcgagatttccgtatctctgcagatggatggagtgaacttgaccggatatatgttcgaatctgttcaaagcagagacagaaaggaaggttaatgcttgttgaaaaatgatcacaaaacccgaatttgtgattagaaaaagactgactgcctcaacggtggcttctccgcctaaaccatcagcatctaacacgtcacccagcttcaaatcttcgtctttgcttaactcgatatcatctaggatatctctcaatgcctcgaagattctaagcccagagactaaccccatctctctagcccaaagatttcctttgctcttgtcatccaaacctagttcgaagagggggacgactacttcggagtggatggcgcggagatcctccttaagcgagttcagaagcccctcaggaagggaactgattaagagtgaaccagatgcaattatcaccgaagaagcaaatctactgaaaagagatagcacagctgctgaatcatcgatttctttgggtccaagtctgtattgatctagaccgccgttttcgccaacccttctcttcttccttgatctctctctatcgccttcgttggtcgaggatgatagagcgcgctctaaagaggcgagacaatccttcaggataaggcgcaagcttctcagcagttcggtcatttgaccttggacaccgagaaagctcttgatagtgcccgtcaagcagtccagccactgtgcatcaaaaaggggtcctgcagccaatgtttggtaatccgtagaaggtgtaggagcagtgatgatggcctcggtgagaaggtcgataaatgttggaagtgttcgggtcgatcgatgatatgctaataaagtgtttaggagactctgtccggaaggcgcagaggatggcatctatggacaacagtatgaaaagttcagatttgagatagaggacagtgtaaattttacaaagagccatgtcaacatacttttgagattgagatcagaagccgggatataaaggggtcgcagagtgtgcggtccaggcgcagaagaattgtcagggtcatcaagattgaatcagtcaaattgacgtcttcttctggtgaccacatgcgattgaaaatgaaaaaagttagaatcactacgaaaggtatctataacaatgtttgttttccgaagacgaaccatgagaagatccttccagctcgcctaacccccactctaatacagtcttacccaagcccaaccacccttcctcgttctccccctcttgatagcctctaccgactttgcctcgatcttctaatacttcccaaaggtctcgctcgcaagcccaacgctccccgcgcttacccttgtctccgatgacttcttttaatgctctcacaaacctcaatgtacatttgctgatttgctcggaggaatgaacctcaactggaaccttggcattgagcggtagcggaaacaatgtgtggcggtgtatagccaaaatcgaggtgaatatgcggagtagatggggcaaatagagcagtacccatgaggtcgtttcaggggcttctacaagttttgaaagggccttgtaaagctttggggtggcatctgactggccaatagattgagttgcagttgaaggctcgatatcttttggggtagaggcgataacaggaggcgcttggatgttctgagttccaatgagtcctcgaacttgtttgcgtggtttgagttgtttattagatggtggcggggggagatagattttgagattctcgaccggaaagatgatggatccttgaaggttgagaagcttaatgtaaagaggtgaggtgcttggtttatgagaaaggtaatggatatatgctgggaatatcgaggattggagatgagtttgagaaagctatgaggcgcgtaaagacaatcgaaaggtagatgagaaaccaaagccacgaatacgcatacaaaatagacacaaaccttggttcgagccaggttgttgggcagagttaggtttagtgaatctgctaaagcggccatgacagtttcccagccgctgatgagctcttcattgctatccaaattttgaaatctctcccagcagtcaagcgcctctcctagaagatccataagaccctcagctgtggtggacagaagttcgactatgatacaagaagcttgggcgacttcgtctaggagttgaggctgatttatcagactttcaggatgggaggggagttgacggaaaaaagaactgaggagggatgttgctgcagcaggaagagagaacacggaagacgacgtagcggacgacgagagagaggatgggacgggcagaagattgacaagtaagttccaatgaggctgcgagagaatggagggtgttctcggtacactgtccgaaagacaaacgatacgaaagagcacgatgcgtcagtacactttgctctggtcatcagaacgggaagacttatagcagcctacctctcttcctgaaccttgcccttgccctttgccttgctgcctcctccttgctttgtagccgtcatgtcggcagtcagccactccataaggacctccctcttggctgggaggtacagttttgcatcgaaccatgcaagagtcgccaaccgaattttatcggtcgatgatacggtgtttgacttgagtgtcctgaccaaggtggcggacgatgtgagctctactccattcatcgtctgtattgatgatggtaagattgaagagagcagcagttgaagcaaagctgagagaagctctgaaaggtacatgtaaaataaaatataaattacacatggatataaatatttttgatttatatatgatatcaccttaagttagataccttctgcttttctttcgtcatctttttggagtttacttcaaaaaataatatatatctgatcctcaagatagtgtttctttaggctctctcgttgcatctggctttcatgatgtggaaactgagaggaagagtggtacggcttttcttcaagacggcttgactttctgtcgaccgaattccgagtaaacatcgatataaactgaccgaaagaccatcgcttcgatttaacgacagccaaagcattcgccgaatgctcgctcaatccaacacacctcgtcatcaacagcagcctcttttactaggcctcagaatttgccttcaacacggtcaccagcatctttgcgtcgtatattcgaaccaatcctttcatcagacatctaccttgcatcttcatcaacaccttcaaatgattttcttggtgatatagacagtgcttctccttacgaaactaccaccggcttgatccgctcggatgactcggatgagggaactcggttttctgagaagaggatcattgcgttccatgaacagctcaaatccgtcgcgctcaaatcaagatggcatgtgcaagattcacagccacgaccactgtctgttgaacaagctcgctcaagtataagcacggtgccgctcaagcttccgaagccttgttctgctcccgactccattcctgctttcttgacagagtcgatatcacagccatcatcttcagctactcccgcatctcactctacaactcaaccgtctacccagtacattcctgtgacactgtcgcaatctacacctgtacagccacctcaacgcacgatcacatcgtcaacaacatctgatcaaacttcgaatcccgcttcaaagtccaaatccgaatcgcaactggaatccaatctaacactcaaacctgagcttgagcctaagcctgggctcgagtggtcaagtcaactgcaaccagtccgagaggaatcacctttgacaccgtctatagtctcaacaattggttctccgagaattcctccatcatcatcttctcaggttcacctttcacgaagacctgtgacctcagtatcaatcagccgcaacgttcccattgcgagcccgaaattaatgaaggctatggctccgacttatggtggaaataaggcgaaaccgccaaattttttacttcctctcggaccgcgcaccccggtcgctcctctgactctggcacaacttcaacttaccaagtcgaaggccgcggcatcatcggaaaaaaacctattaaggaagaaggtgctcaaggcatggaacacccatcgaaggccggagaattcttgggacaagtcgtcccctaagacgtccaaacatgtgtcagttacggagaatgctgattcagagaacgagttttccataaacaacttgggtatctctttaagcaggcgcaattcttcacctacttccgctgtgcgcaagctatctgagagtgtgaatgtccctgcccagtttatgcctctgtcctcatcttcagatacttcacttgtattcaacaatcctcatactgcgctatccaatacgttgttggatcatttagtgcgcgagaaacgacgtttgaaatcatcaatcagcttagcatacgcccaatactgcatcgacaccctgaatcagtctctcggacaactcgaagtcatctcttcgcgtgatccctcctcatcgacctcccaggctattccgaggttgctaagacagtaccttcatcagtatcttctcgttcccgcattccatactcaaactcggcaagaggtcttggaccgaatgttcaggctcggtctccagccaagcgtggacctcgaaattctcatactccgtgcactcttccttcgtcaaaaaatctactcaaaagactttgctccctatggttcgttcattgtagaattatccagcctccaaacctacttcgataagcttcttcttggatcagatacgaacggacggtcaaacaattcatctgaacagggcacaattgatcgtcgtagaatctggtcgaccatgtactctggatttcgttcgatggccaagaacccgattcctaccgacttaaaagctcgcctcttggctgaggcacaaaaagaaccggttgatctagtcttgatttccaaactctccactgtgtgatacccacaataatgatggcagatctcaagtgagttagtgcgaccgcgcccccgtcgcggtatccaattagattaataatatatgtaatgatttgttt

SEQ ID NO: 1648 - DNA, 11825 bp, Xanthophyllomyces dendrorhous
taaatttagaagccttgcatcgagatagtttgtgggaaaagaaccagctgtcgacagatccgacgcaataccacaacttttgtatgttgatagtatttcgctggttcaacaaattgtcgtgatttcatgtcgcatgttatggagaagtttcttagagatatctttggagctaagagagttagtcagtcgtaattcttttcagttcacactcacgcgactaaaatgaacaatatttgtgacagagccgattgggcccgtaggaaatcaaaacatccaccattttatacagcccgtctcccctcactgtcatcagatgaacagctgggtatagcgtgcgagagtcgtgtgcgacgggtaattgtagtaaaatagcttagtagattcggaagggctatatgaaaagagaagaagtgaaaacacgctgcgtcagtaccgataaaagaggtcggcagctgaatgattaggacagagaacataccttgcccatggaggacttgatgtggagggatccaacgttctgccactgcttcttgagcaaagagacgaggaagttgatggaaagcatgacgttggcgaggacctggtcctcggtcatgtcacagtgtccgacggcaacaccgaggcagagaaccttcttcaactggaacttaatggtggccttaacctcgttgaccttaccctggaggtcgtcagcgtgggagacgggggtagggaactttccggccttggacaatccgggtccgagaagtcgggggatctgcttgatgagggcctcggaagccaagaaggtgttgtacttcttggcgagcttcttgaccaacttcttgttcttgttgagcttcttcaagtcatcaacggacatgtactcaagctcgatctgcttggccctgtcaatgtcagcggcatcagccaagatgcagatggacattcggggtcggggaatgtagggaagcttgacggttccagagaatctacccaagaaaaacaagaaaagtaagtggactgtccctatatggcaaagagaacgtgagacgaaccgcttatctctctgaggatcgtagttcttaagaccgatctggagctcgatggtctcaacgaagttcctcttcttaccgtcctcaagggaggaggcagaaagaagggagttaacgaatcctcgcacgctggaagctagatagtttagtcggaacaagacgacatatcaggacccttaaatcgctcgagtccacctctagtatcgctttcgattaacaactcatcgagaaaattcgggtagtaatacgaaccagacaacttggacatttctgcagaagtaaagcaacgggtgataggtcagtgtgataaacatccctcgccttatacatgctctgctcattcaaaaagcagattgcaaaatactcacttgctgatggagaacaaaaaggttagcagaacagagaaaagaagaaaaacgactcgcaaaaagtcttgaattttttcgcccacaggcgcagcggggcgtgacggaatttcaagtttaggctcggtccgaaaatctaggccatatactcctgttcacgtcacgtgcattgagacactattcaacctgagaatgaatcttgccaggaatacgatcatctctgttatcaccatcattcatattcaaactccttggaaagccatgacgcttttctcgagatggttgaactccaaatgataggcacaatatgtttacaaggttgaaaatctaaccatgaagctagaaataaaattcaaaaagagaaaagatagaccttgagaaggaaagactgctgtaatcgggaggggatcggttcaagcgaagaggctaaaacaacttcgatcaaggaaaggaagacataggatacagatttatctatcctctcatttcttgaacaaaatggttgcgtcagctggtagctcagaaggacagacaaaactttgtttgctattttcttcaggccatttttaaagtgttttgagctctgtctttagtgaagcatgaagtggcctaaacagaggcttgatgttaaatttgagatcagccgtatatccgtataactatcgcagaggtgaattgtctgcttcgatcttggaattgcggcaatttatgcagtgtgcttgactaggatagaatctacagtaagatctatagtgggaactggaacataactcatggagaaatttgagatgaattagcaggagctgtctgtaggtgctcaggcgcatcaggagctaagagaggccataaaagatagagtggaaacaggatgccgaccatatcacaaacgaatgagttcggtgacgataccacagaggataacccaaggtcctgttctggaaactctttcatacgtataaccaaagcatggtatctatttagtcttacacatttacaattcggatagactacaaaaaatattgcacggcctatggagaaacagaccaaaacacacatagacaagagtcaatatatagaaaagtagaaaagcgttagataaatacagaggaggtcactgaccttgcccatctgcgctgctgcttgattcggaccatccctacggaaataagagcaaccgagtttcaatcatacgaccggtcaatcatgagagttcaatataggtcaaagactcttctacagaatatccatgaagcaaatatcacaactcacgtttcattttctggtgcagcagagaaactaccggagaagatattcaaccaaaagctcaatattatcaatcaagctgacgataaatactgttcaagatctcaattagagtatatgtattgtgttacgtacatgttccaatgtttttgtccgtctggtccaacctccagaatactggcttggttgccacatcgataacaatactgccccgacaaagtacgatgattttagacaaagagatggttactcaagtttgatgaatacagtacttcaagaccagaccgccaaagaatatgagaagactcacattgggcgcactccatactgtgctcaattgtttgtcgaacagttcggaatacccatccatacagagctggtgagctcgaagcatatgatcaaacttattcaagttcaagaacttttttacaacctgagacccaaacgtgtaaccagcgcctctgatgatattcataccaagcccatgaccagacaatacagaaggcaccagaatcagcaaagtctcgaaatgaaggacagcagaagaagaagaactttacctaggtgatattgcaaactcctccttgtctgcatccggatcagaccataccaggtcggccatgggaccttcatgcggtatttctattgcattgaaacccaagtatatgtgagtcaaaccatctatttgaagcatcacagaaaagtcatctacaaacctctaaaacgatcgatgatcttgatttgatcaattccatgtacacttggtgacagccctgaagatacgtcagacaaagaaaacaggcccacagtaagatgaacgcaatccaaatatgagcatcagacaccggataacattagcgcagaggaagataatattgatgggcacggacctccatgcacacagaatatccgatcgtctataactacacttaacgtcaagaaatcgaacatatcggtgaaatattgccaaactagaggtgatccgtatttgcgttggcactcagtatagaatccgtatgtctaatgataacaagccgggcccagattgccaagaaatcagtacgtttcgtaatcggacacaaaggagggacgcgtgagcacaaaagatatccacctgggtgacagctcttgattcatggttcccccgaatgagctgcactcgttccggatatcgaagtttcagacatgtcaagagagatattgtctctacactgaataacccacggtcaacatagtcgcctgaagtgccggtcatacgggtggacaaaaacagttgagctcggtccgtgaacaagatcaaagttgaccaggtaagcgtacctagaaagagatagttcgtgtcgggcacgaagccacctatacggaagatctcgaccaaatcataaaattgcctgttgtttgaacccatggtcacaatagtttgagttagaacttgaccgcgatttacgttgaaggcactcagagtcatgcactgcgaacaacggcaagatcctacgatatcacagacagaagaaagagttagagagaagaaactcacccatggatatcacccactaccgtcaccggagagctcacatgaacgacattgctttctctcatcaggacctctttggtcttctcgcaaatctctctgagaagagcttcacccaagagtcgtttttgaagtaatttggagatacaatcatcaatgtcaaacacacccatgcctagtacggaatgatccactggatcgttatgagagaggaagatgtggtggaagggtatgagtgaggcgatcaacagatatatcggcgtcgttgtcttaaatccgaaacacaaaaatctaaagaaacccaatgagccttgaagaggctagaggaggatgaatgatggaaatgctgagctttcactcccctttcggtcacctccaccgggcgttgatcagtttcttgatctgattatagaaaattgtaattggatcgcgtcgattttctagtatatcgtccttgattttcattacgaaagtcttgaacattctgtagtggacatggcgttgtttctgattgtgtggcaagtctcacacatggtttccgggctgtgtgtcaaaatcgcaccaagccctggccaccaccactttgagccctcttactgccaacacgctcagttgacctctacaaattatctttctaccacacaaccatggctcaaaactcttctaacaagcttgcatctgcctctgggtctggaggtcgaaaaaccaagtcgaccacaaagaagggagccagatcggttcctcccaagaagcatactgctgtcgtgagcagaactatgcagaaggtaagccactccttctcatgttcggttcatagtccgcattttaactatactgatcagaggccttcatccgcttgtacggttctctatccatcagaatctgagtgcaaagatcaataactctattgagcgacagatggtgaacgctgcctctggtggaaagctcacaatcatgaagggtaatggagaccctaccgacaaggccaagtaagttctcggtccttatcaaagttctcattaaatccgaacgaatgtgagaaagaaacttaacttattcttctctaatctcgatcttccacatctcatagggatacgaagggtgtctcgaagcctacgaagtctggtctgaagttcgataagcccaaccctcacgaccgagccaacatctaaacgaaagacgcgtttccttcttcgcttctatatctaccaattcactgtaacgggtaggaatagattcaggccaagttggtcgttctgtatattatgtaactataccggggggatgcctgtttggtagatcgaacagaaagaatatcgttattgtaagtattgcacgcatctcaagctcttttatccctctttactcttttcatatatcttgattgattgtttttttgtttcgcttgtgtggtgttctattatgaccatatattgttctggctcaatagatacatgcgctccagaatatatacattttccgttaagcttttcattttactttatttcggagatacatacagttcagtttttcatagagcgacatcatagagactgttatgcgttagcttttagtttctgttctgaactatggatttgcgagaatcaaaatcacgagaaagaagaaagtggaaaggacaagaagaaaagaatcgaagtgactctgtcgatgttagggttaacgctttcgggctatacccgactcactaacctcaagagcgtttgttgagtccaccatcttcaccaagtcttcggtgcttccataggctttatcacaatgtcgaccgcccgaaagcgtaccgagtggaatcgtgatttgatcgctcaatcaatccttcaaggccaacttttgactgtctaccatgacaaggttctcagattaaactcctggcttgggcaccatcccggtggagagctcgctttactccattttgttggtgcgttatttcgaaaattccatcaggttcaccgatctagatcttgactctatctaagttttgttgaccaaattgacgctgaatcttcattttctcttgtcatcgatgggatcaacttataggaagagacgcaacggatgagattgtcagtagtctcaacctcaatggctaagccggtgtcactactcaatctgacagatgccccttcgtcttcatctaaaacacactgttttttttttcaggaggcatatcattctgaagaaactcttagcgaaaagattgatcgatattgtgtcggggtgctggctccctccgagaaaaaagtacgactgcttcttacggaacgagagctgttcaaagatcttgtatgctaatggagtctgaatgtccgaaacaatcggatagtccttcgtatctttgatccctccgatcatgcttggattcacattatctaaatcttcatcaggagattgcacctgggttcctctcggtggatctatccgggctctctctgataatcgtgcacttcaaacaccctccattagctcggcaacgccttgcgacacaccaccagtatctgaaccagacagtaagccgatatcagacacgcttcaaattcaagatctgtatcccccttctgttccggctcctctgtccactctcgaacttcagcaagcgcatacaaagtcttaccgtcaacttcacaagaaggttcgagacgccgggttgtataaatctccaggtttcttgtccggttatggtggtgattgtgttaggtacattttattggccgtgactgccatatgggcttggaacaaaggcatccaagctgaggctgggtggacgagaaaaggctggctaagtctcgcggcagtatctttggggctgttctggcagtacgtatatcttttcctctcatatagtctttcgcgcattacctgtcttactgttgaagatatgtacgctgaaatcagttgaacctcctttgctcattcttcatgtcaaaagacaattgacatttgttgctcatgatgcaggtcatacatctatcctcggcaacggtgattatatacaaaaccggcttttaggaacatttgtagccaactggattggtgggctgagtctaggatggtggtgtgacgttcgtcctttcattcaattcggactgtggcaatagattatacactctgctgactagctgactagctcacttgcaaaatttcatcagaaccataacattcaccacttggtcaccaatcatccagaacatgaccctgacatccaacatcttccttttttcgctatttctcccatcttcttcgattcgattttctcgacttactacaatgctcgtaaaccgctagacaaatttgcgcagtttgtcatcccgtttcaacataaaacgtattacgttgtcctcctcctagccagattcaatctttatgtgctctcgtacgcttggctggctaagtgtgcgctaggtgcaggcggacggaagaaggaaagatggtttaatttcgaagtgatgggtctgatcatattctgggcctggtttgggtatggcgtcttgggctcattggatgggaagggagagagaacactcttcctgctgataagccatgtcatggcggccccggttcatgttcaggttcgttgtatcaactcatctacttgtgtgtttctctacggtccgctatacagagaagaaacattgacaagtgagctaaaaccggtcctcctcatctttcgcggaatatcattctttagattgtactctctcacttttctcgatcgactgaagatctcggcgttctagaatcattcgcacaccgtcaactccgaacgacgatggatgtgcgtctgttctctactattcttccttcttcttttctattcggaaattttgatctgactggtctcacaccacttcttttgaatatcaaaaatcaaaaaggtgatctgccctccatcaatcgagtttatccatggcggtctcgacaaacaggtgactcaccatctgttccctcggttaccgagacataaccttcggcaagcttctcttctcgtcaaagagttctgcgaggaacagcaaatcgagtttgcagagtggacgtttgtcgaaggcaataaacaagtccttggtgtggtaagtctttacactcttttattcttcagaatgtatcgttaattaagcaaagctggaagagagatgttgaccgtctccttattcaatggtaacaaataaatcagcttcgggatgttgccgaccaattgaaattcatcggcaaggttgctcaagccgaagctaaaggagaactcagccaagggaaataagaaagaattccaatccttgtctgtttcttctagatttctttttgtttttgcttcttatcgcacatatatacgtgtcttcaaagcattgggattgccccctattcatacgctctttcctcacttcaattgatttcagctggctaaatcaactattaaatcaagagctaccaactcaggatctatcaaaataagggcacggacttcctctttatccatctttgccaaatcttttgcgactggattgattctggttctatttcttcatattgtctggttttcgaggaaagtaaatagatatagatggaaacttgtgaaacaaaaactttctttacatatatgagatcatatgagtcgcttctgggagaacgatgaatgaaggagagtcgtcttccgtggtcatcttgcgttgtaggctgacgttcaagctcattgtgctcaagagaaccttcagaatgcgttgtcacgtgacgtttttgttcagtaatcccatctagcgacgttttcatctatgacaagcctttgtctcgagcgcaatctcaccttccggtgcctatggaagtgcttgagtttgtgcccatccgtgtacttacatgtgtactgatcagagttgagacggctgaatccaagctaacaaggatcaagctaacccgccaaggatcaagatacatgtcactgacagcccagcctgtcgtggcaatgtgcagcatgtaacatacgagctcggccaagttcgatacacaggaacgattcagggacggctgccgctcctagtcgttcaggacgctatcctctctgtttccattcccgctcctgtcctcgttcctgccctcttcctccccatgctgcatcccatcgcgctctctctatccttcacaccgacgaacggcctggcttgcttcgtgccagacgaggagagctgtgatctgcgttctgtgtcctgtagtctgtactatgtgctctgtgctatgggtcatcgttgatgccaggctgtactctccgaatagacgctcgatatcgagctagtcagttggcccgcctattcgcccacatacctgctccctctcactagcccgctctcgctaactctcaaccgactgactgaccgttcccgtcgacaccgtcgtcaggcgggatgttctgtgagcactctacccgcctgctagcactgcgacttgccttgttgatccgtatggtcagccgaagtatttctgctggggtataaagagcactatgctatctttgtttcgtgttgtttcttgatccgcgtttgttttctctgttctgtgttgtctttctatccaaagcaaacgccaactcatctacggacgaccgatacccaatcacctgttcaccgcttgcccttctcttcttcatccttagccctgttcttaagcaacgtttccacctgtataccatacacatatataacccacttcatatttcgaactgtttaaaaatccgtcgtctatcacttgtctcccggctcacgctatttgaacgacacttaccgttcgctcatcatgataaacaccaacccttctacttgcgttgaacgagtgtcctgcccttcgactccaccccgcgtccttcatacggccaaagttgccctccatctcaagtatgcttccatggcgacttcggccctgcctatgcccatcaccgcaaagaagacactcggccgaacacctggaaccgccgctaccaagatatccggttctcgacaacccagcaggataccgaaaagggttcccgtcaaaaagaaagcacatgtcagccattcacccatcgcagttacttcggcacgatccctcgggcggcactcagtttcaagatcttctcctttgcggaaagaggtctcgctcttcgagttggctttcgataccgagccagcttcctttcatgaccttcacatcctgcccactgccgtaaacactccaatcgccaaggattgtcctgcaatctcaatcggctctgcgcaacttctccaatttagcgttgagcgccctctggtttcaaactttggccccccgtcgatcagtaaatcctcctggtcaaataagtccgatatacctccgatggatctgaaggagaacactgagcatttagaggtgcgctttccctctttctacgatcgtttggctcgtcttttattgcgtagatcctgtcgttactttaggacagcattttcttaacacttccctctttctgccttccttctcctcatacatcttctgttccttctcgaccgatagtcttctaacgaagatattatccacgagctgctcccaacactgtcctctttcctccctgatggtccgtccagacgaggttcacccagaaaaaagcttcttttctgggtccggtcacattcccgaggtctctctgaatttttgtccaagcgctcgttgcgatcctccaaagaagaacactgagaagacatgtgaatgaaggttcgctagatgtgaatatatctggctaacttttgatatcccataattacactctcttgcttccgtttcgatcatttcggttcctccgcccctttgcctgtttatcttcctatcttcctctcagtctgttttgttgaatttatttcttggtctttttcttggctagttacgtttctcacccgtccctcctctttgcctttctccttcttgtctcatctcatttcttgttgcgtcttcatttctctctctttcattcatataccccctatccatcgttagcagtatacccccgatttcaatcggctttgctatcgtttctgtctttgtcattgtcctcatgtcaatatcagtatcaacatacacaaagccttatagaatgcttttaagacatacaagctgatgcgagaagctcacgccaagcgctgtcaattaccgacttttttaatccaatctttcttgaataagtaatcaacgtgtgatggaagtgacattctgtgtgcggatcctagaggaaagagtgagaagaaatgatttaaacggctccagaagtagaagccaagatggaaacgagaatgaatgaggaagaagaaaataaaatcatggaagcaagagaggaaagagggatgaagagtgaaaactatcacatgaaaacatatatagattgaggtatactagacaaaggaagaacaaagacaccggtgataacaaggtgtaagagcgaacaaaacaaaaaggagaaagagcatcgttttttgtttcctgaagtggaaggttgagtttattcttttttttattttttggttaagattgctagaaatctactaacagaattctcaagtgagacccaaaacaatcaaggaaatcggcggaaggtgtctgtatggcactatctggtcggcaagagtttaggaa

SEQ ID NO: 1649 - DNA, 18005 bp, Xanthophyllomyces dendrorhous
gagatatatggggacgaacgacatgtgcgatgagagtacgcagaattgaggcaggagcagagtagagaaagagaagtagaaaccatcagaagtgggagtagataatatgacaacggatggaacgaagcaagacaagaagttcgacgagatgaattgtgaagtatgaaaagatatgaaaaggagatattggaaaaggagaatctggtgtccagaggaatcagaaaacaagaggtgtaaaaggaaaagtccgaaagagatggaaataaaaggaacacgctcaagatgattcttccttgatctctcctagagttcctctcaggtcgctcacccttctccctcttttcaaaccttcgaccacggcgcctccgtccaccgctccgctcgccacgccaccgcctctcgcatctaagatcctcaacgcctcttttacaccctctgcatcaatctcaagtctccgtcttttgtgtgcttgcgcctgtgcgacagcagccgatattgagtttgaggtcgagccagcagatggcgtgagcgaagtcgaacgaccgttaagataaggagaacttgtgtgcgggttaggggagacagaatctagtggcggaagagacgaagtgctaggtgctggggatggggatgtaaacgtctgcaatctacgagaacagacggctgcgaggagagagaggtcggcaaacgtagcgtttggatgagactgaaaggagcaaattcaagcgatgataagtcagaggtgcccgactgaacacagaaaagattgcctgcagattcagtgaacatgaacttactttgagctgtctccaaacatctgccgtagggacaccttgcttctcctgttcgattgggccgtgaggcactctgatctccgggccaccaagcatcaggacatccttgtccgacttctcggatgtcccgcattcgccttggtgacttccacaagcaccgggaaccccacagcagctgacttcgatcatctcgctcttcttctcctctttgacttgaattgctccgtccgctctgtccgcttcctcgatctcttcgtcttcgtccaatgtctcacagaatgcctttccgaatggatcgtcagcacatgcagcacagttcgagggatctcctgtacaactcggaagctcgaccacttcggttttgatgcctgatctatcgagtaagaccgctccgtctgaaacgaccgtacccgaagtgacggacacggaggttgcttcggtggaagaagaagtcgacgatgtaccagccacaatacccgaatcgatcgtccagatagatgtcgaagtcttcccctttggtttccgggcgatccgcagggccgaggtagtcgatgtatcaactccctcactaggctgcgaactactgttcggagaggacgaatccatatcgataaggagggagtccattcctgcgttaagccgttcacgttctttttgctcagcagcaatccgacagacacatgtatcgttctgggtgcagaagccacaagggacgatttggatctcggaggaagaggaggaagaacatgttgtcttgatcgtcttggtcgttgacgttgtgtttacatgacgaggtgttgaagagacggaggaaggagctgtagtcctcgtctgaccctcattgggaagagcggaaggttgagtgtggaaatggcccgtaggcaaagcttgtggcgacgactgggcggcgtagagcgacggggacaagaatgaaggagcttggagaggcggataggcataacgagggtgatatagttgagcttgctgctgctgctgcccaagtccgcttccgtttccatttgaagatgacgaatttgacgacaaagacgaaacggacgaggtcgaatgtccactcgtgtgctctggcttgtacgcgttcgtggagaccagaggagaggtttccgcactttcgggcgtgactggttcatccccaccgtcctcagtctcgggactctctcggtttctatctgacttatctgatcgttttcttttccccttaccctttccacctgtcatggatgacgtgctctctgattggggcgagtcagttgggtcacctccaagggacataaccagggatcgaagtcgagcattttcagatttgagtgtagtgttctcggccttaagcgctagagagactgtttggagagatatggccttctggacctcttgagcctcatctagttttaaatgtgaaaacgagagagagttgttagacacaaggagacacattggatgagtgtgctcatcgatttgactatctatatgaaatagtgcgaccaagtcccttttgcggaaacgatccacaagtaaagacatacattctttgatcttgttctctagctcttgaacatagtcttgttttctttctcgaaatgctattggaccaatccaaagttgatagatatcggtgtaggtgaatgaaccagggatcaagccgacaaccaccgagtcggtcattgtcatccgaaaaaaggataaggataaagacatatcaagagtttactttttgtcagtacatgatagggccatgatccgtatctttcaaatcaacaacgtatggagaaaaataagagagagagcgaacctctctgagcgtccctgttctgagcacctttgcccgtcggcttggcggcgggttccgatgcttttcgacctggccgaggacgaggtggaatcgtccactccttacttgcttttgcaaagactatggaagaaagtaagatagagaatttaggcagagatataaaacggatgaaatccatcgattgggtgtcaaacgaatgtaaaagatagacagtgagcaaactgttcagcagactgtatatctagcaccgttaagttcaaacgacggcaaggaaaaccccagaggaaaggagaggaaaactgactttttccacctgaagaggaagtatctctatctgaggctgagggtgccatgatatgagagcgagagtctgaacagaagtatgattcgatacaaagatgagagattgagagcaagagcaagctgtctagacaaccatgggatggatgggaatggataggaagagagcgtgtttgaaaaagaggccaatgagaagagtccgcaggcttacgcagcggatttatcagataactcgttgttttttaatattttatttttaatattttttacggtttaaaaagttccctttttttctcgtcattcttttcgttcattggatcagccagcagtcgttagcacgatgctgggtgtcgcaaagacagtacaagaaggcgaagagtacaaggcaggattccaacaagatagattcatacatcttcgacaaactagaaagagagcacagctttcattttctttctttacgcatcagtcacactaagcccggacacatcgggcatttctacaacgttcttcgccttgatcagcttggtgacctgcagagtaggggaagagaataactagtcagttggtaaacgattcacgttgccattaatccacacacggaaacacacgccggacatacctttccaatagcgatcgtcttgccttcctctcgaagggtgaatcgaccaagctgagcatagtccgtgaacttttcgatacagatcggctcggtagtctcaatcaatgcaatgatttgttgtcctgtggtcgagagaagagtttcgtaatatagtcataagacacaaaatcgaccgtctttcctaccttgagagcacagttaaactgaaacttaccaggcttggcaaaaggaggcggcttcttcgactttcgaccagtcttgggctcaaggtagtgaagcaaggactgtgagagaacatcaacggaatcataaacatcatttcatctgtccatccatccttcctttatgactcgacatgggaaaagacgcaagaaaactcacaatgatggtgacctcctcttggacagaatgagcgtggagaatgcacgagaatccagcagtgatgatgttcttggaatccatgatggccaactgggcctggaactgggttgctgtgttagcaggagcggcagggttgcagagtacaaaaccgggcgagacatcctcatccgtgatacccttgcatcggactcggatgttatctccacagtaagcagattcgagctcctcgttcgtctcgtcgtagaggtttgtcacttccactgacgtctgtcaaaccgaatgatcggtcatcagctaaaagtgctcacttcctcttcccattgagtactgggtgaatgtttagaacagaagaagctcaccctgttgggcatcaggatcaaagaatctccacggtaaatccgaccactttcaagctttccaacgagcatcgttcccaaatcgttgtacttctccgacactggcaacattaagggtccgttaacctttcggtcgggaacttgcatcttgtccaagaactgaagcaaagagacagaactgcaaaatccgattgttaattcgcagtttgacattgatctgtgatttacgaaaacacgcagacacgattgggaactatactcacgtgttccaggggcacacctccttggtgacctgctccttcatgttcgcaccagtgtaggcagacacaggaatgaacgttacgtcctttgggttaaagattcctttctttaagaacgaactgatctgacttttgataaaatcgaacctctcctgggaccactccaccgtagggtcatccatcttgttgacgacgacgatcaaccgactgacacctgccgtcttgacgagctgagcgtgctctcgggtctgcccacctttgtcgaaaccagcttcaaactctccctttcgggcggaaatgacctgagtggtttgaaaacaggtttaacgttgagacggagacatgcattgtgttttcagttcctactccatgagcgcataagaagcaagcacacgataggaaataaacataccaataaagcaacatcggcctgagcagcaccactgatcatgtgaggaacatacatcttgtgcccaggggcatcaaggatagtgtaccttcgaccagtcgtttcaaagtaggctctaccaacctcaacggtctttccctttgctctctcctgaggagtcgagtccaaagcccaggaaagataccaagactctcgaccggcctccttggcctccttctcaaacttctcaagcgttcgcttgtcaaccataccagtcaagtgaagtaactgaccacccatcgtggactttccagcatcgacgtgaccgatgaagacaatgttgagatgctccttggctagataagtccaacacaaagcccataagcgcaaacgcgacataagagaagagtagatgagcgaacggtcgaaaaggtgatcaaagatatggcatatagcccacacgcaccgttctcatccacggtctttccgccatacaagtcagtcaacgtgtccttcgccaaaagcttctcagcctcggccaacaccgcgtcggacgaagtttttgcgatctctctcgtgaagttgttgattggcttggccgctgaggcggcagccttcccctcctcgacaacagaagatgccggggtagtagctcccgaagcaggggcagacaccgcgacaggggtagcggccgttttaggagtagacgaaaccttaggagtcgaagcagctggggtagcagtcttggaagctgcagcacttccaccgccgagagagacgaccttggccgccggcttagcgccaccgagtgagagcgtaggagccttggtaggtgcctcggtagcctccttccgaacaaacggaacagttggtttagatccgcctagagagatggtcttgggaggaagggaagaaagctgctccgcggcagaaggagcggaaggctgagcagaagacggagccgacgaaggaggctggttggcgtatcgaggctggataggaggagggaatccgccagaagactgagcgggaggagcgttgtaagtgttttgactgtagcctcctccataacctccctgctggtatcctccttggtacccgccctgctggtagcccccaccgtatccaccctgctgaggatatcctccggactgagcgtaagcagctgccgggttgtaaggttgctgataagagttattgtatccctgctgagggtatccaccgccaccgggttgctgttgctgtccacctggctgctgctgctgctgttgagaccgaggaacaaaggcctgtccgggaacgaatgcctgtccaggaacaaagttgtacgctccagggttaaatccggacatgactagctagagactgaaagaaacggttgagatgatgatggtcaaaatagaatgaaaagaaggagaaaaaagaatgaaattgttgtcgccctcatcagcaacttaagagaccttagataagagcgttggataagtcccgtctaattcaaatacttgactcgtctctctctattacaccacactgataaagaaccacataagacgacagatgatgtgtcaaagggttcgaagagggaggagcttcctgagatcattctatcgatttaccagcaaatgttccagttatatccctttgttccttcccaattcttagccaatttacttcgccgacccccattattggtcttggtcttcggactcctgcgtctccatgctttaacgagaaatcttctcgggcccttcgttcatccagtcgggctttgagagcgagattgacgacgtgcgcttcatctactcgtttactcttccacacagtcagtgataagagatcgtgaatcccttccggtggcaagttccacaatgctctgtcgaaggtcttgttgtttggatccttgggtagattttttgggagctgaacatcatcaacgaggaggagaatacagtctcgatcccagacgagagagtcaaaaatgactttgtacgatggactggcagggtatggaatcatgcaaagatatctcgaccataaggcatcgatcggacgaggtgaacttttagccaaagagcgttgagttcgtgatggacgtgaagagagagaacaaggtggcttcgataaggtttcgggcgggagaaaagaataggaagcagtttcggtagatacttgcgtggttggagggatcttggactgaaggtggtgtagtaatattatacgaggttgggtcgcaagcctgttctcattggcgagccgtaaaactctttgaaggataccttcaagattcctcaattgaatgtcatgcagcgtttcacaaggttttttgttcagccgtttgatagaaggcgagacctgcctcgccggagatgatgatgataatgacggaggagagccgaacagctgaggatactgcaccatgtcatacgcagggcgagatgcacagacggataggtcgtcgagtgcgcgctggacgatgttttggataagcacgaccaagttcgtttgaagccagatagcaaagtactcaatcggtggtagcaaagctcgtcgtctgctatgagttgtagacaatggcttcgtcgattttgacatgtgccgatcgatgaactccctctattttggaatttcaagtgatatctttatcagtcgtctgacatctcagcaacgagaaagagaatatataaatgtacctggctgagcggagcattacagatcttttctatcaacaacatgtcatccctcctcttgagtttgtcaaatcgaagtctctgatcgagaatcagacgggaaatccgttcttgtgatgatgaaggccgtgatggtattggtgacttgtctttcagcggtctcggcttttctagatcaattcaaccaaaaaaaatcatgtctagttaagcttgatagggataagccggttacgatacaatttgcataggccaccttaccatgatgaggtagatcaggtcgtatcggaggaatcttctttctacttcttcttggtttcttaagcctgagcgactctttccggagcagatggcaggtcagaacgggtgacatcgcagggccattgatccaacacggtcaaatcaaaagaaagctcacgctttttgtgaaggctctatcgaggtggtcatgttgcaaacagagctactcatgagacgctgtggggtcgacagtcgtcggatcgccattgaacgggtatacatatatcgcgtggtgcatagctgatcgatgcaaactttagaggaagccatacggcagatacagtttgaagggctgactcaactccagtcgtctgcgatgaacctgtactcggtgtgattcctctccttctcgagctgatgatggttagaggtatgagcaaggtaaacatgaattagcaatctcgcaggtattttctccgacccactatcgaaatcaccaacaaccatcatcgtcatcagccgttcactctcgtcttgttgatcgatagatacatcccataagactcatcttcgtcttgtttcaactctgcatagaatccaataggttgatatgtctactccataccgccctccactctcctatgcccgtccgacgccaacgcctctcacctcagcctcccctacaccatactctcttccttcggctcttctgtttcggcctccatcccagcaaaacaattcatccatccagtctccactttcacgcccaagcactcctaccggaaacaatatctactatcagcaaagctctgcggcttcttccgtcactcccggcaatgctggcggcagtttgaatggagctggagccggaccggcagggaccatgagtgctcagcagaggtactactcaagacctccgaatagcaacttacagagtcagccatcattaggcgtggccaacaagacatgggatcgaacaatacccagtcaaagaaagaaagtagagaaagaacagccgccaggtccattcaataacgcccgtatgtcatcacgcttgaatcaaggttgctctgcttgcgtaaatctgaactttgatattgggtttctaatcattccgtgtacagtgagagggatgatgtatgcattcggagatgacccagaccctgcgaacgacacagttgcagtgatggaagatcttctgggtcattttgttcaggagctcgtacgtgtattcaagaatatccctcttcgatgtcgtccttaaggtttggtgtgaatcttacatatctttccttctcaatgtataacgactgcaactggatcgaatagtgcgcactccctcctccgccccaagtgattgcgacgtctaccacaaacgcgcgctctcagaagattactttccaacatattcggggaaacctatcgtcccatcctttgtccgctccgcttctctctcgactagacgaactggccgtcctacagaacgacatcaaatctgctcgaaaagcgatggatccagcggcgaacttgtttaaactcggagggaataaccaaggaccgggtggatctggaggaggaataggaccggcgagtggaccaggtggtgatgcagaggatgaagaagatgaggaggaggaggaggatggggttggtggtatcatcggtggcaagagaaagagaccgtctggtgtcggatcggccaaaaggaaggacagttcgcttgcgggagacatcgggtgcaagaaaaagaaaaagaaaagcaagactggtatggctagtccgtaaacagagaacgtatatacgtagatttgtttagaagcttcgccgtttgtaatcatattaaatgttgtacaagactcttcaagttttcctttgtttttctacgtgaatcatactctattatcgtgacagatgagagaacgcgcccattttattgatcaagaataagaaacccgaaagacaagataatattttgaaggaatcgaaaagaaagaatgtagctcttttcaagcctcgatcaatctgcccttgctgtctgccttctcctctttctcaagacccaggaattccctcccaccgccgactctgtaccagtaatcagtccccaacccaagagcgatcaaccctcccaaccacttgttgctcgcaaacgtcttccagcaactacttctactgtccaaatcgaccgtccggatctgccatgtcagatgagcagccgaacccaaaacggagatcgcgtagaaaggagcggaacatgaagcgagtaaaccggtgtaggcgagtaaagagacaaatgtggcggacataatggagatgattgggatggtttgtttgccaaagaggagcgcggtagattttacggcaactttgacgtcgtcgagtttgtcctgttgaggcgtgggtatacaatccaccagttcgaggtgattcagtcaaatttaatcaccttgtatctgacgtaggccgtcttggagagaagaagggaacaacagtagacgaagaagaacagagacaaacctgatgagcgtagatggtatcatacatgatcgtataaatggaacccccaacatagagagggagagcaacggcccagtccacagagcctgccacagctgaccatcctagaagaataccccagttgaaggccactcctttgtcatgcgtaggtgtgagaaactttctcagtaactcttgatagacaaggaacgaagagagtagcaatgaaacgaggggtacgaaccgagtacggattgaggccagtaggtgattctcttcatgaacggataaatgcccaccaaaagcaaagacgacgcgccaaggtagatgctgaaagtataaagtaaagacgtcagacccaataccaaaccataaaggaatgtgttgagaggctcacctatacatgttgagttgagtgaggactcctaatccaacagaaagctgtagaccgaggaacgcagtagcttgaaacagattgacatcacctgctgctaacggtctaagtctggttcgtgctgtaagacaaaacagcccatcatccgcatcaaaaccaatttcaccatgatgaatgaaacatttttcggaaaggaattaaactcaccaacagctttgtcaatccgcatatcccacatatcgttgatcgtgcagcccgctcctctcattaccactgcgcctagtccgaacaaggcggtataaaataatggggtcgacactggtagttcgttcatcgtcgacgccaagatgattgaccaagctattggaacagtgaatcatcccaaccaggaaacggttaacacctctgggacgttctatctagagaatgttcagaattgatcagacgtacaacagggccagaagagcaaccaagatccgataggtttgtcgaccctggctaagtatagataaggtctcgttccaactggcatcttgtcaacccaggtctttggcggaggaggctcctcaactacctcggggatgacaactgaggacggactggataaactagaatagatccttttgagttggacaggaggaagagctaatcgattagctctgtaggacagagaagatcgaggcggaagcgaaagagctgtggacgatctagccaaggatgtaggaatagaccgagtagtgtgagagagaacatgtcgagtaggaagtcgaaacatggctagatattcctttgctccttctaatgaatttatgtgtgagtgcctccgatgaacaagacagaacacagaatagatatctatgtgagtgatcagggtaaggaaggtctccgatgacaccacgtaaagaagtcaaatagaagagaaaaaaaaagaaaggaattgagatattactaagtcagccgcatcagaataaacagttctctctttcatggccaagtccgacatgatcaatcatttgtcgagatcgtcaaaacatgcatatgcacacatatgtacacgccaggatttataaagaacctatataaacaaacgctgatagaggtagatgaagatagctttaaatgcgcacacttggctaccgtcgtaggctatcatgatgaacagatttagctgagagaccagacgaggagatgcagagataagagagaaaatggttatagagataaatcttcggaaagaagagatgatatgtggtacaaaaatgcaaagaaaccccagaagagaaaaaagagcgaagtgatatcgtggcacaaaggaaaaaaagtcgatgggtgaatgataaagatgaaagttagatgagcgcatggttatgcctcttcctcatcaccgtgtctccttcttccaactaaaggcacagcctcgtatccctcggtctgaccacttcttctatccccagacagtattctgagcttggtcaaaagaccaagaatcacagacctcgtttgagtcgagacgagagtggcagaatctagagtgcttgataaggtcggatcgtaatttgattgggtataggaagtgctgagaattgagcttgagggtcttctccatgactgttgatatgatcagaaaatatatgcttagtctctcatcaaacgctacatggtctaatgcgaacaatgacagaaaaagaactgaccttgagagtcaaactgccacatacgacactgacactactcatcgccatcgccgctgctgccaacattggatgaaggtgaaagccccaggggagaaagacacccatcgctaggggtatcatcaggaagttgtagacacaagcaaaaaccaggttggcctttcaagcgaaacacgaaagcagaaacaaagagtcagacgtctcagtcaaggctaagtctgtgacaagagaaaactaacgaaccttgattctccgcacgatagcgcgagccaagccgagagcagcgacgacgtcaagtaaatcactcttcatcagaaccacgtcggctgcctcaatggcaattgatgttccagatgagagagcaattccaactgaggcggctactaaggctggagagtcattgattccgtctccaacctatttgtttacgttcaagagatggcctgggtcaacatctggaaagagaaatcttcaaacaacacccatgaaaaaagactaaacagaccatggcgattcctttgaatgtgggtgattcggcaaccaaatccttaacaattctggctttccccttcggactgacctctgcccagacgtctgtctccacatccattccgagttctttagccactgcattagcagtcgtgatcgaatctcctgtgaccatcgatactctgatacccatctgtctaagcgcttggattgcctgtatactggagggcttcaggttgtcgagtaaagacacggccaagcaaggggccggactcgaggtgctatcaaagtttaatggtctggttgatgtggaagcaataagagacacgaagatcacagtttgtccaagagaggcatgggaggtggtgaactctctcagaactctaggcagctcagcctcggcctccacggacaagtcttctttggagtctggttgagcgagtctcaatcgagattgggcaggcgattcctgaacgaagcttgctttcccgatctttatgatatattcctccgaatttgccgacgaatgtttcaccttcgcttggacaccttgaccggtaaaagactgaaagtcgagaactgtgctgtccaatggattctgtccaagtgagcgaagcatattccgaccatgagtagagatagcgagggctaaaggatgctcggatcgagcttgagcagcagacacgagggaaagaatagttgagcgagggagcgaattgaatgacgagagataactcaagttatcttctccgaatccagcattaggagatggttccagatttgcctcatcttgctgttgtacttctccaccaacccagcaaaggcctccgacgctcaacttccccatagtgactgttccagtcttgtcaagcaatactctttcaactccaaccatatcctctagtgcttttccgcccttgatcaagatcccgtttttggcacctacgcccgtaccgaccatgacagccgtaggagttgccagcccaagtgcacacggacaagctaccacaacgactgagattgcaagcttcattgcggttgacaaataagttgaaccctccttttggaagatcatcggtaggttgtgtctatccatgaagacgcatgatatgagcatccaaccaacgaatgtggtgagtgataggctaaccaccataggtacaaataccccggcgactcgatctgcgaactcttggattggcgccttgctcgtttgggcatcttcgaccattctgacaatctgggcgagtgccgtatctgaaccagcccgtgtcacctcaatatcagcagtaccaagtccgttgacggtaccaccgatgacagcgtcgcctacttgtttagtagaatgcatggcttcaccagtgaccatgctttcatcaatggtcgtacttccgcgaattaacaatccatcggcgggaatcttctcgccggggagaatcttcacaatatcgccgacctgaactagttcggtagcaatctttttctcgatcgagcattccttgtcggtatagatggtggccgaggaaggagtaagggccatgagatccgtcaatgcggccgaggtctttcccttcgcgaaattctcgagataacgtccgaacgagacaaaggtgataagcatggtggacgtgtcaaagaacgtctgtggtggtgtctctggaggagttgattgtatgcaggcgaaaaagatagtcatggtagagtagacgaatgacgatgtcgtggcgatgacaacaagagtatccatcgtggaagatctttggtgagaatagacaaagttaatttccatctgacttatcccagattgtttggataagttggaatgaaatcaacttaccggtgcttaagggctttccatgcgttgatatagaatctctgtgcgagaaatatctggacagggatggtcaacatcaattcgacgagcgtattaaggaacaagcccctccagactctcatctgaacaaagtccttgacgctttgcccacacatcggtagaatcataccaaacacaaacacaggtacagcgaagaacagactagtcttgaatgttcgcttccattcggcaatctctcgagtcttctgtaaactatccatctgtgccgagttgataccgtcggaaaagataacagcatcgaaagatagcgattgaatggagtctaccaggtctctaatcttgattatcgacgtcgtgtacgacaaagtaagcgtggaaggtgaggatgggtccaaaaatccggctttgagaacaccaggtaggcttaacaaggcattggtgaccaaagcaaagtctgtaggtgtctttagaccataaagctggacctataagtaaaagccaccgtacaaagtccagtcagcgtgtacaattatgacaatcaggcaaacgaacatggagctttggcaaggcctccaggatgagctacacccatattgtaaaacttgaagataaacttacattttggatggaaacggtcgatggcgggagagctactgcgtcaaacccaatgtccgagatctcttctacaattttgtcatcgtcccatccggctccatcaggtccaacccaactaggatcatattcgacgatacccctctcggcaagaagggctactttgacagaaataatccctggaagcttaatcacgcaagattcgatggatgcaacgcatgctccacatgtcctgtgattgatttggttgagaaaaaggagtatatcaagaagttgaaataaatgttgggtcagcattgcatccaatgcacgtacgttcctctgcgccatgtagcagaccaatcgtgtaaatgcacggtacacgctccaccattcaatgtctaagggaaaaaaaaactgtctttctacgaaactttctgccacaaaaaagcgcagatacaacttacattccttcaatcttgagttccactctgcctaaaagagattgactctctttgctgcctcccacactagagtcatcctctgcatgatcctcgtcttctgccagtctcacctgcttgtttgatgaagctcgagggctgagtaagctgaaggccgagccggtcggctgatgtgtgtatggtgagctagaggaggaggtcagagacaaagaacggtttggagaaaggaagtttggtagtctattccgaggcaaggatgaaaggatggaggagagcaccatggctggatgtgatatgaatgttgtgggtgacggggtttcagttgtttatcaatgctcaaatctgataatatcaatagacaagaaaggcgacgcttcagaatcttaagaaaatcattaaaaatcgcagaaattttgggaaaattactgaaatattgaacaaaattcatctgaaactcatcacgctggtttttgagtgtggtttctgtccctgctagctcgtaggtcagatcatgtcccaaagctctctgcaagacaacacagtgatcacagcggtggtggtggcaatgatggcggtggcacaggtggtggtatgggtggcaggtagtgtcaggtagtggcaaacatgacgatgtcgaagacgacgacgacgacggacaaagccataccatcgctacagacagagtcatctacagacacaacaagccatgaggagcaaaaggaaagcgcgagaaaggacgaggatgtacatgatacacaagacacaacacagatcgcagagcacatagtacagactacaggacacagaacgcagatcacagctctcctcgtctggcacgaagcaagccaggccgttcgtcggtgtgaaggatagagagagcgcgatgggatgcagcatggggaggaagagggcaggaacgaggacaggagcgggaatggaaacagagaggatagcgtcctgaacgactaggagcggcaattgacatcgagacatgacgttgcccgcccgtccacccagtgccttgtctttcaccgtctggcacataggtcagcagcaactgcaactgcaacgactcgaacaagccgttgcgtgaagcttagataagctgtctgacagcagctcagctcatccctattcagcaaacgcaaagactgcagaaacagacactatcaaacgagtcaaaaggtgaatccaacgctcagactcagccttgtcatataagaaagacgtcgtcaagtagaggtgctgaaagcgccaagacgcgcagtcatcgtcaaagtagcgactcgtatctgtccatgagatggtaataaccctaacgacaaagagtcaaaccaacatgctcaatttggatattcacttctcggataaatctactgttgttccaatgcgtgaagtcctttgagagcaaaacaatcatattcatactctaatagtgaatcgggtacatatgatggtagtagatgcgctctcaatcatttctttgcctcctttggtaaacaagcatcatcaccactctcctcttagtcagctagctagctagctaaccgaacgcaggaatatacgtcatccgcgcagccaatcattcgttcgtttgaactaaaacaaccgaatcgggttttagcgattttctgatcgaatctgttataacaggaaattcgttccgacatgaatcttttctcttcctttttcccatcacatacactcttcgattcatcgttcacaccaagtaacacatatacaaatatatttatcatggccgacccttctggaaccgcagcgtgagttattcttctctatctcagcacacaactgcttccatcagctaactctctctccgtcttggcacgtatcatcagtacaactgagagtggagtcactggaacttccgctacccaaggacttggaggaggaacaacttctacttctggaggagatttcttggataaaggtgttgattatgctgccaccaaatctggacacacccagtcccacggtaccgtcgagaagatctctgatggtattaggtctggtttcaagaagatgaccggcaaggatggtatgtcttgaatctaaacaaattatgcatctgatcgctcactagctaactcttgtctctttttcgttcagtccctattgctgataagacttaccaatagaaccctccattccggattactacatctagaacgcttttatatgcctctttttttt

SEQ ID NO: 1650 - DNA, 5258 bp, Xanthophyllomyces dendrorhous
ctttataaacgatctgtatcccatgtcaagaacttgatttcgtttcaacatccgaatggaataaagaagaaagaccattatgtttgatcgtatgatccgcgatcatctcttcccatagaataagaggtcaagccttacgtaacatcttactcaaggatcctagacaattatcatatccacatcttcatctgagcgggtgccagcgaggaaacctctgatccagtctttgcaaaacaaaggctcgaccgttaagtcggttgtgttgaataacatcattcttgtttcacgtatgtgttttaaattactaagagagggaagaaaaaatagggcaaaaatgatattggatgggaagaaatgacaggagggagaaaaatagagacgagaaagaggagagatgggcgtgattgcctatgccgggtgtcaatgccagtgtttaagtatggagattcaacaagaaaatgggatgatgatgatgatgatgcaaaagtgaaaaaccaaaacctgcaaagaagaaagagacaactctcctagatcaatcccttctcctagcggacctcttcttctccctctcttcattctcctccacaccttccatcgatccaacgtctcttccgacaccaacagccttgactggccgtcttgagccctttctccttcctccgcctacggaacccgtgctggctatggttgtcgtgatatctcctacatcgtccatccctccactacctgcactcgcactcgccccactcgtccctaccaccatcggcccagcaccagtggcagccatcatagccgcatatcgtctcttcgaccctgtgggttctcgctctccggttgatcccccatttccgcccgcgcccacgcctacttgatgtgggatagatactccgctgaaaataccattggctgtgggtccactcatgctcacgatcccagctggagggctatcgactgtagaagacagtgcttcagaaaatgggtcggatggtaggccaaacgtgaaactcggtttcgacggaggaaataaaatcgggctcgccgcttttggtgaaggaaacgagcttgattgagcatccgtcaatgttgactctggagcgaatgccgttgtcgttgttgatgattgtggagccggcgggaaattagcaggggtcgttgatctggaagacagtgacagtgacgtcggtcgaggagcgagaggggaagaatggaccatggggttcagcgatgctgatggagcggagttggtatcgacggtgatagatgatgcttgacgttgcttaggaggaaaaacaggtgacaaagatgaagaagagataaaggaaggtgatgacgactgtggcagaggtttgttttgcagtgtctggaacggggggtgagtggaagaagtagagggtgtttcttcagatggacggacggaggatggtcgagtcggaggagggacagagaaagatgtccgatcagccaagttactggtcgacaacataggcctgtctgttttcccggcggatagccgagaggccggcagaaagttcgattgttgttcagatcgagcaggagcgacagaattgcagaaggctgacgaggaggatgaagaagaggcgataggttggtcgcctgccgatccggtcgaagaagaaccatcggatgtgtttacaggaccactagctggattagtaagcggtacaggcctcatgttgattggagcagaaccggtccgtttcattgaggacgaagcgatcaattgagtgaatcgattgttggcgctacccgaagacccactgggcgcaccgtttggatgagatcctgacttcgacatgacgccaggtccctggcttcccattctgtccccaaacgtttccctaggtttattggacgaattgtatgccgacccggctgctgctgctccgtccccaatatcatcctcattgacgccgtcctggtcttcttcctctaaccggattgtttcctgccttgcttccacccaatccattattcgaccgattgtcatctcgggtccaccaccaccgagagcaccatcgttggctgggtgagaggctgacaagccatgttgaatcatctgaagaacgtcggcgaggcatgtggagtaacctgcagagtatgcacgctgtcaagtttgttgatgaaagagcaggcagatgggaagaagtgtaagtgtgagggttaaaatcaaaatggaaggcctcgagcataagctcagagcgtactagagccgaacacaaacctttgaggttgacagcgaagatttatacaacagactgatgctcaaagcggcggctgttcatgagtcgaaattgaatcaatcgacatgaatcatagtcgagcaaaaatgtcaattcaaccacattcattgcattaggagaagaactcattgactgaattcagctatggagaaaccagcgtacccctaaacttttccatcagatccttctcggcccttgtgagctttgtggacgtctgaagagacgatgccaatgaggagaggtccatatttgtgtcctctatttatcggaagaaagggtgaaatcagaagcaaacaagagctgtatatgaatcctatgcttcagtgcagacgttgggagtagtgtcgaacgattgatagccaagtggctatgagaatgaatgtggtagagttgatgagagagaagaacaaagatagcagaatggagagaaagtgttcaaaaggagttgacaggggtttttcgagaaggcgtaacgaacgtaaccaggagactcgctcgaatgatgaccaacatctctcacacttgatccacctggtcgtaggatattatatatcggcagacaaagtgaaccagaagagggagtgggaagatcatacatggcatagaacaaatcgcagatcaagctgatacagaaagacgaccaaggagaagtgggctgaagaagaattctgatgtaaatgatagcttccatcgacgacgttcggaagtctctatgaaggcacgactatctattcctttctcgtgctctaacaacgactatcatgtataccgatagccttatgaaatcagcgagcatggatacacaccatctaacaggccgaggccgttctgagatggatcatatgaggagaggagtctatcagatagggtatccgcgctggtacttctggtcatcatgctatctcgcatcatcattgctttacttataagcagaccaagaataaacattcagatgcttcagaacccgacatgtgctttctggacactgtttgcgcgctcgaccatcgcctggcttcatctgtgtgcgaagcaatcatttgaacctgtcgttatcagttattcaagtttttttttcaaggacttcgctacccctatcatcatcttctttgtcactcctcctctatattttgtgagcgtgtctgtttcaagaccgatccgatgtacacgctttgtcacagatagatccagagctgctatgaagcttgacggatggtagcttgacgaatgaagaacatcacgataccggacttggttacaaacacgcattatcggtgcttcccgccgataaacaccattgacgtgctttctcgtttttcacttgccgaagatatatcaacgcacttatcgttcaattgagttatctatcttcttcttttggttttcttcacttttctcctactctcatcctcactctcatcctcactcatatcttaaatcacaaacacatacatccgggggtgtatgctcactagatcagttcaatcgttctttatcaatcgctcacattatcttcaaacgcgcgtctttcatagatcgtcaaacgcactaatgactatgacagctgaaaacaaggcgactgaggtcgaagtcaagaacccaagaatcaaagtctcttcttctcttaaagcaggaggatgcgagaagttggatgtctggtccattttctcgtacgtgttctgttcattcttctgtagactccctaccatcatctttgctctcccttttttctcgaatcgctcaaggatggcttgaaagttgcttgaaagcttatcgacctcgttcgcttatcaacctccccgttctctgcctgattctcgcttctctcatcgcaaatatatcagtccatcccagatgcccaaagatacgatcaacctcggccaaggggtgagcaccttcttgctcagatgctatcagcattgccttctgacattttgaccattctatctcgttatcaattcgatgatcgaacaaagttcatgtcatgggcccctcccgactttctcaagaaagcggccgaagacatcgtcgagaatgatgtgatggctcatcattactctcctgctcgaggtcgtccatccctcagacaggctatctccgaccattactcctctgatttccagcgccagctgaaccctgaaaccgaaatcctcgtcaccgccggcgcgaacgaaggcatgtacgccacgcttctcgcgtttctcaatcaaggagacgaagtcatttgcatcgaaccattctttgaccaatataccgcgagcatcatcttcaatggaggaaaaccggtgtacgtgccgttgcacccacccaaagagcaagcgaacgctgagtctggacctggtaaagtcagtcaaggatcggactggaccgtcgactttgatgaacttcggtaagttgttatcgtctctctcctcttgtgaggtactatcccgagtactaaacaagtttttttaatcgaaaccaaattatgtagtgcggccatcactccgaaaacgaaagtcttgatcatcaacacgccccacaaccctgtcggcaaggtattcactaggcaagagctcgagcagtttggtgcgctcgctaaagaattcaacttcctgatcctctcggacgaagtagttcgttcctctcgttctttcttgctcgttcctccttccttaaaacaagagtgctgacatctttttttcttttttgtatcatctcacgcgcttgaatagtatgattgtttgactttcgatgagaacgagcatgtgaggatagcaaacttgcccggaatgtgggaacgaactatcactgttggatcagccggaagtaagcttgcctcgttctctctttgtcttttcgtacggacctttttattcttcaacgtcggcttaccaattctgatgggacgttctatcaatgtgttgtttgataagagtcctttgctgcaaccggttggagaattggtaagcacatcttctcggatctttcgctcagctttgcattggtagagtcattctc

SEQ ID NO: 1651 - DNA, 2886 bp, Xanthophyllomyces dendrorhous
gcattggtagagtcattctctgatcgctgttgccctctctatttatcaggatggttgatcggtccggagcacttgattacaccggcgttggccgcttcaacccgaattatcttctgcgttaacggacctcttcgtctgtcttctcttctttccgatctctcgtgtatgctgattaccctcgtctgaactttctctttctctttgatatacacagaggaagcgactgccaaaggtttggctcttgcaaagacacacagatttttcgaaacccaacgggccgaatacgccgcgaggagaaaagtccttaccgatatcttcgatcagctaggtcttccgtacactatgccccaaggagcgtactttatcttggttgaccttggacggttcaagtggccggagaattatgttttcccggactatctcgaagagcgtggtcgagatttcaagtatgttgccttcctcttctgtctgctgttctatcgtctccttgtcttgtatgatttccgaccaagccagaattcatatgtgtgtttttcttttctttctcatttacccttacagagtgtgttggttccttggtcaagaactaggcgttgttgccatcccgccttcggagttttacactccggatcatgttcatatcggagagcgtttcgctaggttcgctttcgtgagtattcttttctagttcttcgtgtcttttgcttctactatctttcctcttcttcgcatactgacactgttcctgatcatgatgctgtctttgtatttaatagtgcaaggatatcgacacgctcaaagctgctggagttcgacttcagaagatcacccagtaccttcacgattgagatagatcactagcatctgtggtgttactaaactttcttgaacatacagttcccgtttgaattcttatgataaaatgtcgtactatgataactggctttggcgtactattgctgtagactctgatgtcgatacagaagggaagtggataataaccaagatgaacagaagcaaagatggatcgacagatagcggatttataactgtactgaaaagatactctaagctgtccggtcggctgccagcaattgctccagccatctggcttctttctccatgtcttccaaacttctcggaggtcgattttcatcggcgtccactttgatactacccgccttcttccttggccgatcttctccattggagcgggctagagattgatggtcgtccaggaggttatcttctgctagttctagcacgggatatacctcgtcattctccccgttgaaatccgttggcttccggggcaacacgtgtacgtgtacgtgtggaacggattgacctgctgctggaccatctctgttattcgccgtgtcgatttcatcgtataaagagaaagaaaagaaaagaaaaagaagagacagggaattagacgatcaatctccaagtacgtgcgcgcgagaaagaagtacacggagacatagcagtacatactgggtggagattgtcagtgcttctcctccataagcgcgttcaatcacggtcccgatcttttgaacggccagatagagatcggcaatctcctcggccgatagatcagccactcgaggaactactctgagaggacaaatcagaacgtctaggtagaacgatgggaagcatcggtaagttattgtgaatcagatgacacaatcgcaacaagagcagccaaagggtcgtatatagtcgacttacggccaggcaagattggcttcaggttgaccaaaccaaaagaaagtttcgatcggtaaaacacctgtgaggttacctgtattagatagaattgattgttatccatacgatggcgaatatgaaagataaagaaggagatagatactaggttagtccggatgaactaacaacgaattagaaaagacgtgccgaaagatgaagagctcaacttgaaggtagaaaagaaaatgtctgaaaccggcgacataggttctgtagtttccatgcaaggatgtgtgcgtgtatcaacgagagaaggagccttaagctgatcgttccctatccgatgtatctgagtatgtttgtatggtcaaagagatggagagacgacggagagaaaggaagagtcgggagtgacccggctgaggctgagatgagtctgtgtagacttggtatgagcctcacatcagcctcggactgaaatacccgacggagacttctatctccatcaaacagcatacgtccatcccgtccccttctcatccatagtcctcgtcctctctcctttctcttcccttcttgttccctctcttctgattcatactctgtactagacgcacagtcatacagaatcaagatacccatgtctagctctcaagataaggaggagcctatggacgacgttcccctcggagacgtgagattggccggggaagaaacgcctggtacacccgttaaggatgatgttcgagcgatggcacattcttcgtctctcgattcagccatcactcaatctaacgaatcaacatctatagacacttcggaacctgccgaaacacccaaatcgagtgaggtgaaccaactggagaaccctgttgaacaactttcatctgaatcagtcgagatcaaagacaacatagatgcgatggacccgatagtcttgaacgccaaggacgcgccttcaaaggaatcgtctgtttcgacaaccttttcaaaagctcctttgcctccttctccctctacttccgttcctccgtctcctccatcaaaatcatcggtcactcacgcaaacggttcatctaaagagacaacgcctgtggctgcgcccacgcccaaaccgctctcggccgttcaaaatcaagaatcaacccccccgaccccatctcgaac

SEQ ID NO: 1652 - DNA, 11053 bp, Xanthophyllomyces dendrorhous
atgcattcccaaaagagctctctttcaaccttgccatcaacctcgctctcttcgatccatctgctctccgccatgtcgaccatggccgcctctaaggacgccaagcgatctcaaccccttcagaaagcactggcaacagcactggatgccatcaagaagagtggcgagtcaggaggagcagtaccggttgaacaaagcgtcatcttagagcctctcaggctggcttgtgagactaagagcgcgatgctgcagagtactgcattggattgtatctccaagttggtttctcatggcttcttccatggggagaaagatgatggagatgtcgagcaggatgagtcaagtgacaagtccgagttacctacttcagcttctgcgtctcctgcgattcacttggctgacgagctgacgttaatcatcacgtcgacctacactgagtccacccctgacacggtagccctccagatcgtcaaatctctcttagcgctcgtcctgtcctcatcggtacctgttcatcactcatcactgctgaaagccgtcagaacggtgtacaacatcttcctcctgtcatctgatccaatcaatcagatggtcgcccagggaggccttactcagatggttcaccacgtttttggaaggatcaagattcctacggcaccaccagcttcgtgggtgtccaacggaggttctactggaagaagcacacccggtctaggcctctccagtaccgggtcgaggcggaaattggatcagccgaccgtagggctcggtatatcagagtctggcgtagaagcgaaagatagcaagatcgagaccccccagacatctgtcgacgatacaaaggagacgaacggagacaaggtcgtaacttcgtccccaactgtggtccaagtcgaaggaggactgaagtctcctgctggggagactcctaaaataacgttgttagtaatctcatcgcgtcgcgctgcttttcttctacagccttttggaaatgagtaaaatcgtgtgctgatcacttctatcaccgggtaatataacttaagatcgacgtactttccctccgattcgacagctgatttggattcgtcggcggcggtgaaccatattcttaattcagctggtaccgccacgccctcaggcgagcgacctagactgaactctgcgtctgcacctcctcaagcgtctgctgactcaagaggagagggagggggaggagaagaaggagatgaggatccatttccgcttacccgacaggagaggttcatcaaggatgcgtttttgattttcagggcgctttgcacattgacaatgaagccattagaaagagaagggtaaatcttgtttctttttcctctgctctaaacttaattgtagcaaagtccatcgaactaaatgagtacaacctgcgtttaatgccgtatcaaattctctccagggacctcaaaactcatgggatgcgatccaagcttctagcccttcatctgatcctcacgatcgttcagtcccatttggccctcttcgcttcaccttatgtcttcattccttcgtcctcagcgactcgatcaactttcgtgcagaccaccaaaaagtacctctgcttgagtctcatcagaaacgctacgagctcagtatcccaagtgtttgaactctgttccgaaatcttttggaacgtcctgaagggattgagaggaaagatgaagaaagagatcgaggtccttttgaacgaaattttcctttccattcttcagctacctaccttcacactcaagcaaaagtccactgttcttcatgtcttcctccggctagcccaagacccacaggcccttgtcgagatctacttgaactacgattgcgaccgaatggccatcttgaacgtatacgagcagctcatggagattatcgccaagattgccggtacccacttcgctccgccttctgctaaagaaaaggagcaagaactcaacggttctagtgttggaggtgtcggtcgaaatgaaggcggtcggacgcgtggaaccgagatggggccgatcatccctcccagtctcacaacgcatgcaatgagcacctctggtggaacaccttcatcatcatatcaaggccacggcccgtccgattcggtctctactctaagttcggccactggatcgacagtgactacgatgtcttcgtgggcgcatcttccggcggaggtcaagttgagaagacaagctttggaatgcttggtaactgttctgagatcgttagttcaatggggaacgagtgcatctatcacaaagatagtcgggtcgggtctgacggttgaaggcgagaacgcaggacgagagagtgaggacggagggagagacggaggagaagcactaggaggaaggcaattctcatcactgggagaaaagggggatgatccagagaccttcgagaacgcgaagcaaaggaagacgacattgatggaaggtattaaaaagttcaacttcaagccgaagaaggtattatttgttctccgaaatattctgctgtgatcgtaaatggcgcgcatgtgtacaatatctgaacggtgattaatattgtttttgttaacgaatttgaatcaacagggaatccaattcttgatcgagcaaggatttatccgtagcaaggctcctcaagatatcgctcgatttcttctacaggctgatgggctaagtaaagcgatgatcggggagtatatgggtgaagggtatgcatatgttttgtctttccgttactcttgttttgggactgattctcaatcctctctggccaatgttttggggaaatatagagatgaggagaacgtcgccatcatgcactgcttcgtcgatatgctggatttccgcaacatgaaatttgttgatgccgtccggacgttccttcagtctttccgtcttcctggagaatctcagaagatcgatcgatatgtgttgaagtttgccgagcgatacatcgccggcaatgcggtcactgaatttgccaatgctgatacagcatacattcttgcgttctccgtcattatgctcaatacggacgcgcacaacaagaacctcaaaggccgacgaatgacaaaagaagagtttctgcggaacaacagaggaatcaacgatggacaaaacctgcctgatgcattcttggaggatatcttcaacgagattcagacgaacgagatcaaaatgaaggacgaggttgaagtgcctcaagtcatggttgcgcctgggttggcaaacacattggccaacgttggaagggatatccagagggaggcatatgtgttgcagtctgaaggaatgtcgaaccggactgaggtgggacttgttttgtattgaccttttatattgtctctgttcgctgacagatacctttcttcaacatactatctaggctttgttcaagaccatgcttcgacaacaacggcaaggcggtcgtcaaaacgagcagtattatagtgcttcccacttggagcacgtccggcccatgtttgaagtcgcttggatgcctgtcttggcggccctctctggtcctattcaagaaactgacgaagtggatgtagtagatctttgccttgaaggtttcaagcatgccattcgagttgcttgtttcttcgacctggagatcccgagaaaagcatttgtcagcacgttgacgaagttcacgtatttgaataacctgggagagatgaaggcaaagaacgttgaggctattaagacgcttctggagatcgcggtaaccgagggaaactacttaaaatcatcttggagagacgtgttggtgtgtgtcagtcaactggaaaggatgcagcttatctcgaacggtattgataccccagacatcggtagaagacagtaagaattgtccaatcttgcatacctcttagacgttgatcgtttgtgcttatttgttcaaccttatctaatagatctttggcgaagaaagggtctcgtcggggacctggggaagacgtcgccagcgaaagtcgatcagctcaagtcactgtcgcggccgatatggtattttcctcaacgaagcatctttctggagtgagcaaaacatgtttcttaattacaaacacaatgtttggtgagctgatcaagttgcttctggtcgtttagtcggcgatcgtagagttcgtacaggctttgagcgaggtctcttgggaagagattcagtcttccagtgcttcccatcagcctaggttattcagtttacagaaattggttgagatctcgtattacaacatggctcgtatccgtttggagtggtcgggtatatggcagatccttggagagcatttcaaccaggtaaacttgaatcaaacgtgctcaatctcttgaggacatcatttgctaatctgctgtttctgcgggttgaatcaggtttgttgccacaacaacccgaatgtcagcttcttcgctctagatgctttacgtcagcttgctatgcgattcttggagaaagatgagctgtcacatttccaattccaaaaggactttttgaagccttttgagtacacgatgattcacaacaccaactcagatgctcgagatatggtcagtgttttgagctcgttatgagaatacctcaatgactggtatagctaatgtgtgtcttctttcttactcggatccacaggtcttgcaatgcttccaacagatgctacaggccagagtcgggaacatgcgatccggttggcgaacaatgtttggcgtcttttctgctgcctctcgagtcctcactggtatgaatcctaagtttccatttctgtgaaaagagacatgccttaactaacctgacgagattttcatgatcacaaactcaacagaacgtgtcgcaacttatgcatttgagctggttcagcgagtgaataaggagcatttctcccatgtcgttcgatacggcgcgtttgccgatttaactgtgtgcttgaccgacttttgcaaagtcagcaagttccagaagatatctcttcaggcagtggagatccttcgaggtgttgttcctgcaatgctttcatcctcggactgcgctctcagcacgcaagtggactactcagggtataacggagaaccaaaggccttggaagtaccgccaatcaatgacccgatggtcaagttctggttccctcttttatttgcgttctacgatgttgtgatgaacggcgaagatcttgaggtccgaagagtgtacgtaccattcaaatttcgcctcttcaacataattgaatgaacaaagtctgacttacagatctgtgttgccatacaccagagcacttgattctttgttcgatacactggccacccatggaaagaccttccggcctgatttctgggacagtgtctgccaacaggttctcttccccatcttcgccccacttcgtgctggacctatgcaggaggatatgagtttctgggtttcgactactatgcttacggctcttcgaaagttgattgacctgtacacattgttctttgagatcttggaacgattcctcgatccactgcttgagctcttgtgcttctgcattgaccaaggtaagaccttcattcattgaagatgatacgttcgagatttgctcgcaggctaaatttcaagcacaattgactcttctgttcttctatactcgtagaaaatgacacgttagctcgtataggaaccacctgtttccagcagctgttggaaagcaatgtgaagaaactcagtcctgcaaagtgggaaagaattgtctcggcctttgttcaactgttccagactactttggcacacatgttgtttgacccgaatcttcggtccgaaaacgaggtagccgattctccccaatacggtaagtttcgcatgcccttttggcagctcttactcacaactaaaattatattcatccttgccctatgagtatcagcctctaccccaacaactcctgagcaacaaacaacccagcagcaggatcaaataaccggaatctcagctaatgaccgacgtcgaatattccgccagatcattcggaaatgcgtgcttcagttgctcctaattgagacgacgcatgaactccttcagaacgatgaagtgtatcagacaatcccggctgtacaccttcttcgtttcttagaggttcttgatgatagttatcagtttgcccgaaagttcaatgccgataaagatctaagaatggctctttggaaagttggtacgtgctatttctcatctccgttgctgctatcgtattgagcttatacgcgatattttcatgttcactcatgtatctcgggaacataggtttcatgaaacagcttcctaatcttctcaaacaagaatcgagtagtgcttccacattggtcaacaacttgatcaggatgtacaacgactcgagaacagaccatcaagcctctagggaaggtgttttgattaagtttgttccgtgcgtagccttctctctctgtatgcaatacctaatttgaatattcactgagccagctccaaaatacacatacatgcagattgagtctggatattattcaagattttaatcaactagaaccagagactcaagcacgtcatattgctgcctggagccctgtggtttgcgagattcttcagggttactgctcctttgacgacgaaactgttcgtatcggctttcctctgttttcaacttactttcatgaaatcagataattcatcacatgacttatcacaaatatcatctctggttctgtaacagttcaatgcgaacctgtcggcactatatccgctagtcgctgaagttcttgcgcgagaaaatgctccagaagttagggagtcaatcagagctgtgttggtcaaggttggacgaacgaaaggaatttgttgattgaccacaaatggaagagcgaagcagaatgatcgtaaaacagacgacagaaatctggtctctgtttatttgctctcgaggttgaatgtttcgtcataaagtcgttaaagagatcatcggtcttatggatttttgttgttttgtctgtttgaatttagttctttttctttccttcatcttggtttctttttatctgccttacatgcttggctactccttcacttgatttttttttaaattgcgcatatgactttcctttcacgaacatgttgattcacatccttcacaacttgttcctcgaaggtatcgtgccttacaaaacgcgcaaggtctatcatcttgtaataaaatgagaggaaagcgatatcattcatcgctaccgatggtctattctgctcgatgattcaacattttgcattgacttttgcagttgatgccttgttcggacgcacagcctcgtaagttgtgttaaaaacccaatcccctattgatatttccccaagaaatcagagcgtttagtacaggctaaaatgtgaagtctgcttgaattctattgtatgtacttacaaaatttggatgtcaccccgaaccctaattctgtatatcccagtgcggggtgatacagcaaaagatgatagtgtcaggttacagacaccgatacatcggtaggtcatttacatctgagggacgaaccataatttttataatgatgttcaagatgatactttcgttgtcggtcaaagtagccagtcatctgtatatgatgagatctatagagatcaatgtcaacacaaatcaggttgttttgagcattgcattttaccatttatggacagctagtgaggctcccaagagaatgtatgaaagacagaactcacgcatagtggaagcaatcatagcagacatctaatttatcgatacccagaaggaagaaacagtatcgtcatgtcttatccttgagtacaaccgctcatgaaggaaagaatgccaaaactaacagccaaagaaagcgccggcgatgattccccaagcgcctgctccgtctccccaagcgatgatcgtatgagcaagtgttgtcattgggagctgaagagtgaagaaccttcgtatttgaacaagaccaagatcagcatacccgtcatctttttgtctttagagccagaaggaagtgaacgaacatcacaggaggcataactaatcgatatgggtccatcctttatggacaccaattcaaagacaatatgagagagagaggatgagcaacacatatatcatgaatcagaatgagcaaagtagtgttgactatccgagtagggaagcgaagtgagatcagaaagatcgacgaacgggaggtagtgatgtacgccatgcatgaggaaatggatagtaaacgccttagagtttgatggcagaagttcgtccaaatggaaaaggacttccgaaagaagtgggatgaaagatttagtctgtgatgcaggtagttcgaattacgtagaaagagaaagtagatgctcacatcgatgaaacacgtattccaacaaagtccagattactccacctagtcccaggcagatcgtcgatttattcaatgcgcgatcacttacgtgaggcgctgccacgcgtccagtgtcacgcaagtcatcataagcgttgtcgaagatagatcgggcggtaagatgaagatgaggatttgaaaattgaactgccgagacataggctaggaacattgctatgggtagccagatcagagggacgatgaaccagtacgtctttgtgaagacctatttcagaaactttgcgcgtcagaattgaatccgacaagatgatacgtctttttcttaaatcgcatattgaagaaactgtaactgacttcgagataagctggtccaaagagcaaagcagaacgaggaagatggcgcggttgatgaacttgagatagatagaatgccttgctggatgatcaacgccaaacatcgatatatctgatgagccaggaatggagaagagcaatggcgaagttcactgcaaaattcaagaaagacgaacctcatcttggcgttccaaagttgtggaagtaaagctttattgaggtctaagaattttgattgtttgaagtcatgagccacatcggtatcctctggcacaaacccatcaggtgccacccagtcttgagtccgacgcatgacaagtccagaggaagagagagaatgaatcatctgatgtcaaatgaagagaagagaaatcagagtcgctcaccaggatcaacggttgtctgaagatcttccatcatctcccaagccgcctcagagtgttcatgcccaccgctggctctcatcgcctccgtcacatcctgtccttccaaagccttaatacactccgctcctccaggatggtatgccaagaaacttgaaatggagaggagcggttagcgctgaacaatgatcaacgatgttgcgaatgtatagtagagtagagtcgttctaaccttgagacgtcgtatcgttttccgttgtggtgtaccaacagagcgggcattgcaaatgtcgaattttctttttttgtggttatattactgttgttgtcgaacttcggatgagagtaagagtatacacaacattggttgaagaaaggcagcttccgtttgaggtaaggtgggaattaagaagaatgtataatgacaacagaccgaaggtatcagaagactgacgaatgtcaagtggaacggaggaaggctctcgggaaaagttgctgatcctctattctgatacggacataaagaccaccgtcagttgatggtttagtaaatcgatgatggtcacacatgtgtatgtccatgaaatgaatgatcgaaggtctatgtcgaggctttcgagagcttagtgttgggattaattcttttaagaagtattagacgaaacaagacagtttgaacggggaaaaggggtaattctgtttcagctggtatctgatatcgtaatcgtcatatctgtatcggccgaatcgtttttctttctgtacttctttctggatcctataccggttttcaactgttccgatcctacgtttcattcatggacaggtttgaagcctttcagtttctttcgaatctctgaacgatagatgaatgtatatatctcttttatgagacaaaagtgttgagagggctggtgatattaaaatctctcaaggtcttttgaatccgggaggaaagacctgccgagcgttgatgtttatcctgggagaccaatccatactagtcttcagcctatggaagagcacattgacacgatatttagttttccctctcttacctagttgtctccatataacgacccagatcttcgtcccatgatgggctcacttggtcttctggcaaggaaggttttagatgtgcaggaagtgtgtcatctagtatcctcggaacacctgatattgcgaaagtaaaatcaagcattctctatttcaactgaccgtttcttgtcaagatgctagaagcaatgagaaacgaaccatgatacgctcttctcccgtgtccgctgagaacgacaacgtcacctgaacgaagcagtattggcaaaggaggggtgtctctggaagacgttcctaatagaaatactgcacttagacctaaactgtagagagaaataagagaagagaaagagttagtagaccgtcttgagaattgagatattaaccagtgatgggtgctgatgaactgacgaaaccgacacaagaggtcgatgagcgtccagttctgagcgatctacatgagccatcaatgtatcctgaattaaatagacaacaaaagatgtatcagaatcatgcacatcgcccatcattcttagacgtagacaacttacatcgggctggtaaaaatttatgatccccgcgtcgggttcttgagattcaaacgatttgaaacaagatgagtcggtacgcagatgtttgccccaagcgaagtcttattgtcgattatgtaggtacgaactgtagtcattccattgctcccatttgaccctttctagttccattccattctcgtccttggatgaaggcgtgccatctacgccgagagatccgtaaaccagagaccaatcaatgtccttagaaacgatctgtcgagatatcatatcaatatcatccgggaatggtatgggagtatcaaagtcgtaagattttgaagtccactgaggtgtacat

SEQ ID NO: 1653 - DNA, 1438 bp, Xanthophyllomyces dendrorhous
cattcgttttgggcacaacaaaaactagatatatgaggatgtattttggactcacatcataaaatagcccaatgttcgtccaccggagttctcggatgagcttgctaatcggtttcggtcggactgtcttgctaggctctacaggtagaatttctctcttgccgtcggaggcgaccgtgtttagaaagtcctcacccggtaagttctctatgagcgttctggtcggtggtattctgacaaacttttgctttgatccttcttccgaggaactgtcatcctcgagagacgaagcgcgcgtgggaactaatggatcctctggcggatgtgaatgtaaagaggaagtgtagagagaccataatgaggaagagggcgttttacagccgtcatccgagaggggggacgaagggaaaagaggagacggaggtaggtgaaagtgagtatctagatttgtcttattcggaggttgcgtatggatttggaggcaggacttgacaagaagccgttgccgttctggagagaaatacccaggaaggatgaccaggcctgaaaagttgttcagactagaaatatcagtagcaggtaagttatcaagctggttcaagagacgttcagaaaaacgaaccaggcatcccgacaacagcccaagcgtccacttttccctttccaacagacacacattctacatcttcccttcttgcctccgtccagccagcttggtctagatccccaggctggtgtcgcgtagaatctagcaaccgcctaggatcaaacacgtcttccaggctgggtcggaagatcgtttttggtcgtcggtttgacgatttctttcgaccacaaggagaaggatcggatcgagctttgaagtgtttttcggacagcctgaacggagtggacatagttgctatatttgtctttgtgcaccctcgaagagccatgcagaagaagactagtgagtgcttgatggcagtagcagtgtagtttgaaaatggactataaaatcgattatagtttcttgtagtcgcctgtagaaaagccctaatcagctctaaactactctccacgaacattcgtttatccatcccatcgagaacgaccatcacccgttttcattgtttaccagacaagaacaaaggagaggtctcaaaaacagtccgatgtcggttccatcgttatcaacatccaagcttagcgctctatcttcgtcgacgcttcctcttgttttggagcgtcaacgatccatctccatcggtcttcaaccgccagctttcacagaggctaccatcctcaagaatctcaatcttatccaacaaggtctccaggctatccattttcagtcttccacagcaccggtctctgactcaaaaggcctgagagatggactcgacagattgctgggtctgatggagcaggaccctgcaggcaaggagaaggttatttc

SEQ ID NO: 1654 - DNA, 1807 bp, Xanthophyllomyces dendrorhous
gagaaggttatttcgatacgcgaattcttaacgtaagttccgtacttgtttctttttgttttccaagagagccatttgaagcgtttcgatggcgaacatgctgagtccgatgactgaagtaccatatatatcttctattcatctgtccgatgaatggtctcgacagtgagcttgcaacgccacttcccagcgtagcttctacaagacctgcttctccgaccatgcctgcggcccaccttcccaggacgaacgagccagttttcggcgagtctaagccacaatccaacaagccttactcatcttatagagatgaagaagatgaggagagttcgccgtttgatgaaccgtacagggatgattcagaggtcatgatgcagcaaagggagatgatgagtggtttgttttggtcttatgcactcatctacttatcataacgattgatgcaaataggctgactcgctattctctgttttctgaactctactccgtctttatctatcgcagatcaagatgcccgtctcgctcagctctcgacatccatcaatcgtcaacatcatctttctttacaaatcggagacgagctcgaggttcatcaggatttattagacgataccgaccatgctcttgaccgaactaccgttcgtcttgacagagcccgaagacagctcgacggatttgctgggaaggccaaagagaatggtgggtcctgctcttgtcttgtgtgatattgactgccagtcaggctgatttgctgttcgttgaacgggatggatctgatggtgtagcttcggcagtgacgatcgtgatactcattgttctgctagctatcttaattctggtattcaaaacttgatctcaagatagagagagaaagacgtatacctttatgatcggagagatataaacagaacttcgacattgtaaatttatcctgctatacctattgctgtataaaatcacgaccttgctatgcatgactgttccattgcacgatggcttagacatttatgctcttgtatttttatgcacactgatcgggagtctgaggatagaccatgctgaggctagatggtctgttgtttggaaagcgcttgttgccgaaagttggaattatgtcattttcgtatcttgagtggatgcccagtcatcagattctatcaacgacagctatcgaagcctttacagacatttacaccaagtatcaatagagatccacgacatcatatacccaatggaatccaagttgactacagacaactgtctgcttctagatggatatgttctcaaagtgagtattgggttgtgtcatgatgggtctctaggatctcatcttggatctggtacgctttcgctgataacggtaaccttcatttgtgatccccacatcgttattctctacaacctagacaccttttgagcttctccggaggtcattcaaaacatctcaacgaaatgttgagaaggattatggatttcttcttcagttgatccaacaacttcggcaagtcaccaaggaggactcgtcgtcattggcagaggtgaaggaggacctagtggtcaagcttgaaacgggtatagaaagagccaagggtttgaaacgcaaggtgtgttcatctcatattttatcgctatgggcaaggagcaaccgtaacgatgcagattgaaccagatatctgaaccccacatatgaatcttgaccctgtgggagtcagttagcggacctactgccatcaccttcaaacccaactctgcttcgacctaggttagatcatatctccaaagtagagacattcgcctcgccgaatga

SEQ ID NO: 1655 - DNA, 4392 bp, Xanthophyllomyces dendrorhous
gttttttcgttcaaccttataggtcttaatcaagagttggtcagattaaaattcaaaaagttgacagttaatttattggtttgttaaaatcgcatacacacaaaacgaaacatcactctgcggaagaacgacttacggaagaagtcgagaagcatcgagatataaaagatgtccttcggtggtgaacaccatgttagaatgatccttactatcaacatcaaatagaggtggaatcgtcagagcccctcatgctttgggtgatgtgctgactcgatgaacttacttgacaaaattatcctcatcgaacagcaagtagaggtactgctcgtgtcatgagcgcaaacttcagtttaattcattattccaagagaaatcccgggtaaagatcaaggagtaatgagagcaataaacaccttgatagtctcggatagcgcaaagctctccattcgatcggttaattcacccgtgatcaggttcttgactgatgcgattccacaccttacttttgccttgctgatcaaatcattaaggattctctcgccaatttctagatagagttcgtctttcgtcgcctagttgtttatagatagacactgttaatacacgatttgctctcagaataagatcgacgatcggctcactcggtagagaaagtaattgctctcgacaaactcttattgatggacgattgataatagttaagtcataataccgtttaactgatcacaagtgagacagttgtctatgaagaaggatgcactgaccaggtcgaatgggatagcccaaatcatccgctttcttttctactacattaaagctttcaggtattccaccatatcgcctccataaattccaatctatatttgtagatgacaggatatataggtgaactattgtgggtacaactgagagcgtggctggagaaacaaaacttacaggctagatgtgatttgattgccttggtttagagatagcaccggcatcgaattggaaaggaaagtaagcgctgttgttgatataagagttgactatcaaagaacgaaccccgtttagatcacctgccaagacttgcagccccggaaagaaggcagctagcgagctttaacaaatagaacatggcagagggtcgtatgaggttctcatcgatagtgtaatatgcctgaaagaggcgagagcttactctacagtcaacccgatccgttcgcctgtatgcatagaaacgcctctgaactattatccagatgtagtcaaatttctggaagtcagaaggcaagctcttcagagattcgaagtgttataggaatggatcgaagacaaaaagcgtacccagaacccctcttcgccccttacataacgcattatcgctcctgttttaccgcagtgcaacgaatttgatcagctgttataatccggttggtatcaaacacgaagtttgcggaccatatgattcttcgaacacatctaagtagctttgttctccaagcagaatccacgctttgagcgcgtactcgaagaaggaatccgttccagctccgatgtgtgatattaacggagggatccattcctgacatcagccggaaaacagttatcttcagagtggaactttcaagcgcaagcaatatgtagagattgcgcctaccaggcttccaacatcgataccattccccaagagtccaacttcggaccgacgttcacaaattgtgaagaacgcttttttcgcctgcgtttcgtatctaggatcgccagtcagtctcgaaagagtggcaaactctagaatcaaagactgtgaattgaagcgcaagcaagtataagctcgcgtgcctgtctgtctcagtgatgggttttttttgttggtattgagagcatgagacgaaccccagcaccagctgtacatgtagctgtcgtctcgcctttaacaacacctttcttcagattcacctaatacaacggcgcgggacgagaacagagctatcagtccatgcgcaagcgcaaaacataggcaacgcccctcttctaaagctaccttcagaaagaaaaatgcaaaacaaaccctagcaaacggtaaatcgccccacatgttttccttccctcttccttttcctacgctgaaacctgtaccacttctttcccaggctttgaccaatctatctcccaaatcaactgccatatctaataactctcccttgtaccagtcgagtttgaagtcttcgtcttgtgctctgtctacagaactatggtgtttgggtaaagggatgtctcccgacgcgaattgatgcgccgatagtagagagccaaggattcgaattgtgctttcgaagacttgtatcttattcgatttgtcaaacgagacagtttggatgatcgtccggactctattgacatcaaagatatcagagacgtacagatcatcgatacatacaaagaaagattaagacaaacccttgttcaaaagcagtgcgatttcccatgatagccagtgtatcgatgactataacgtcttaaaagcatgatgagtatatggtcttgatcccatttgacctttcgaaaacgcctggatgagttgaaacagaccatcgacaagtgttaaactgtaatctccacaaacatcgttgaaagctccgtttgctctggaaaacagatatataccgtggtcagctagagccctagatgaacccttgttacataccagaatgaagagaaaaggacgatagcgtgattttcgaggtgaacgacttacggatcagccgcgttcggacctcgtcctttacatgataatggcttcaactcatcctgatgtcatctcgagcccagagtttacgcaaacggacataaaccacgtcagacatgatgcaccttatgatttttggactaaccgatcttgtcgttgggatgagatgagagaaacgcgtacgtacgaacggaaacccgtgatcgaggtagttgtaatatccatggttgaataactcccttgttcgttccctaagctgtatctttttgtccgaagtgaatatggagatacttgcagttggtgtaagcaaaagaaggactgtgtacacccagcctgcgagatgaaccatctgaaagatgtgaggtgttagtcaactaatgcacaatgtatgaaatctacctgctgagattgaacgtagaacttataaggttgatgatgagacgacaagacggctagggttaatttcggggttcgatcatagtcacgtgtcgacacagctttcactttgtgttctatactcctctatataacatcacacaaacttcattgataaagaaacgaaagaccgagaacgaaatagtacagttgatgaattcactactacaacccgataaagtagcaagtgaatagagaggaatagaaaatgacatagggcgtaacgatatccgagaagcctgatactcttacaacttggcctttgctcctgccttcagcgtcacagcggcagcagccagagcaggggtattgcgctccttgaccttggtagtgaagatgacctttggtccttctctccacatctcagtcaccaaggtctctccagggtagacaactccggcaaatcgaactttgatgtcgtcatattccccaaagttttggagcacatgctttcccgcgattcccatagagcatagtccgtgaagaataggcttctcgaaacctcctatggatgagaacgaggggtccaaatggagaggattcaaatctcctgacattctgtaccaagcagcctgtcgctccaaaaccttttcctcgaccactgcgtcgggctttcggctaggaggcttgttcgcagcactggctgctcccctatcgcttcctttctttctgccgttgaagtttccgacacctctcaagacgacggttccttgggtctcaaagaccttctttccagtcgccttgtcaacaacatctacaccgctagtgacagatgctgattttccctgtgaaccctcaacctcgatcagttatcagatctaacatatacatgtctacatgataagcagatcactaactttatccaggacctctataagtcggggctgacagaccaaggtagcgctggtcggaatttttccatgaatcttgaggtactgttctccatgaagaagtttggcctggtgatagacgagacaaattcaggttaattaggagacgtatttctgcgttgaagcagagtggaacgaggcagcgtacaggattgaagtttggaagccaatcgaagccaagggttgatccagcattgaatccagggatcactccaaacgtaggcaaagcctaagcaacaggagagtgaaaaccgagtgatattcagaagtcacgttataatcagatcatgaaagattgaaaaaagagcatacggcaaaatctccatcctgctcatatac

SEQ ID NO: 1656 - DNA, 37551 bp, Xanthophyllomyces dendrorhous
tctccatcctgctcatatacccatttgagatccttctctgtcgctccaatccccatgttgtagatgatgacgtctcgttcagaatacgaatactcgtcaggatcgaccgttctggatttggcctccttgacgatctccggatcctcatcgtcatcaccggccgaagcgctacctttgtttccgaaattctccattacctgaagaacagaaagcaagaacaaccaggttgttaggtggtatcatggcatgaaaggcagattgtgggtgattctgacctgttggaaaccttcctgcgtggaagaaggatgggtacttcttccgtcattgaagtcggtaatcttcttccattgggaaacgatctgatcagcagtgagcggcctgtcattagggaatccatactgtgagttcccgccgcaatacagaagacaagtagttagctctatctatatatctgcattgaacaaccaaacaaagtacgtactccaccagaccgctcccatcggacttgagaagcccacccaccagaaacttcaaaaagatctccggtggtctcacaatcatccgaagcgaggtagccaaccaaaggggccacgaagtcaggcttgaatgcatcgaccatctccttagtccaaatctaggtttaaattaatacagtttggaacaaaattgagcaaaacatccggtggatatagatggcatacgcaagaatacaaacagtctcagtcatggcggtaccggcgctgggagcgatacagttggcaaggatattgtacttggctccctcgatagcaagggtgcgggtaaatcctaagatagcagccttggcagtagagtaattcgctagagaacaatccgaacaagcgggtcaatatacattccaagagagaagccttgaagcatttcaaaaggtcacaccttgtccgaagtttccaactgagaataatgaaaagaacaccggaaggctcatttcagtgatggttcagtgaatagttgtttgcaagattggactcacagataccaacccccgagcaagtagtcacaattcgtccacccttctgagcctgcatgagatcccagacagccttgcagcatttgaatgtacccttgagatgcactgcgattacctggtcccaatcagactcggacatggccaggaaagatttgtctcgaaggattccggcgttagcgatgagcacatcgactctcttgttcgtattccaaggggcggagagtgcagttttgataatcgcatctccatcttctgcagaagcaacagctggaacggcttttcctccggctgtttgtattagaatagaaaatacacagtcatctgtcagagatattgtattgcttttatcgaacgttgacatgaacaactgaccctggatgatttcgtcacaaacagatttcgctcccttctcgctgacatcgttgaccacaaccccggctccaagcttagcaaacatcaaagcataggctcgtccgagaccagctccagctccagtgatgacgacaaccttgttgtagaactcaaccttggggtcagactgagcattagggggaagactagaggctttttggagggtagcctatcatttgtgatttgagtaaaaaggtaatatcagagatacagatgatggtgaggaaaatgtaaagatagagagaagaagggaaaacaggtttctcacaatcatatccctgtcagtcatagactctgggtgctcggctttatcgaagtttcggatgtcagcaaatcggtgcttgacctgataggaagaacatttgtattaataaaacctgcaagtcgagaacttgatgtcataaaaacagagattgcttacggcactaggagtgaaggtatcatctgttctgaagattactccctgactctcctcccaacggacctctgcgacaaagccggctccgacctcaaaaatccttccagacacaggtggagatccctgttgatccatacacgacggaagaagatgagcttacgaatctcacggataccattgatcataagttgatggacttgcgttatctttagagcaaagcaccccaacaagaggagcaataaattcgggattgagagccttgagcatatcaggaggcataacctatatatatgtaatgtacatcagctaagacacgttttttgttgcagatttgacaaatagacccacagtcgcgagcatctgggtagcagccatctgttgtatctcgtcaagaacgatataggagtcaatctcacataatcgatgagctacaagggcatggagaaagcagacgaacaggagcgatgacgttgacggcaataccgtacttagcaccttcccgagccagagtttttgtgaaggagaccaaacccactatgttgttaaacaaaacctttgttagctcatcttcagtgtggctttcagattgacagatacaactcactcttggcagccgaatagttggcctgtcccatgttaccgtacaagcctgataagacccaagggcgtatcagtgcatgttgatagatatatgtccgcagaaaagaggaacagacctgctgccgaagtagtattaaggatccttccgtactgtaaacaaagtcaccaagatcgaatgagtaacatatttcgacgaatattgagagtacaaaaaaatctaaccttttggcctctcatgatcggccaaacggctttgctcatgacaaatgctcccttgagatgaacaagcatcaccaggtcccattcctgtacatagagattgtagagtgataatgtaagagcatgtacttttctctctttttagaaaagacagaagagaactaggaccgcaaacccgacgtacctgatcggtcatcttcttaaaggacttgtcccctgctctcaattgaagagattgatatcaggtcatcttccttgtgctcttttaaactcttcaatcggcgatacacgtacggataataccagcattgttgaggaggacatcaattcttcctccaaatgcctttttagcatcctcaacgatcagatgcccgtcggtgaccgaatgaacggaaggtgcagcctttccgccggctgaagtcaggagttttccaaacgtctcacggtcagttcatgcgtcctttccatcctaataaacaagtcagagctgacctttgatgatctcgttgcagacttgttcggctgattctcgactgacgtcgttaactaccacctttgcgcctaagctcgcaaagtacaacgcatatcttcaagccagagatagtcatgatggatgcattttttttgagtgaaagattcaaacgattcaagaagcatcttacttagcatccgatcatattctagggagatcctaagatgtcatcggcatataaagacgtcgactgaagagatgatacaaagttggaagtacttacactttgccgatccctgtacccgctccagttacaataacgacctgatcctgatagttgatgttgggcatatctgttaggatgcagtgtttggatatatatggttcttcaaaatgatgtgtgaattcaaacaaaggagatctaagactatggtagagattggatcagagttgtgtggaagatagatggtgtttggagtagaaagaggattgctcgcgagatgagaaacccggtcggttactcgacagaaccggatgaaccggatagatcgttaccgaaacataggccggtcagcggcgtgtgtctcttgatgtttagtcagtaggtcgatccaacgctctgggatgagtacgattcctttctgtttcttgtactctgtgatctgcgttctgtgtcctgtagtctgtactatgtgctctgcgatctgtgttgtgtcttgtgtatcatgtacatcctcgtcctttctcgcgctttccttttgctcctcatggcttgttgtgtctgtagatgactctgtctgtagcgatggtatggctttgtccgtcgtcgtcgtcgtcgtcttcgacatcgtcatgtttgccactacctgccactacctgccactacctgccactacctgccacccataccgccatcattgccaccaccaccgctgtgatcgctgtgttgtcttgcagagagctttgggacatgatctgacctacgagctagcagggacagaaaccacactcaaaaaccaagcgattctgttactggctgtgtaaccactaccccaccacgtggtctcagcctcataatggttacagggctaggctctgtccccacacccgatcttcctcccagaaagccgcgggatagaagcgaccggtaaaagtgaaagaaagcaaaagtatcacctgggagactgtggattggttgcaatcggaaacgtcaaggtgatctaacactctaatcgtccatcgtccttccaaccttcttttcaatactcgtcctcctcgtcgcttcgggagtagtcgagaggatgatccactctcctacgccatctagactagctccggcatcgatcatctcaagatctagctcgtcttcaacattatctgacttttcgggcattcatcctcctccggttcgatcgtctagtatccctctcgctccgaatcagaacccaccgctattctctttcgcgccttcttctccccatctggtcgggacaactagcaatcgtccctcaagactgtctgtagatctatccaatctttcttcgggttcatccgatccttcagcttttactcaaggcagatcaagcgatatcaatctgagccccacggcttctcggtccaactcgccagtcaacagattctctcttatcaaccagccttcggtctcatcattctcacaaaattctcatcaagcctctcatccatcccagctgagacatttttacgtcccctcgataacatcgacaaacccatcttccgggtctccatcgattcagacatcttctctaaacttagcatctggttctgacgcctcagctcctcctttatcctccaatgctcggcacgctcgtccaggcttcatctcacaccactcacatctggtgatagcacctcatgggtcttctcccgagatgtcttatggaagatggatcatcgaaaactttcgagatcaccaaaatggaggttggatgattccaccaggattgacgccttatgtaccgtttgcatgctgggcagcaactagtttaggattcctaatgggcttcacattttggcgggccgagctattttcaggtgggttaatcatagtgtctaaagagttctcatacgaaagcttacccggttcgagcatattactagcattggataacctatccaatgcccttgtagaacaaggcatccttggccaattcatcatgggtaacaatctttcttctcttgtttatcgctcccttcgtgatgatttactgacccacctatgagcctatacccatacaggattcttaatcttcctaaccaccttccctccggtcccactgtactcaacactaatcattcttagtggctatggcttcggtgcatggacggggtttattatcagctacaccgcagcgctggtggtcagttcttattttaagttgtgatccgttccatcagctctgatttcatcaatttaatcactttctcttgcgacaatacacttcctccttcttcagggcgccttggttgtcttcctgctatcaagattcttgttccgagcgtccatgatcagactgttagtcttccaagacatttattctttctttcgcgtttgttagctaacgacgctatgcgctttctctacatccactctagcctttctcgttcaccgtcactagcccgagtgattcacgcgatcgaacgaaagccatcacttcttttcctcatcagactagcgccatatccttacaacctgctgaacactctgctagctagtagtcggacgcttactttaaaaaagtacacgaccataacggcgatcagtttaggaaaactcatgtcagtcttctgttatatgttcactcaagaatgccgttctcatctatccttcgtttgccattgggctcttttcatcacacatcacgacccgatcgatcagtatacacacgaccgtgggttctactatccataactggggcgactatcactcagacaccggactgtccgactcgatagaagggagtgagcaggacaagatcagcccggaagaatgggatctgatgaagcagaatgaaaagagaggggaaactctgaggaaagcttggtccatcataggcatcatgttcgtccctcccagttttcttcaagatccatctttcttcttatcagtcggaggaaaaccctaaatttgtgtcgttccacacatttgtttgtcagcttgtgtatcgccttgtttgtctatctgactcatgtcgcccggcgagctgtgaacgatcaaacgatcaccaccggatccgcgccctcctcccgatcatcttcgccagtagacacccgctaccgaacccataacggtggatatcagaacattcctgtccatgatcgcttcacgagctcacacacccttcgttcggagagtgattcaccgacggagatgcccgagacgacgagactttccggaacagagtctggatcgaggtcaactgtcggaacaggcaggagggagcccaaagataaggtcaggataggaagtgtcggtgggatggaggatctaatcgggtttgatctaagaggttcggaaaagactagactatgagtccatctaccatgtgtgcttgcttattggtcttctctctctctctcttttctcacatctctcaaaatgttcttggtcttctatcgtgacctttctgtctgcttgtccctcgcttttatgttgttctctgaattcacttccaacactctttgtcaaagtaggggtatcttcctaccttctgttcttggatctttctttatatcgttgccttcgaacgttgtattatcattttctgtatttagttgctgttgctatatattacctcgacttggcttcgctatcagtgagattgattctctcttgacctctcatctgctgaaacacgtgctcgtttcgtttgttagactcgctcatttgctgcttcggtcaagcgtggcaacacaacacgtaagctgtgcaaacgtaaccaattttgttactgacccagccgcctttcctcatggccggcaatcgtcccccgaaaggattcgacaactaaactgtctgaaacctacccaaaggaaaaaaaaaacctatcctcattcatcggacggggcaagagagcgagattacgagagaaacgatcgaagaagaagtcaaaagaaggcctagaagggctggcggtcaacgaaaccatcgtcagaaagacaaatcaggtcctccggtctactacatcctctttcaagaatggatccggacgaggatcatgccgtctcgcttgctagagctattctcaatgcagacctgaatcaaacaactagaagtttgtccattctttccctctggtctgatatgcatttcttcgcgtcacgaaacgattcttacgcgattctgtacacttcttctctcggctttggaatctcttcctctgcgggtcctaaattcgtcgcgacaactctacccctttctcctcagaacgggaccgagacgagtacgaggggttcgacctgaatgacgcgaacgataccgagattcaagccttccagagcatagtcaatgatgtcgttctcggcgcatccacagaggcctacaaccaggaagctagtctgagcctaggcgaggaaaacggttcgcacatcgttgtcgaaactcaggttgaaccggacggcacggttgtcgaaggtgaaggcgaggatccgacgggtgtcgaggccgaggttgatattgaggccgtcgaactgaatgaaagcgctgctgatggtggctctggaccaatagaaggcgagaaacctgaagaagaggtcgtgatggatgatgaaagacatgatagacaggatgaacatgtggtggatgaggaccaggatggtgtaatggatgtaggtgggcctggcggagaggaagacgcgtcaaaacgattggaaccgatcgtgccggaggaacaagaggaagacgaggaagatgaagaagacgagatggatcttggaatggaggacgacggggaggactattatcaggattctgcagccgtcgaggaggctacagctgctgctgctgccgaggctgccgcttatgccatccaactcgaggctcaacagcaacaccatcatcatcaagaatcacaaaatctatcaaacgacctcccggtagagctcgagccggatctgctcgctagtttggaaacctcttttccagaatcgttacagaccgaacccttgccttccatcatcactgcattaatcaatcaacagaatgccctggtcaacaccatcaacatgctccagtcacgggtgtccgctctcgaagctaacgctctgagtaatccccatgatcctaacgatccacatcatcatcaagaccatcatcatcatcaggatgagttgcatccgaatgccgaccttgacaatcaacacggtcatcatgatatatcactcaaccctggccaagacgtaattgatgcctaccactcccataaccagcaggttgctcaacagcacctggagcagcaactacaacagcagcaacagcaacaacatcattcgcaacatcaacaggatgtcgatgattatccagcagacaccgagatcgcaggcgtaggagctccaggaagcggtggtaggaagctaaaaggatacaacgctcagactggatatcgactacagaagaagcgtaatcccgccctctcggtatgtttctttcctcttttattctcttttgatagtagcccatttcacgccacttttcggatatgatgctgacagtattttgttgtctttgaacatatggtatctagaacgcgattgcaaactcaatagcctatctttgtggatttgaacgccccaaaggagcaggtgtaggagctatcatcaagactccttctcctggcccgtcgggcccatcaatgacacctttgggcccggccatcagtaaacgagttgtcgtcttgcctgatccgatagaagacatcaatgaatggccggatagaccagacccacaagaaggagaaccgctcaagctcgaaagaccggattggcttgaccggcatgcaaagaagtgaattcttccatctctgtgctttcgcgcgatcttcctgaagaacacaattgaacatatgtgtcggtgttttttcttttccttttttttcacttgtcacagatcggagacgcaagggttcctcgctcggatcatggaacatgtcatcacgactaaccagctaggttccgggtctccactaaacctggctgattacgatcggaagacaatagagacagctgtgctgggtgctttccagaatgtaagttttacctcttcctagatcatcgaaagttctgtttgttatgaactgtccagactgattgtgttcaacgaatctgtttcgtaaatttagcataacgaaaactataaagcacaaattgatccccagagacttgccaaaaagaatgagaaaacagaaaaacgtaaactgcatagccgaatcaaaactgtacgtggcttgtccttttctcttttttgtgtttcatctagccttttttttaaactttgaaacggcaagagcctgtctgactttaattccttcgatgatgcaatgtttatagagaggtgataagcgtcgattagggttcgaaaagttggatcttgctcaagatccaatagctcgggatttaaggaaaggaatgaccaaagttcgtctcgctcttttccttctttcggaaatcttcttgtcttcttctcgtccgctatgctcatcatcgccgggtccataaaacaggactacatatcggaagaacactcatccgaaggagaaaactctggcatcatgcctggcgaatggcagagactagcagaaagcgcgggagctaaggggaaaggagtgagcaaagcgctagagatcagaacgcctgcttggaagagtcgtatgttacttccctctgcctttttcctcttttactctgctctcacatatcattgatcatatcctccaccatggattcatacatttgtaggcgaacttagatacattgactggtctgccgactcctccgccgacaaagcgactgccttctcgacggctcggttcactatcactcctctccgggaggacatcttcccacctaaagagactccgctgtggatggtggaccccggatggagagagcgtcatccagaagctgaacatctgttgacagctgatccgccagggtggccagggataggtgtaccagacgactggcatccacaagacttctactcatcgatagcccactcgataccggagtaatcgtctgtattctttctctttctttctttcgattttttctttcttttttgatctggttcagctcgttttgtttttcctttcttttcgggattcattcatcctcttttcacctagtttcctctgggtactcctttgttcttcccacgatgcgcgtttgatgcacaatcatctttctgccccttagttctcaattcctccgctttatccttcttcccttgtggctttctcttcgaacccgtctgcctgttgcaactgtcttcctctccttttccctcttcatcttgaggcattttcccacctttttttgtaccatctactccaataaacccacttacatatgttgtgcatcgcaaatcacctaatataccaatgcgttgactgttccgccctttcgcttatcaattcatgggctgatcgatagtttgatcataaaagaattcgaagatacataagtaaacaaacaacaaaagcattacaactaatgtccggatcaaaccgagcaaaagtcttcccagccacgagagaagaagaaacagagaggatgggatcatcacaaggaagataacaaggtcatctccccttcaaagcttggctttgatctcgatcccagattccttgatgaactgcgcctcgcgttgtcggatccgttcatttcgaggcgccagctcggtttgggatcgttttgactcggtctttcctatctgttggatatggacctcgtctgggccctggtgattcgttcaagatggaacatgagatcaatgcgtaagacctgcttgggacggagagagaggaggcagagattgcttacatcggcatatcgcaacgttcgaaggccagcatagaagtaagcgagcggtgcatcttgagagattccttccgcaccaaaagcttgcattgctcgatcgactacttggagggccattgagggcacagtgaacttggcaattccgatttctttcatcgcgcccttagccccaactttgtcgatcttgtgtttccatcaagaagggagggaagacgaacgcgacgataagacgataagtaacagacaccaagcgataaacactaaatgaacaagacaaacctgatgagcagctgctagaacgagcagcctcgaactttctagttcggctcttgaacgagcaatatcagacaaaacggttcctgcgatagagagaacaaaacagatgcaatggccttcaactgattaaattcgacgagatgaccatgatcggtgtagagaaagacttaccatgctcgaccaacatctttccgaatgttcttcgctttgggtctgttactctctccaccatgaggtccaacgatctggctgctgttccaatacttcgcatgcagtgatggattcgtccaggtccaagccgaccttgaatgatctagagatacacagttgctctgcttaggtgaccgagcccgtcactctatgagagaaattgcaaaacgaacctcaaatcctctcccccagccaccgacaaggttagaaagaggaactcgaacgttatcatagctgatagagacgaggattataagcggtcagtttgggatgccctacttgaaggcgcgtaaatgatcgttcgtcaactcacataacctcgcaatgacctgtcaacagagataagaggaggcgactacatcagatctgaagtctttatagggagcatatattggataatttaaagcctaccttcaggagcatcatcatagcccatgaccttcataggtctgactatcttaactcctggggtatccgagggaataatgacaattgaatggagtgaagttgatcgagcaccggtctctggagccgattgacccatcaagaggtgaagcctgtttctgggatcacctgcccccgagatccactgtgtgatcattgaaatatcagccatgtggaacttgatcagttcatgcttagtttgcgttcaaatggtgagatgagaacagatacccatttatgcccattgatgacgatctgatccccttcctgtcggatgtgggttctgatgttccgagcatcagagctagcgactatttaaagaatcacataagatagccccaagcgaaagacagcgtccagtcgcagtttgacttgagtttcctttcgttcagagcagagggaaggaatgatgatgcgagagcagaccgacctccaaattccgtcattgaaaaagaacttctgatctttccctccatcaagggagtcaaccatttgtctttttgttcttgagaggcatatttggccaagagctctatatcgtgggcagaaccaatgaggtttcagatcaagtataaagttgcacatatcttcataacgacaacagacctacccatgtttcctgaaacaacgaaacatatcgcgcgagtttagcgatcagggttcatatattctagtgtagacgaagatgaaaggcaaaaagacaaaccggtatctggagcagcgcagttctatcacggggataaatgaaagcagagcagaaaaattcatcagcattctgtgagtagtaagagacgaaggatgaagcgtaccgtagcctgaggggctaagtgaggcgatcttcccatactatcaaaaccccaatccagaaaatttgtcaatgcctttctctccttccttgatctttaggaaatcgaaagagatgatctatcccacaggggtcaagagctacttacatctcacacataacggcgtactgtgatagcaaaacgatgctcagcttcgaacaagtgcggacgcaagagaaagatgatggctgacctctaagttggtcaaggcgacaccttctttgtaagacgccttgctcaaaaacaagttccaaagccccctcgctttcgccttttccttcagctcctccattacggggatcaccgtcttccaccgaccgagcgcggttgtttcaggaagttgggcatggtagagatgctctcgtggaatacattcgtcctacggatgaatcacaataagcgtttccggtatccagttagaagatgtaaatcgatgatattaacatcttggtcaacaagagcacccggcatcgatcagacgttcgtagtcactaaggtgactaggtcgagaaacttttcgttgaccgatcactcacaaagacaaactcaattaaattggcaagaagattcttggcgaacggggagaacttgtcttcgaccttgaagtaagagattcggaggggttgaacaacagggaatgctagggtaagtatcacgactaggtagaacgatgatcaactacaggcaacagacagacgaaccagcgcccaagcggcaggagaagtgagttcagcagggctaggttgagaatatgatccagacatggccagacggtcgtgagagctagtgtgatggtgttggaagaaggatcgaagggagagtggacgaagaggaaggatatttaagagatgctgaggttgattatctggtcagaagataaatgcgccggttaatgactaaccgaactagtcttacgtaacatctgcaacatagcccagactgagggtacgctcaacgtcgacgataagatcatgccagatgtagtgaggtagggaagggaaagaacagggcagacaagatcacataggggtcccagtgtgtaagatgagtctgaagaaggaagatggttgaggcggctcggcgtagtggtggctatcttccgatacgtagtgtttctttcagcttctcgagattcacacagagaagcaagagaatcattgatacattcgatccttgaaacaagtatatcagagactttggctcttgatgatcggacgaaagaaagactagtgaaagaatgagagtacaatgtgtatagaaagttgtctcctccgtatctgtcgcggcagtcaccgaagcttcgaccttgaacagaccatctggaagtgaaccaggaagtcttgcccgttgccgtgtcataagaagaggaagtctttgttctttattcggctgctgagatctctatatttgtatgaaacgattccatttattacaaatatagagaaccggtagaagaccaagggtgattgagaaagacgggactcaattactatggccggggtgctcgacataaacaagcaccctgcagagcctgttcgttggtccctaacggtctaccctcagtcttcatatggccatgaggaggagaggaagaaagaagattcgagaagagtagatggaaagagatcgaaatcaagttagcacatcacacggatgtggtagatccagagaacactgggacaaggtgagtccaagtcaaagtcaacaagtcgataacccagatctccaatcatacgttagctttcttgaaagaggggaaaatagaaacaagatcaagacacagtgacaagaagagaggttggtcatgagaattcgtcaaagtcgttaaggatatctttctcttgctcatgctaacttggccacgatctctcccagccgcttctctagctgtttgtttccttcgaaattcttaggattccatcggtctctagctgccgggttggacaagatcggttggggatgaaatgggtttgagatcgtcaggagataggcctgatggagcgcgtgaaagatctgaaccacgagtaagaacgagagttaggacatttgacctaagataaggaaaggaagaaacacaagcatactgtgaggacatcagaatcccgtatcggttgggatttgagttggaaagagacgatgatggtgatattcgacgagggcttgtagccataacttcatcgtaccgaaagatcaagaggcattgccagtcagccctcaatttcagctggtcctgatgcttcaggccatctctcagaacggcatagttaactaacacagcaagctcgtccagaaccatgatcaaaccaaagtatccctccttgcctccggcagaggatggggcggtctggccatcgacgtgatctagagcggcaaacgcgtggtgccagtgtacaagatctgcttgaggggacgacgaggcggggtaagacctgaagtagatcggcgtgttctgaggcgatatgtacgcgaccaaacgaatagatatgtttgactgagtagaatccatctcagaagaagtatgggtatatggtggtcggagctatcgatgttgatgaggggtgaggatgaacgagtgccgatgattttcaattttacttgcacttttttctctttctcttctccgttcatccaactgtcaagacagaacaccatgtcccgaccatcttcgccaacatcgtctcgttcgtcgtcgcctcctttgacgcttgacccagctacacaggctcttttggactcgttcctttctgagaaggcagaagaggaaaagcggtttagagaattggcagaggctgaggctgaagcaggtgaagacgaaggcaacgacgacgaggaagaagtgatgatgaatgtggacgaatatcgaaaggtcatcggagaagtgagtccctctactacgatcatctgtttctctgcttgcagacactctctggcttgctttatgggaataggagcaagccagaaagaaggacatggctgattgtgctttgttggtcatgcttggcttcagaactttggaatgtctcaattctggtacgactcgttgatatcatctgcttgcattgtccgacaaaccacttgcttacgagcctacaaacttcttggattcttcaaggtactctactccgttcgcaaaccggcttgcttcatccctccacgcgctctgcacaccgagcacgcgcgtcgctttcctctcctctccaaccggttatgtcgcattccaatcccaaccttcccctcttaaaagaacgctgctgttcgagtacgacgacagattcgagatcttgcctgtcgtcggtcggactagaaaagaaaggagggaaagaaaggagagcggaagggatactcaaggcataggaaaggacgaaggaggattcgtcaagtatgacctgtatgaacctctcaaatggggtgaaggattaagaggaaccgtcgacctggcagtcatagacccaccttacctcaatgaggtatgccttcactgtctctcatcacccagatcgaataccgacgccgttgaactcatacactcaaactttggaccgatacttgaaatatagaaaacgaatgggctcgtagctcaaaccttgcgcgcccttctcgcaccaaacgccaagcttctcatccttacttcaacatctgtctcgtttgagattcttcaaaagtgctatgacctccctcagctaggtcgtctaagacgatgcgagcacgcaaaggtcgtccatgaaggtggccgtatccaggtcagtacattatcatcgtcgttctcgaaatgatacgatgagtgccatcgcgttgataaggaagctgacatgaaacttcacctggttcctccgttaagaacccattcggaatgtgggctacctgggagggaagtgaaaacttcatggccgatcccgcttcttctacaaacctatgattactcgatgaaatgaaactaaatagatgtccaggctgagcatattcactagtgggcccaagtcagacttgatatcttcgactcggaaaaagagcggtaagattagaccgaccgagtactacaagcaaacggctggccaggaacgtcacgagcacaggcagattgagtgtgtatggacattgaataggattaccgatgggaagtcattaaatgaagcgaatgaaggaagatcgagaacaggcaaaccgggcgggaacacacacgcaaaaaaagagatgaagaacgtctcggactcggttgtacaaataaaagaagctagaagcaagaaggggatggattgagaaagaaaaagaggtgaatagagtgaaagaacgctctcgaatttataaatcagtgcgtgaaagaagaaaacagaggcgtggtagggaaaggatgtcgataaggaattgggcaatgcgagaggggaagtatagaaagatgtgctaaaaaccatggatgttcacatagccatctctgcctgcaatcgcctgagctgagcgtcgtcgtcgtcctcctcttcttgttgtcgagcagctagatggtatttccgaacaaccaagaacaaagacagaactgatcgtcagtaaaatggaagacggtatatggaagtcatcgatgaaatgtcttgctaaccttcacgactagccattggcgacgaaggcaacgtgactggaacccgatcagctccaagcaatcgatcattgagctgctcctgctccatcgcctccagctcggcattaagttcctcctagattagaaacggagatatttcataaccagagagaagagagaagaaacaaattgtgagcgcaagaatcaactattcggtaagaaaagtcaaaatgtgggctacgtacgtcgtccaagtctccgttgaggccaacagggtgagaaattgcgtctgatatctcgttcgtaagctccatctgttctctgacggcatccattgtagcatcaaccttgtcgatgttcctatatgagccatcgtttgatccaggaatgatccccaacatgaagtgtatataagtcagaggatcggttggactgttttgactgtatgaaatgatctcgtgtgagaacgatgaaatgagtcaacatacatcttgccatggatacccttaagcgcctcggatccgcgtttcatggcttccatagtctgcaagttcatgttggctgactccagagcgttcatctgattcatcgttggagacacgaaggaaaagcatggtagcgttaatcagaagtatgtcgataggagaaaatagtggattcggtccacaaacctgggtctccaacgtcatccgggttcccgtcagacgatccagttgaccttcaaatgtcttcttgtttcggagagcttgcaaagcagctgaccgagtcgaagaaagaagtatagaaatatatcatcagcacaaacaaacaaggcgaacaaaatggatgataagaaggcaggcgatcaatgggagaaggagagacacgttgatgtacagagcgggttgatcatcatcctcaaagatagacccgtcgaacccatccttgcttcacagttcactctccaggtttgcttttggtttctccgtcgagtgactgactcccgatctgtcacctatagcagacctttatactatgattgtaggtatgatgaatgtcttatcctccaccccaagcctcttctgtttgtatttgttgtcctattgattggaagagaaggacgacaaggaatttagacccacctcgcttgttggtagtagcatttgcctttgccttctcgttctccatatctatcttcttctgcatatgctcctcctgcttgtctagcatcaacagctgttccctcaagtcgatgatggcggtcctagctttggaggccgagccgccattgtccttcttgccagtaaaataggatagccagccagacatctcagaaaaagcttgtttctaaaagtagttgtgattaatgtggaatggacgtgggtgtggatgaggggaaagcgaagattagagtgttgaaggcggacgagagatgaagataggtggaggtctgaagtgtgcgtaggtgaatgtttcgtgcagtttcctcacttcctttcgtttgcctcttctacgctctttctccctaacaaccatctatccgttctcttcgttctcatcatcacttctttctctctttatcaaacacctccagtgctgctctaggaaatgtcttcgttagcagacgagcttctggggtttgatgatgattcggacgaccaaggatccgataacgatactccggccactgattcctcgtcgaacgccactgggacgggagccgcagggtcttcaactggaaaaggaacgtctgctggtctgatgcttccccctagttcgcttcctgccaaaagaaaggcgcttgaggatcaattggactcagcgggcgtgaagaaagaagaggaagatgatgatgcgatgcaaggtctgttggctattccggaaggtgggattagacctacggatgaacttgatcaggactctgtagagaggatgcagttgggcttagtggatgatgttagcaaggttgcgaagctactcggaggaaagaaactggatgaaatcatgaaggtacgtcttttgcttctgtttgttccggtcttttatgtgttaaatacatcactatataaaactctggtcaagcagatatgatagctagattgatcaacttctacgactcgccttcacatttttaggatatcgagcacttcactgcaaacccaacgccgaaagacctcacaggaccggtagaggagaatccagaatatagcttgattgtcgctgctaacaacgtgtctgttgatattgaaaacgagctaatgatcgtccacaaggtgagagccttcttcctttgactctttgttcatccgtttgtttccatgtctgacgtgtttactacatatctctgggtagttcattcgagatcactactcgcctcggtttccagaattggaacaactggtggctgatccttggccttacatgcacgctgtgcttgttctcgggaacgtcgatgacctgactagggttcctcttcacggagtgttaacaccggcggtgattatgacggtcagcatgactgcgagtgctacccgaggacggacgctgtcggaggaagaatggactgttgttcagaggggatgtgaggctgcaaaaagtctcaaggaagctcgggataaagtctgtctgtctattttgtagacgtattttctttccaggggtttgatttacttatgacgtttctctcccttatggtgaataacagatttttgcgtatgttgaatctagaatgaacatcttggcgccgaatctttcggctatcgtgggcacgtcgactgctgcaaaattgctcggtgtagctggtggattgacagctttcgcaaagacaccggcttgcaatgttcacgtatgtcattgttgcttcttgctttcttcctgttttccctttattcatttatgttcctaatgatttttcttcttctgtcccttttgctaaagctttttggcgcggccaagaaaggaatgtcgaatggattgggatctcattctcagatgagacacaccggattcatctttcaatcacctgtggttcaatctgtagctcaggagttcagattgaaagctcagaggacggtcggcgcaaagtgtgtgttggccgccaggatcgatcttgagcgaggttcaagagatggtaggtccctcttgatactcgacgagcaagagatgaggaacctcaccaatgaatccatctggggcttgggtttgtttcgtaaataggatcttacggaatgcaacttcgaaaaaagatcgatgatcacctccgaaagctggcagaaccggcaccgatgaaggtcactaaggcattgcctcgacctgatgaggaaaaaaagaagcgtaggggaggaaagcggtgagtaaagttctctcgattgactctatcttctcatttggcgttgttttttttccttcttcgctcaatttttttggtttgcactttcctcccttctctacagagcccgagcagagaaggatctgtatgcacagacggagcttcaaaagttgcagaaccggatgtcgttcggtgaggctgaggaagaggccggtggctacggtgatgagactgttggcatgggtatgattggcaaagctggaagcaaaattcggattgcaagcgataccaagagtaaacgtaagttctgaattgtgtatgctagtgtgtttgaaaagaagaggtgaatttgtgtaagctgattgtccatccgttgtctttctatgtttcaatctcactcggctccatgcagtcaaggtcaccaaagccaaccgattacggactcagttgttgggacgatcgactacgacgaacgatgcgctctctggaacatctacttctctgtcgtttaccccggtccaaggtttggagattgctacgccttctttatcagctaccgagagagtcaaggctgcgaatgaccgatggttcaagtgggtgtctttcttttcatatcaatttccttccttccgtctagaagaaccaagagtgggatgctgaagatacggttacatcctgatacttctgattaaatagagaaggaatgttttcccatgtggccaccggtaaaggaacaggcgcaagcggagtgttaggaaaatagataacaaggacgtgtgtgtgtacatatatgatgttgaattgaatggatgagagagaacttgagagtgtatgattcatcattggctgttcgatgttgaccatgtgtgaaccactaccgacgactgagtagacacacacaccacaggtctcagggtcacgagataccaggcaccaggcactcgacgctttcgctccccctggccgatgaggaattcggccggtcgacgcgagcgactctcgatcgatctgctgcgcaatttctcactctcctcctcttttacccgtcttctctttggctggttttctttttttcctctttcctcttttcccacacctcacacttctgctagagcatacatcccatctttccatcgcatacatccagctgaaagaaatgttcgccatcagaaactcccttcccaaggcagtcagccgatcggttgtctctcctcttaggtcgatcgccactagtcaggccgtcagacaggcaactgctgttgagagctcgaacgcttctgctgagccggccactgataccaaggtcgtcaagaagttctcgatctaccgatgggtgagttcacagttcttttcgtctggagtagatcatgtgtgagcatgggtttctgggtatgggttcatgcatcacttgggggatgctaggaggatgaatcgagggaatgccaacatttggagcacatgggagcgtccggattggctgtttttttttccttcctcattctttctcttccctcgcgttctcgccctttcctccttcgatcttctctcaaagtcgagattaggaacgatgatcgcatcagcatggctcttgctgagagaccaaagaaccgaggaacaatctatcagggacaaagatgctggatacaaaaaagaaggagcgaaagaagaaaaaaaaacagccatggtgttcctttgggctatcatcttctcttttttctctcgtttactgaacctttctcgcgttttcttcccaaagactgacgaatgtcctcctctttaatctttcttgctcattctacccctggtgcacatatcacgtaacagaaccctgaccagccttccgagaagccccgacttcagacttacgatattgatctttctcaaaccggacccatgggtgcgtcctttttggccagcttttcacaacgatcccaatgtctgctctgcttacctctgaacttgtatctcatgatagtcctcgacgctctcatcaagattaagaacgaggttgacccgacgttgacgttcagacggtcctgccgagagggaatttgcggatcatgcgcgatgaacatcgacggtgtcaacaccctcgcctgtctttgccgaattgatcgagacgagaagaagacttccaagatttaccctttgcctcacagtgagttgtttttctatatgctgcgtccccagaccttgaactgatgacaacaaatttgttttttgcatcctgatagtgtacatcgtgaaggatctcgttccggatctcaccaacttctacaagcagtacaagtcgatcgagcctttcctcaagaacgataacccaccggctgagggtaagtactcctttgtcttcttgattatgaactgatctaacccccgtcgttaattgtttttgaaatcgtgtctaggcgagtacttgcaatctcctgagaaccgaaagaagttggacggcatgtagtgagtatgatggacagttttgatgttgagcgcagaaggatgttagctgaagactcgttcgttctatgttgacctacactcccttctaacagcgaatgcgtatgtcctttgctctgtttttcttgtcactcttcttcatctacatccaaactgacctctttgtcttctgctcgaatagattctttgcgcttgctgctcgacttcatgcccatcgtactggtggaaccaagatgagtaccttggaccggccgtgttgatgcaggcttacaggtggatggccgacagcagagttcgtccactaatcttactagaaaaacagcaatgattttcggcgtgacaactaactttgacttcttcgattctgtttgtaggattcctacaccaaggaccgaggagacaaacttcaaaacactttctccttataccgatgccacaccattttcaacgtgagtttatataacttttcaatgagaacccttccttttgtcctgagtcgttgatcaaaacctattcatatatgaacaaattgccatacagtgctcccgaacatgccccaagggtctcaacgtacgtataacttctcaaagcatgttcacccgcatcacaaaaaactgattccttcgcttttgcccaacatctctctcacagcccggaaaggccattgccgaaatcaagcttgctcttgccaagaacgaggcatgagtcaatcaaggatatgacctaaatgtgttcctttctatgatatccttttttctcgttcaacccacagggtttcttccattcatctgtgccgacttggttcttcccctttttttcgtccttccctcccaatccaccccatcatctttttgcttctctttctttatacttccttttctctgtctcttcgtctatagtacccatcgtcgtctttttttatcctctctttcgctcgcctgcgtctggctgtagttgtttctctaatatcttcatcgcgtgtctttatcgcatggtcactccttttgcatatgtgtgtcttgcatgcctcataccgaccgagagaagagggagagtggatgaaagagaaagacatcactgaatgttgaaggacggcgagtagacgaagacgaacaatcaaaacgcgtgattgggtcacgaaacgaatgagaattcattttcatttgaccatcaacgacgaccgacgacgatacttcaaccaggaaacccgtgaaagcacttgccaatctcttgttattttgctctttcctatcttctccttttgcttatctctttgccttgtccacctaggtgtgagtgtgttcttctcttctgcgaattgtatcaagtccccttgtttggtttgagctgatgagcctttctttccttgttttcctcactgcgtggtggatctgactgatggttatactgttttgcccttcttgctaacgctaacggatcaaacggacgttgctgttgctgcatcttatctccaacttatccctctttcgtttgcttggtcttttctctctttctgttgagacagcgataagattttcttctttggttggcgacgcatacacaatccataggcgtgaccttgttcccaactcgatttttttctcttttatccacgtaggtttgtataactctggacccagtcgtctcaacctttcctcgactccatctttctacgccacatcacattatatcactctcccataggataacacagcaacagcaacaacaagcagcagtagaggcagaagaaaaacaaaaaggacgcttgatggataatcaacaaaaccaattcgagccgatggacgcactgcacggaacgccatctttctccaatcaaatccaagcccccgccattctatcatcttacccccttgctccttctcatacgccgcctgttatctatacagctggagtcacgggcgatggtagtttacgacagaatggagacgttatcggccatcaagtcgagcatacgccgggcgcagtggatgtaatgacaagtcaaaagacatttctaccagatggtgaactcggtttcgacccctcgagagcatcatctgcgtccacgtttgcgtctgtcatcgatgtggatgtattgacaggaagaatggatggacatgggatagacggcgatgggaatggagatagagatgccgaacgtgtcgaggagaaaagggatttaaaacgatcgttcgcagaggtcgaaggttcatctgatggcgatggcggtcttctcaacggtggagaaatcgaaggagatgaagaacaggaccgtgatggggatggcgatgatggagacgagaccatcgtcgttctctcagagttggatcgagcttcggggctgggaacggacttggaactagagattaaaaagccgaggagagggagaccgcctggatcaaagagtcagaaaggaccgaaacccaaatctagaactacgttcgttatctttcttccttcattttgtccagccaattgagtttgagcttattttccttgtttttctttcgatagtccttacacgaaaaaaacgatgttaacatcatcagtagccagcaccagtcggtctcggaaactcactccggcccgtccaaccaatggttccagctcccatcacaccagcgcctcattacacagtcccagtcgagcttcctcggcaaatccgttgacccaatctatttcctttgctgctagagcgccttcacctacgagtgccgaattgagacatgaccttcagcagcttcgtgctgttctttctccgttctcgcctcctcattcgccagccatattagggacttctgctgttgatagttcgggtgttgaaggtggaggtgtcactgtgaaatcatccgaggcatcaatcggagctggaaattcaaggaccagaataggatcaaacacacctcgaaaggcatctagaccagatggggttccttcatcgccgttgtctgacgcacccgaaactggaggaggtagggatggtaccgacgcagatttcgaaggcatttcgagtgcgcgggtgggatcgggaataggatcaagcagaagggggggaaatccaaggttcgtcgatggtggaccgagcttaagaagaggaacacctgtaggtggggattcgaagggtaagggtaaagaaatcgatgggatagatggccaggtcgagaatgatttcgtaagtcctacttttgctgattcttctcttcctagatcgtgtttacatgaactcaataatgctttcttggtgtaacaatcttgatggaacccagccccagctcaataacgattactgtgaggcatgcaaaggaatcggcaggttcttgtgctgtgacggctgtccccgatctttccactttctctgccttgatcccccaatcgactttgataatattccggaagaacagtggttttgcaaggaatgcagcatccgaagggtacgtttgatagttcattctgatgcgcgcgctcgcttctgttatgtttagttcaacgttgagatggcaaagctgatatcaatgcaaaacaaaacaaacgtcaatcagtcgtctcttccggttccgaatccaccgccaaatatattcagttcgctgatccatcaagtgcagatgacaaatcctatccagttcaaactacctgtcctcattcgatcacatttcaaaggggtctctgtcgcccctaacggaagttatgttaattctgaggagttgagacctatgaaagccgagtatgttcttctctttgctctctacttttcttcttggtgtctgcacctttcctccgctcacatattgcttttgacggtcgctacttgatacacagtcgaaccggttttgtagttgaccgagatccgtacagagttaaagatggaaaaggccaaattctatcatgttatagatgtggaggctcagccgctccactcgagggttcgaccgaagttcgaccgagtgtagttgccggcaaaccttcaatcgaagtcgcgtcgtggcggaaaatgatctcgtgcgattattgtaatctacattggcattttgattgtttaagtccgccgttagcgacaatgcctcagatctccaaaaaatggacttgtgagtgtctctttcgttttcctatcttcgatccgagtagttttttcttctttcccctttcttcgttcttccttcgtcttgacaagctgattgtgggttgtacgttttgttgctatctaacgaaaggtcctttgcatgctgatcacgtcactgtaagcttgttaactgtgttctcttacaatgttctctccggatgttttcagctcactatcaaaactgttcttcatttttctagcccaaaatccgagttccgaagcaggggctagaatatatcaatttgaccggtccgttccaaagaaataacggtcagatcgaagtcatcccgtcagccgatccgaatagagttccgttcgaggatatgctcgtcaactccaaacgatatcgcgtacctgaaagttcaattcgtttagacttctggagaaaagccacgatcgaacgagctaggagaatgaacggattatgggaatcagagcagcggaaggaggaggagagtgatgtagagatgaatgaagatcagggtagtgaagaaagcgagagtattggatatgaagcatcttcagcacgacttctgtcttcatcccctcctcctccatccgatcatcttcccgctactgttgtctcagggatcgagactaaggtttcgcccaagcttgaagagcttgttcgcacagaacaagatctccaagagggatcggctgagcccgtaggctccgatgtcgatgctgaaggggaggtcgatccagattatattctaccaccgccaccaacaaccggacctgttgtccttccctcctctaccgagtcgcgatctcaatccctcaaactcgaatctgaagttaaacccggagagaatggacaaatacatgagcctacagtttcaactcctttagaagcctgtgtctcttcagtaacttcatcaagagcgacgaactacccgacgatccagaagattaccttacggctcaaccgaaactctgcttcgcccggccctcccggttcgcaaaagccaccgccgcctccgtcaacacatctatctgcacctgtctctgcaccagcaccgtcaagagacgagagaggagaatcgttaggatcgacaaattctctggaaggactggatctatcattcgctgaactttctcaattgatggctgttgttagttcattttctcttcctcctcgtttgatccgtttgcattcagagttgatactcagtacttgggtttctctttcccacttcttgtcttgtttgtcgtatctttgatttgggaatgaatagcgggacttaatccaaacaagaggaaagaaacagattctggaattccttacatcatgaaaagaaataacacaatatatacctcccccttgataggaagagttcatacagccataatgacgatgatctctttgttgtgttcattcctatcttttgagacaaaagttgaggggaagataaggcgaagagacagacgcgtgcgcaaacggaaagagaagagatgccgtctctaatataatccgatcaaggactcgatgtagaaaatcaaaatgttcttcatatagataacaacaataacatttggaacccaacgctctgctgaggtttctcttcgatgtctattttttctttagaccgcaccgctacttcgaccgatagctctagcatcaccttccaaaacaggcaactcaagctctcctttgtccggaggagaatccaaaaagccagctttgatcaaccaagcgagatacctgcccaagacgtctccactgacgttcataccttccctctcaccttccgccttcaacatttctgtcgtgttcttgtcatctaactctgcagactttgtgctcgttggtagatcgtccaacacgaaatgaaggagtgggaagagtgcgttgtcgcctacgtctaggacgtgttgttcgagcctcgatcgccagtccagataagctgtggtcttggttcggtaaccgtaggaggctaatggacctagaagatcgttgtatctggtcttgggcctggatgtcacgtggcatacagagactgaaccgaacggtgaggatgagtcggttgacgaaggcagacgaacggaagagacggaaacgattcgagcgacgtgatcgacgggaaccatgttgatcgtgttgttgatatccggaacgagaccaagttggatggaacctttaaccagcctccagatgaaatcgtccgtgttggtcacagctgtttccgaatctccaacgatgtaaccgggtcgaacgatccatccagatagtcctctcttaccagcctccatgatcaacttttcagccacccacttgctttgaccgtatccggtggtcaatccggtcctgccaacctctagatcgtctgactcgggcaaaccgggctgaccggcctgtcggagagattcagacagtcgaacgtagtgatccttctcgacagtagccgtagtggacacaaaggtgaatgccttggaatgatgggctcgggccaggtcaagcgcggtcaaagtggagagtacgttgggcgctcggagtcgggcgtaatcgtagatccagtgaacctgattttaccaacaagggaaaacgcatagaaaacagagagtggagccgatcagacaatgctccgtaggttttagatgactgactagataaaggagaaggataaacgaaccatggctccgttgtgagcaatcacatcagcctcctcagcaacccggttccaagtctgttcatctagtccaaacttctctgccgatagatcacccaccacaacctcgacctttccatcctttacccaactctcatcccagatgtttcgcccctctccgctctctctcagtcggctgagagcgtcctcctttgactttgctctaacgtgacagatcaccttgccaactttgccaacccttcgggcaagcagatccctaaggatgaacgcacccaggaacccggtggcaccggtcaagaaaacggtcaatggcttctcgccgaatccaactggcaacttctcaaacgacgctggaagatcggcaaccagcttgtcgaaatctttcgagtaagcatcatcaccctccgctccaccagccgtttcggtcgagccaccggcagagggctgcgcggtggaagtcgtggtggaagcatgggcaagaccgaggtctccctgccgaagggtgtcgatggcagctcctagggctcggatggtgggagagtcgaacaccaagccgagagggacgttgacgacgaaagcctttcggatctcgaagatcaaccgggtagcaaggatggagtgtccaccgagatcaaagaagttgtcgtcgatcgagatcgggctcgaggcggacggaaggagtttagcccagatgtcatgaatggttgactcggatggagaaagtgactgagcaccagcggcagactgggacgccttggactggataggggccaaggaggtatccgggaaaggaagcgcaggcttgtcgatctttccgttggggttgagcggcattcgagccaagggcacgtagacttgaatatcataactttcgtcagatcatatgcagctttaatcgagaagaaagctgagggaaatcaaacataccggaaggaatagcatagctcgggagtttcttcttgaggtgctctctgatatgcttgatcaactttcggtatctcctgacacccttctcgacctctgttcgccttcgcttttcctctccatcaataaccacaacctcaccctcatcctcgtcgtcctcgatttcgctcgtcagtcctttaagttcgtctccgccctggggaacaaagtaagagaccaagactttttcctcattcttgtctcgtcggacgagtgtcacgttctctctcaccaagggatgtctgctcagatgagtatcgatctcacccagctcgattcggaaacctctaatcttgacttgatcgtccgctcgaccggtgcactcgaccgtaccatccggcagatatcttccgagatctccagttcggtacatcctgtctctgacaccgaaccagaattcactctccttggtgccaacgagggtgtcctctcgctgaatgccctgtccgaaccaactgttgataaacttttccttggtggctgccgggtcgagataaccttctgccattccaccacttcggacgtatagttcaccgacctcaccgatcgcacaggggatcgtcctgtccgttcggttgacgacaagaagctggacgtcgatcattccctgaccggcgggcatgatgtccttctgggtggataggaaggtcgagtctttgctaaccggggggatggcaaagtacgagacagctcgttgggtctcggttgtaccgtacatgttgatgattcgaacgttggccgcaagagcctgaagtcgagtgcagtctcgcttggtcagaatatcacccacaaagaaggcgttccggagcgtagggatctgggcagtcgcttgagcggaaagaagctgtcccatggctatatatttggatagttggcaagacggagtaagagtagaatttcagtttacatctctttaagagacatggccgcttgatgaaaggcaagtattaagaagaaaaaaacgaaccaggcgtcaagtgagtcacggtgacctcactctgagccatccattcggccagccttccgggggttccaatgtcgtcagccgttggcacatgaagctgggctccaaggaagagcggggtgaacactgagacaagacccaagatggcatcgtttagaaattatgcactcatcagagatatacaagacaaaggggaaaaaaagagacagaactgactatctcgctggataggatcgtgcgcaattccactgagcatggtaaacttttcgttctcgcttaggccaaatcgttcgcccatccaggggaagaagtgggtgagactgtagtgtcttcctttgacacctttagggataccggtcgaaccactggtgaaactaagggttcctggcgagtccggtccaagaacgataccggtaccttccgaggcgtttgctcgaacggaatcaagaatgtcctcggaactatccgtcggcgacggtcctccgtgaatgagaccctctggagagagcgatagcgcgggaatgataagtcggaggggttcggggagagattcctggacgtatgtctgaacggttgggtgaaggacaccggcggaggagaggatgacgagtgctcggggggtcgagaccgaaaggtagacggtctgtctggaaggaggataggcagggtcttatttttttttgtgatgaaacaaaagaaggacagcacaaacaaagattcatgatatcagcttgacggcatatgatttgtaccaaagggggaacgattactgaccgattacactgaatacacagccagccttgaggacacccatcacggcgaccacaagctcgacctttctggcggcgtagatcatgacaacctctcctctctggagtccggctttgaccaatcgatgcgccacggtgttactcgcttggtcaatcgtcttgtaggtgtaagtccttcgctcggtactcggcccgtccccaagggcatcaggagagtctaccgactctactacacacgccctgtccggatgggcctgagcgtttgcggaaaagatcgatgtgattgaacccttaaagccgcaccagtccaagtcggccgtcgggtccgggacgacggcctgttgggccggagtgataagcgggagggttgagattgaagattcaggttgagcgttttgaatggagatcaaaagctgaaggagcgaggcaaggagatgagtggaccgttgttgggagaacatgagcgagttgtagttgatcgttactgaggcttcagtctcggcatcctggttgaacacgacggtgagatcggtctcgaatccgattctagattcctgagaggcctgcttgatggtgccgtccaagaatctgactctgaagagaggaccgtcacctcgttcgggctgcgcctttttgaccatctgctctaggttttcgagcgagacggcgtctcgtttggcctctgcctctgtcgagacgacctggtcgagaagggagctaaacgtatcttccggtgcgatgttgatgagcagaagcaacggcaaaggagtcgattctccctcaggcaggaacgacgtgcagacgagtaaggatggatctggcgcgtatctgtggaggagaatgaggaaagcagtgagggcgacttgataggaagtagctttggaagagacgagcgcgtccaacgctgctcggtgttcactcgagagggacacatgctggacggactcgaccaccctaggcggagacggtctggggtaatcggtcgggagagcgagcgaaggaagagaggccagcctggttgaccatcgatcgagacgaccctggagcgaggcgtctactgacatggtgtgtgtatgtgatgtgtgttgatcgttgatgggagcgggagtgagagtctggatggaagagattgaggaaagaggaagaaaaaaaaaacgttgaattttcaagaaaaagaatatttcggaaaaataggccggcgtggaagagaaatgactaggagagggaagaacgtcagactaaccatcttccatgtacaatcaaagtctccctttctttctggttgctcgtagtctataggcgctcagtggatacttcttcatgtggttcttgcgcttctggtcaatgctctttgtctagcagatattgatgggaacacagactgatttcttggccgggaaagtatccaccggtttagaataaccattttcagaaacatgatagaaccgtacaacatatcaaatctagcaacgctggaaaccagcatccagagacacaccagagaagcaaggtagatgtggagcgactagaatgcgtcagagtagaggttcttgctctaccgtcaacgcactagaaggacggactaggggacattagaatagaaaactggaagacactacaaaaaattacactacacaaaatgaacgaatccattagagagaccattagggatgggacaagaaacgaataggccgttgattgacacgtgaccgcaggcttacgtaaaacgattagataagcctccgcctccagccggagcgatcccagtcgctcgatgctgttgcgcatacacagtcaaccacaagcactggcatccgtactcaaccttcaagatgccaatcccaaacatacggacagtgtacgcagattatgttgttccctcgtttgaggagggagtccgctaccttcgctcggctccagacagataccgcaagctttcgactcccgcaaaattcttcgcctggttcgttttctaatcagatcgcacctctggtgcaaggcgatggctcgtctcttttttttgatgccgtctgaggttttccttcaatacacaaaaacatgacatacataggtcactggtcctgtttcatgtcgtcctcatcaccgctattgtgcaaatcggaccaaaagccattggagatttcgttcgtaccgttgttttactttccttcgtccacaggcaaaaaggcggtgcaggtcatctaatcacgatctaagcttgtttggttttcccttctccggaaatttcgccctatcacgaacacgcagttcaccacgttggcagagaacctcaaagcgctaggtttcctaggatatgtgatcgttggaaccttcatcgtgatcgctagtatacctccctttttcggattcagttctgcgtacgtacggaaggagcaatccctctttatgtgtgttttccttcctaatggtgccgaactgacgacgtacactcccaaatacactccaggttgaccttcgccgggtttacctacggattctttagagcaatccccgttgcctttgtatcgaccgttatcggatcaagcatcgcttttcttgcatatcagtatctgttgaaaaatcagttcaagggaattgttggtagtcagaaagtgagcggtgggaaatgggaggcatttcagcttgtggtcaagtcgagatcactaccgttactatgtgcgctcagatggtgtccccttccgttcgcgctctccaacgccttttatggggtccgtctttcttgcctttcctgtcgtcatcctctcgcgttgagagatgtacgcaaacaatacttaaagcttcgtctttctcttttgcttctgggttcttggcatggacagacactcgaagtgtcttactctcatttcctgatagctaccttgtttgtcccgtttctgtatcacgtcttgttcactcacagaatgatctcttacccgttctttttttcttttcttcttctcttctatatcaactcatcttgccctctcgcttactgacccacaatacaaactcaacgaaaaaagaggaatgcttcctagaacaatgatgatcatattcgtaggctccagactggacggcctggctgactctaaagaacggcaaaagatggacggagcgagtagggcgctgaacattttttccgttgttttggcgatgtgtgtcagtgcagggactggctggttagtccgttgtcttttcttcttttcttcttttcttcttttctttctctctcttatcggttctgctcagcccaaaacatctcaaaacacgctcaaaccagatcaagacacaaactgatgagagcgtctgcttgaaaaaaaaaattgaaaacacatgcgaacaggtggatctacaaccaagtcctagcacatctgccagcccattcagtctccctctctccttcgttgacgccttctcctctctcccttgagcgtccgctagcggagcctcttgagggtgatgcgtactctgattccgagtccgatcttgggccagggttcgagcgtgacttggaggcaggccgaggaagaggaaggggtaccgatgtacccgctcgatccgattaccctacgtatgtcctcggagaagaagaagacggttcactcctacaccaacatcaaaactcacgtcggtatcaagaagaacccgaggaggaggaggaagaagaggaggagagggccggtgaggtgttgattgatgctacccccagtgcgagtgcgggtataggtacagagaggtatagagattagatgaaatctttacgttccttagtctttctctgtttttctaccttatcttctcatcttattgtggaataacgcacatcgaatatgaaacagtttatgtaaaggaaacaaagaagaaaaaagatgcaatacaaatagacagacagacaacgtcactgatagacgtgtcgctccttccggtaccccatctcgtgtttttattttgttttccaaaagtatatcaaggctagccagatgcaagcgcaactggctcaagggaggaaggaagcgaagaaagagatttaacggccagagaagagaccgtacattgcggcggtcggtccgtcccacaccagaccctgcgacgtgttcgcaggtcgcgcaggccacgcatccaccagaccgtcccacagctcaagcccagacaccccgacgacgtccccggcagtagtgccatcagcaagaagaccggcacccgtcgagttcgccagccacgggtacgcccgggtcgagagcgcaacctcgtcgttcgcatagatctcgatcaccgagccgtcgacaaacaccgtcaggttcagcgtcttgctctccgcgcccacgatctcgtacagcttgaccttggcgagctcggtgtcgttgccgaacgacttgatcagcgacgacgccgttcggacgaccgtcaggttctcagacgcagggtcaaaccagatgtcggtgtactcctcctcggacgcaagcactcggaagccagccttggccgtcgtgttgagcccaaactcgaacgacccggtcagcgcatagaaccggtccgtcggctggctgctgaacggcgtgtaggccgcagccgactcgttgagcatcaccggggcgagcgtcgacaccgtcgagttgcccttgtatgcggcaagcgtctcgggcacgacccgctggccgagcgtcgtcaccgtgacagacattccgtccgtcgagttctttgtcgaccaggacgcctgctcgaacaggccgggcgtcgagggcgagacgttctcgacgaccttgacgaagaggtctcggaagagggtgaacgcaccctgg

SEQ ID NO: 1657 - DNA, 2883 bp, Xanthophyllomyces dendrorhous
agagggtgaacgcaccctggtagccgaactgcttggcgagtacgaagttgtcatcgtcttcatagatccatccgatcgaaacctgcctatcgttgtcgacggggaaagacacgtaggcgtaacttcgcccccaatcctggacaccagagtacgcaatgttggccgcgaccgagccgtcctcctgggcctcgtagtcaacggcagcccagagaggccagtgagccgcatgaccatctcgacctaagaagattgaatgagcatcagcaggagtggagggcgaaagaaacgatcaaggacacaaagtatgtgtgagatgagagacctaccatgctcagttccgaaagtaacgaaatcaacggcagaggtgtctgagccgttatcccaagaagctccggcttggttcaatcgagcgacaccggcagcctcgaagttgataccgtagtctgtgagttcgaaaagcaagagaaagcgtcgattgagtacggcccggttgaacacttaataagaaaggcaactcacttccactccattcaccgtaagactctgccaaaccagtggtgatgaacggtccgaggtaggtccacttgatgaactccccagtcgtgtgctgcctgtacaagaaaagtcgcgctccgtcgcccttgatcccgccagaaacagtagcaaagtggtcaccggtggcgttggtgatcgaggtggtgttggcgagcagagcctccagtcgaggcgactggaagacgtagggatctcggaagccggctttgaggacacgagaacaggcgagcgaagaaaaaaatacatgccaggaacggacgaagaacaggtaaggcaagcaagacaaggcaggaaaaaagtcggagaagacatactcaggttcttttcgggccattcgtagatcactgggttctgcccggcaccgtagccaagcttggtccaggactctccgttgtcagtggtgtaggcaagggactgggtctcaatgccctcaacttcatccagcagcgcgccaagaggaccagggctggcagaggtgtaaagtatagtggggtaaccgtcgattccgttcttgatgatagttccatcgaggacacctccgatgtcgtagatgtgggaaggccactggtaggcaagtaggagcacaagagatggtcaacgactggacaaaccgaacgagagcgagcaaggtacgaacgatggtcttgtatccctcagagccgttgaagtcggtccaagtagtgaaatccggagagtaggctgagataaggagagtgggagagaaggatagaaaggaaggatgagagactcgttcagttcagaaaggaatattttgtgaccaactaaccggctccttgggagatgtttccccactgaatgtgccttgggttcctatcggaaggcggatgaggaggaccagtgccagggatatacaaaggcgagaacaatccggtcagcttgataagtaaggagaagagagagaggaagagacaagacgaacgactggtaaccggcgtggatggaaccatcagcacgctggaacatgcccatagggtcgttcatccagccttcaggtgcaataagcctagctttgggcctgaagatgttgaacatggtagcatttccgcagaccgtcaagtctccgggcgccacgttctggtcgagcgagcattcggttgaggctgaagagttgtcctgtcgtttgttgagcgcagaaaggttaggcaggtcgagctcggctgcgtacacggccgccaacaggggcaacgtcttgagcagaggactgatcatcggtggtgatcggtgtgggttgggtgggaataagaaatgatgaagagcagaatccgtcaaaatcaaccatccactcgtcctcttttataggaagaaagaagacttgccagatgctatgtcgtacagtacatactggaacgggaccgtctggacgatgactgggcaaggagtatgagtgtaaatgcaagtatgactatgtgacagagtgctaacgagggatctttcaaccgattggaaccccgggaaggtcaaagaaggccaagaaacaagaccaaaaatgagaatcaacggggtacacgacgaatagaaagaacagacattcactcggcgtatttccggggtgtttatgtgtgtgcggagggagcggaagtggtgacgtaggcggagacttggctatatttgaaactaccaagtcaggttaaattcaaaaaagacggtagaaaattttcatctaagtcagtaatgggcgggtatagaccgcttggtggtcctcccccgcatcgtaccattagaatcaatcaaacctcccgctcttttgcttcctggtgttttgtctgtcttgctttgatgatctactcccttggccaatttcaattggaagagaatatgcgaggttccggttgatggtactatcggtgtaaaagcgggtaccgagaagtatatagactaaataggaaccttattctctttgtcttgtgctcctcatctctcggcttttgacattggctctctttctttccgtcttgtatttgattggagaaacaacatcggatctgagataattttgatgcgctcagggaagagagaagaaacacaaacagatggacacagacgctagcggacgtgtttctttgtcgagtaaatacttcttgtcaatttgacgtcgaatggttttggagaacaagatggaaggaacaagtacaacatacggaaaactagcaaggggcaagcagagggagacgcaacgaagatatgaaagaaagtacgatagtaggatacttagtaaccagcaaagagaccgtacattgcggcggtcggtccgtcccacaccagaccctgcgacgtgttcgcaggtcgcgcaggccacgcatccaccag

SEQ ID NO: 1658 - DNA, 2287 bp, Xanthophyllomyces dendrorhous
tgaatctaaaaccctaacccgttttgacacgtggtctgacataccttgttcccagacgttcaacgagttcttctaccggaagctcagagcggatgctcgacctatcgcttcgccttccgacccggcagtggtagtctcccaggcggactgccgactgactgtttggcagtgtgttgaggatgccacccggatatggtaagcatggatctcgcgatgggtgatgcatctcactagatgtcctctgtctcaagatgtttgcgactggacgtctgtctttggttgatgtcgatacctaggatcaaaggaaagcagtttactatccctgcgctactggggagcgaggcctttgcctccactctcggccccagtcctgctgttgcagtcttccggctggccccacaggactaccatcggttccatacgccagtgtctggaacgcttggaaagagcataaacatcccagggaagctgtacactgtaaacccggtgcgtcctgctgtggtcgactgcgtgtgtttcgccgttcagaccgtctaggaggtggctacgtgggctgatatgtgctgttgtgtggggccatcttctgaaacgcagcaagcgattaacgaggacctggatgtctttactgagaactcgagatcggtccttcctatccatcttccttcgggccaaactgtgtacgtcgttgccgtcggggccatgctggttggttcgattaactggacgcacacccaggaagggacgaaggtagagaaaggagacgagcttggttggttcgcgtacgtaccgagcttctgtgctgccttgatcgtttgccctgatcgctgctcaggtctagaagggtaaacgagatatgcttagccagcatagactgacatggatcgtctcgttttgagatctcgacgtcaacaggtacggtgggagcacggtgatccttgtgacgcccacaggaagtacgacctgggatgaagacatcagaagatcaagcgagcaagccatggaaaccctggtccgggtgggcgagaggataggagggctcaactgagagcgtgtagtacaggtctcggtagctagatatgtctttgccagctttgtgtatcgtatcatgaggtcagaatgatatgtattttgcagaaaaatcacacatactgcatttgctcggactcgtgatgtgtgtttttgaaggcatgaaatccggtgggttgtctctgctggcggtgttccaaagcggccacagcttgaatgaaaaaagaatttggaaggataggctactctaaagacactggccgttgttagattctagtccaaggaaacctaagaccaagaaggaccatgtatcgaccgttgttggttgaggttgagctcatcaaacccaatatctgcgactgtatgaaatttagtgctgaatctgggtgatgtcctagcttgttgaactatttgctcgtaaaatcatgaataactatctatctctataaacgagaccaaaagggaatagcagtatttatgcaggctcagtggagcgaggaaaggcaggggaaaatatgtttaaacacgggatggatggttcgcataggtcgggttgaccacaacctgatggccatagttcttcgttatcattggggtcgacccatcagagctcgaatcgtcattgatttgatactgattcttgtttcggttcatgaagtgttttatagagaggtacgccatcggcagggccaaagctctgttagaaggtgagagatgatcgtcagctcatgatgatcgacaatcgcatgcattcgaatataataagaccgctcacgcaagcaaggatccgatggcaatggcggcgtatgttgttccacagccgactcctgccgcacatcctccattgatcaatcccatggttgttagaacgatggcggcgatccaaaagacggcttccaagatgttgagtatcatgtttgccttcaaactggcccatcgatggaagtaggacacgttctcgctcaacactatgtatgccagtgtgatcagagacttggcagactatatacaagcgataaggatatcagtgtcggcttctggacagtccgtcctatcaagaatagaacatcagtcaatgcttaccacactgagcaaccatctggagcttgatgttctcggtttgatgataaacatcttgaccagaccgatggcgaggacagcgacagtaagaacgaattggatagcatggatgatgttaatcagcctgatctcggccttgtgagagggcatcttcgagattgaggtatctgtttcttcctgt

SEQ ID NO: 1659 - DNA, 39122 bp, Xanthophyllomyces dendrorhous
tcctagctcgatgttgtaatataattcatttgacccctgcaccgccttgaagtgcggtaagttggcattcgctcgacggccgccgttcaacgccacagaaagttttggtggaaaaggatggcacagccattgtgtaaaacacttttttgccaagtatatctgtcggggctgtggataataagcaaagtgcgtatcgtcaaaatcttccctccagatccgacagtcgaactgtgcgaaacaactggagatacaaccccatacagtcctgaaagattttaccggaataaggctatgttgagcaaattcagttgaaatcgtgttcgagagcgccaaacgagatggggtagctagctatgtggatggtaaatgtatctctaaaagagtccgtgtgttcgatatagtgtccagaggtatgttctcggcaagatgaaacgcgatgataggcagaaagatcgagtggtagtgaaaaaggagagtgaaatgcaataaagtagagaataacgagtggatcgatcgagcccgcgttgctggaagattgcgcatgctcagagaaggagtgtggccagtcccatgctgagactcaagacggtagacagtcccgcacccagctgagttccgctcctagaggcagagcttgcgtctgtggagctggtcgacgagggagacgctccagacgaggtctgagctgccgtagatccagatgaggggaagacaagctgagcgaccgttccattcagtggggagctcacttcacactctgggatctatgtccaggaacgaaacaagagtcggcatgagcacaagcacgagatggcaaaaaagaagacggcaaaacggacggtgatagccttgagagttcggttcctgttcaaatccaagttgtctccatcgtttttagctaaactgacttcggacatttgggatatgggccatcagagtagaacggataacgcacgggtagaagagtccccagtggggttcgacaccaccgtagatctctttccaggtctcgtccttgaactcgaagaagaagctgaacaaaaagcggaagccaagcaaggtgcatgagcatcgctggcactgtgatgattgggatgcaggcctctacagttaacatagccaacgaactattcggtgttgttcgcgttagcttggcagttgaattcgtccatgaaggtttgaagtccaacgatcgaagcgggcgaacctgccccgttggtcgcctgtattccaggatgacgacagatcagatagtcagccaaacaaacgtagaggatcaggtgtctgaccaagcaaaatgagtgaaggactgacgtcggaagcgttgtccgaagactatatcaaaaagattcaagatcatactgatatgtcagatggaggcaaacagcggtgaaataagtcaaaagacgtaactaaccgtcggccatccggtctctgcgatgtacatagtactggagtcgacgaatacgaagaagagtgtgtggctgatcagtcatctaccttttcgattcagaggcccgcgacgacagcacactcacggattgttggaagcggaagcgcaaacttcgacatcaaactcctcgaaaaagttaaaagtccatgctgcagcatcactgtagtcaaccgagccaaacctgcacagcgacacagaagatcaaagacgagggtaagcagatgtagggaaagcccacagctcggaccgagggtagcaatgagcgtaccaaggatgaacgttggcctggaagtaatcgacgccttcacaaagagccagcgttgcggcagacccggcatcagacgttcccacagggatcgtcacattcaggtctagggcactcaatgcagctgtatatgccaacgagagatgtttaatcatttgtcggagtttctaagctcctagcataggtcgagtcgtacaaaaaaaaatacctttggctttggtcacgtagctcagcaacgtagttctggcggcgactccagtggcatcagttgcagtgccgtcaccgtaagaatccaaaaggaactcgtttccgacggtgattccaccgatgttttttgttccgtactcattgatgactgactcgatcgcagtccattggcgttcgtagacggtatcgatgtcggtacctgtggagaggtagatgccaatccataccatgagatctgcgtttgtctgccggatggcttcaaagacgtacagcgtctggttacagtcagaggcgctaggaggaggagcaccgagcttcagctatgttcaccccacagagcgaaggtgggaaagggagacaaaatgcgacccactaggttcggattcggggggtcagctgagcgagcaagagcacatcgtttgtcacagcttcctgggtcgcaccacctttagggacagaaggatgattagtgatgatgtgagccattattcgaggggatgcgtgcgatgttgacttacaatctggaagggttacacctgaagcagagtaagctattccatgaaacgactgtatgaccagaacattagcagaggtgagcataaagaccatgcgtatcagttaaaagtgcacgaaaggcaacagatcaaggacaaggatagaacatgtgtgtatgtctgtgcgcactctagtaagattaggattcagtgcagtgacttgaattgagccgtcagaaagtgtagtggccgaggcggtaaacgtggtgaggatgaataccagggagaagagcgaagcccacatcgtccagattgaggaagagaagattgtgaaagatcggatgatggtcaagaagaagaaaacaaggaaacaaagaaggcgatagaaagactgtgtgatagtaaaatctgtggaagagaggtatagaggaatgctcgaccgtgccggtcagttctttctttagaaactatccccaaggggggagcccatgagaaacaaatcggtctcgagatgtgcccctctaagccccgctctagccgactgacacgatcgcctcgagagacgcagaagcagatcagatgtacatattgtgacctgttcgagttagcgagttgtattttaacgcagtcagcatgcggatgacagctctctttagaaattggctgggtaccaaaaagcgagattgaaggggagctgccctggtccaaatttaacgatatgttagggttagtataattttacctgcggattgtgctctttgaaaaaggttaaacctggatcttgttgaacaaccatagagctagtgatcagttttgctgaggaaactggcggatcagcgtcttctcaacatatagtgtaaccagactgtagaagatggatcatgtacgagctggtttctcaatgcaggcctagatcgagattgcgccaaagttttcctttttttttaatacaaaaggttaaataaataaaaagataaaaaagagattctgtatatgccagcggatcattgtgccatagtcataaatgattcttttcccttcttaccggactcggatggaggatcacccgaaagaatgaggttgagactaaaaaatggcttgcgccttatgcagagcttgacgagttggtactccccgtgggcaagacaagtgtcgatcgatcgggtcatctccttttcaccgtcggtgcggacatcgccgcgtactcgcgctctttgtctccatttcacaaacactttctcttcacaatgggggagctaatgttaattttcttttctgcctctctttgatgaccggtggctgcggcttgactcaacgaacctcgtgggtgtaaagcttccagctgttgtgattgtcgtttcgtcttcgttgtcactactgctgtcgctgtcgccgttgttctcggtcccaccaatctgcggtgtgtctgtcttgttctgtattgcctcctggcgttcgcagtgaagggatgttactcttactatattctgtcttattctccaataacggttgacatcgtttccggacgccatgtaccgatgggaagaatccaggccgagatcggacacccatacccacccaaacctccaagccaagaattggagactccaactgttcagacaatcttatttaacaaagccataaagttatatccattttgtatccctcgctcaatcacatcatccttctatattttgccatcgaaactatctaggatttattctctctcccctttttttctctgacttcacattcttctctaaccgatttcctctcgcggcagtcaatgagcgggacaaacgacctcctgcgttctcttcttttttatatacaaagttctgaattacgtgttaaccgaaatgaaaaagaagatcgacgacaaaatagaaaaagagagaaagagaaaacaaactggcgtccatctctcgttctgacgggccacatatacacgcacgcacacaaacgtacacacacaaacaaagtgtaaacattccgaacctagaacggactctatttgttctgtgatcgagaacagaagaggtgaaggagaaaaaaaagatgagccgtcgataacttttcgttttgcctctaggtctcttgttctccagccagccatcttttgcgcaccgtagtaagaatcactcttatcaatctgtcgctacatacccttatcgtaattctctattcctcccgcctagtctttcttctttctccttctcttccgcccgcccaaacgcttccttcgtttcttcggatttttttctccagtctttacatctctctccctttgctttcatttccctctcctctcctcttcgctaacctcttctcggagtcggcccacccgtaagctcatcagtgctagcgtcgaccccttttggtccgttcgtctctgggaccattcacaccttctcggatctttaatactgtgtacctgatcgcttgaatcgtgagtttgtcgtcagccttcaccgtgttgcactcattttcttacggattgttcctcttctttcttctttctggcttgctctttctacgctctaaacattttctttgtgaatcttaggcttaccgctttttagatcgaagccctgtctacacatccggtctactttggcttctgacacttcaacttgtcggctttccgttcatctttgctctcattcgattcctcctttccattcgggtctcctttccgtcatctcataagagccttgtgctgttctgtaccctgtgggatttctatcggctgttctttcaaggtatcggctcccgccatttcttccattcgacaagctcagccttttctgtctgttcatgcaaaccttgacgctggtaagcctcctttgttgattcttatagactgtctcgttgaacttttcatccaactgtcagtcaaccaaacaacatccatatctttttctcccttgatcaccggtccaacgatatctctctttcctttcctcctcgcttctttccatcttgcctcatctttggctgagaaggttgaacacaaacatttctctcgctttatttatatactccgctcacatgagtctttccttcagcaagccgttgactaacaaagaaatctttgcgcctatattctcaattcctcgctaaaagtccgcccagattgtatcgtacttagcagcttttgactaaggaaagaaacaaaccagcgtgtcattcctatccgtttatccttctatctttcactgtcttctcatcatctctttcagcattctacattcggaaggatccgaataatgtcatcatcctcctcgctcgttgaatcaaccaaaccatctctagcaaggcatcaatcttattcaaacccatctcgcaaaagaacctcatccggtcgatttccaactgtttatccttctactgtccacccaacacagactggctccaatacatctcattcctcatcatccttattcatctcgtcgtcttcgttggcgaataccgatggaatagcggattctctacacaacggccggcctcctctcaagaagcgagcgtctcccggaacgacaaaagacaaaactcagcctccgtcggcgctagcgcctacattgtcatcgtcttcatccctgcccctctcgtcctctcaatccctttctctgccgaaacaacaacaacaacaaccgttaatttcagtccaagcagagacttctgtcaaaccaagacttctggacggtcttggctctgccggagatgagcggctgaaggcgtatagagtattatttgaggatgagtatagagacgaggtcaagctatacatgcatcagatggaggttcgtcccgttcacactcatctgacttgctcccttgttccatgctaaccaatctgatttctgtgtgtgggtgtgttctccttattcagagaagtaccatgccaaaccttggtctgatggacgctcaaccagagctcaaatggttcgtagttgcctcaaaagttttgatctgatacacccagaactcaatgactctctttttctttccctttactatcaataggtatatgcggccgtacttagttgagttcctggttgaaatccatcaacagttccgacttcggccagaggtactctatctcgctctcaatatcgtcgacagatatgtgtccaaacgaatcgtcttcaaaaagcattatcaattggttggctgtgctgctttatggatcgctgccaagtttgaagtttgtctgcttccgattataatcctctcaatgcgtagaagatcctgcattgaccatgctttcttgttgacataatctcaaaatgggtttatcgagcaggattcaaaggataaagttccgttggtggaacagcttagagagatgtgctgtaacgcatatgatgagtcggccttcctccaaatggaaggccatgttctctcgaccatcggttgggtcgttggccatcctaccgcggagagttggctccgattggcttgtctaggagtgagctttttcccatccgttgctatcttttttcccttcttcctacaagacgccgaaagtaccgatgactgatttcttctttgtcaaacccaacagacatcccaagaagacgcagagacacaacatgtgacgagattcatcatggagctctcgttgttccataaagagttttgctcattcgttccctctgcgattgctagcggcgctctgctgcttgcccgctggattcttcgcaagccactttcggtaaggacatcaatcgctctttcttaccgtactcgctgttcccgaggctgaccgcaatcacgaacatccttcgcaggttcctgatcctaaaagccccaccgtacaagtcgcctttcacctcgacgtccacttcgggggacatttggcctctgtctcggacgttctcatctccaaatactctcatttttactataaccaggcctctcttctcgttcgacatgaatatcttcgtggtcgacggttctcccttcctgttccggcaacaatggccgcgaccgtggtcgaacccagggctctggcttcaaccctcccaggacagatgccgctacccaccatcactgtcccaaccactccgaacagctccccgacccactcgatcattcctccgctgccaagcctttcgagaggcactcctgtgatgagcacgattgggatgaggcgtagttcttcaaactggtcgagcgattcggacatgccgcccactcctactggctgcatcatgacggccatgacggccatcactccggacctcgccaaaggtggtccgacggacggacaaaaacaatctgtagtaagctcgctacaggttatcaaggagcagcaaacctttgtcgttggagaacccagaatcccgcttgggtctctgaacgctgcagcaatcagctcgtcagaaatcggagctacaagaacgcggagcgggtaatccgacgttcgacttatacctctcctctggccaaccatcctgcggtttagaaaaccctgaacagtgcagagttcaggcgagtttttatcctttctttgttacagcatatgttcttcctcagacatttttcttttcaatattccctccagtctctacaaaacctgtccgttatccaaccagatgttccaccgtcttctgttcatttatctttcggttttggattagtatccttgtcttctcttgcatggctcttcagtcacatcttaatttctgctttaaacatctatttttataaaatttgtctcttcatcttgtcttttacttctcggcctgtatctcttgtcctgtcggtagttcatctttccgtctttctgtctccattttaatctttctttgggaatttccctcttttgtctcaatctccacgtctgtgtccataccctctatactccctttcttctctcttcgactacaatttcgcattgagttttcttttctgcatagaatcagctctcagagtctgttccgctctcttccaacttcggctgtttctctttttatcttctttatccggcttcaatctctctccgcggtctcgtgtgccggaaaaaggtcgtgctcaggatcagcatctggatgtcgtatctacacgcgctgtttgtttcttcatacctttctcctggaatatatacatggtcttcttggggtcctattctttgttttcttcctcttgcgaaacattcctttttaataggtctttgcttggagatcaatagggaagcgtcatataattttgaagagaaagagtccttccttctactgccggaataatcgctggtaggatgggggtaagtactacgaatacaatggttggtataaggacaaagtgcgacgagcaagaggcagacagagaatgggatcaaaagaaaccctcgtatcggttcaagcgattaggatcggaaggctgagaacagacagaaaagaagaaaagaaaagacaaggggggcaaatggcaggaggtagagtgatagaaacgcataccaggaagaagttgaacagatgaaaaaaaactttgagctatttgtttatcgatcaacgaggtgtcggctctgccttcttgttcttccaatgaagactcggatcatttcgaagatcaggttggacggcttgtctggtggaccgtctggtgtctatcgcttgtgcgtggatctgtgctcgagtctgaagctcctggtatcgcttttccgtcccgcggtgcatgtattcccaaatatgcttgattgtattgatcagtttagactctcgatggcctcggggatttagccagtcgtaaaagatggtgagctaagtcaggaatgtaagatcggaaaggtgaagatagtgagtaaaagtccgcgagatgagaacagatgtacgatgtgagattctttagactgacctcttccggatcctcgagcatggcccactccccctcttcaagcattccttcttcaccttcttccttttctctcttgagacggatctcctcctccgtaaactcgactttctctccccaccaagctctctcggccgcgttgcctccttgtaaaaagaccctacctgttccaacgatgaccgcacctccgggacctattagcgatgccgagccgatcccgtcgaaccaccagagcttgttaccaaaccgatcgatccccaatggcttgaccctcgggaaattgacatgtttcctaaagtcccggttgagggcctcttctttgcggagtaacttcaagtcctcgtcctcgattcgttttcgttcggcagagagctgcttggccgaagctgcctttattcgaagctcttctctctcctttgctaacgtctctgctctcgccaagttttctgcctcttttgcgagctgctggtttttaagcgtgttctgtcggatggcggcggacgagatcttgccggaccgaccagaggttgaatcaccagcgagcgaggcggtgtccgatccgtcatccatcagttcatcaggcaaaatggctctcacagcttgttcttctagttcattttctgaggcatcggagagcgaggacatatcgtcttcttccggattaaaccctgggggagcggtcgaagaccatcggaagggttcggacgtgatgctcatcccatcgtcatccatatgggaaggcgctcgagaatctaatccatcgtctgattgtcgaggttctgtcgagagttttgtcgaagcagttccatccaagagatgcctttcttcacttctacatatgcagagtcaagagggaaaagagaaagaagattgatttacgtgagacaaataaagtcagatagtagtaaaatgtttatacatgaaaacttacagctttttgcgctctcgtttgatgtcgatgagatctttcctcacttcggtcaaagcagttgcactatcatccatggcctccctagctacttttgtctgggccgcgatctcacacaggaaggccaaagcttccagtttccattctgagggcaagctggcataccgctgagacggcaaactggctctgatgcctagtcgaggtgaactggcgactacccaagaaggattctcgtcgtcctctgataactcatcagattcgggagggtagaacagcaaatgagccaatatacgtggaagagaaggaacgctctggatgtcccctcgctttgatgaagaaaaaagacatccaaaattgagaggaagagatacgagcaagggtcagtatggcatggaacctgaaagtactgatagggagaaactatcatttggaaaaatgagataaaatgaacaaaaactcacctgtaataggcaagcgacgagacaagcctcccatcttttccttccatccttgtacttcagctctttaccatctcgccatccacttctctccacaatcttttctgactcaatcaagagcagcttttttgttaggccagggtagccctcgatgatgttctcatcctcctcctcctcttcttcgtcttcgtcgtcttctgcttcttcggctgtctgtccaccttcaaccgaaacatcacgagtacttgattctgcaacaatcagatcaccgtcttcattctctgagaacacgccctcaggatctgttcccgaaaatctcgacccatccaacgaggcttggtgaaccgaattgaaaagactcttcttctttcctttgagtaaggagccataggaggtgaatgagtttgagccgtacgtctttagcggtcttgcaatcaacgttggttgaaggtctcgcatgatgacgttcaacaggcaggcatggacttcggaggtgagaggatggggcggatcaactaggtcgtacgtcaacgagctcacaaagtcatccagagtgaaaggagagagaacgagggtctttccgaacgcattgaggaagcaccaggtggtgataagcgtctcaaatcggtcctgtccgaaaggaaggttccgactgaacatcggacgctgcgcggccttcccactggcgatctctttggtcgtcatctcacaaagcaagtcttcggccgggtactttaacggtctcctcctcggcggtgtcggcggttgatcttcaaccatcttgggtggggtatctggcacagcgacgagctcgccttgagagtttcttcttctcctcttcttctttttctttggaccatcctctccaccaccttcttctccgtcttcaccgcctttgtctgccccgttctcggtaggcaggtgagatgtaccatcgaggccgaccggagtggagacgtcttcttccttctttggtcgtttccgtttactaatcgcgcccgacttgaggttgttcagttccgcctgaagtgactcgtcaggtgtctgagggatcccgtacttgacacacagtgccggttttaccatccagggggaggccaaagaggaatctcgatcgatacagtctttcaggaatttttttagaatcgttttagaaaatgtgatccggtctcgactgaagaggggagaagggaaagaggaaggaattgagtgatcatgattgtgctgaaatcaaggaaacgtgagattaggttgtagaaacaaacctgatgtcctgcgcgtccacctggatgagcccttggccctttttccctcttccttcgccgtcgactagtcggacgagatagacataatcggtcggaggatcttctttatctgcctgctccagagagatcgaaaggtcggttcctctcgcgtgagggttctctattgtcggcctggcgtaaatttcttcccacatcttccttcgggcctcgatttgttcttcctgctcttcatcgtcttcgtcattctcgtcatcctcgtcgtgctctgaatcaggggtgggcggaacggatgatgaatttgaacgcccacgttctgacgaaggagggagagagagtgtgcttccgggagacagcggggcgacagaggcggtcgccagcgcagtagtagaattggaggcggccgtcggatgcgagttgggatttatcggtggaagggataggtccttaggagtcgacgggtctgtacgaggggcagctttgtgcgtcttacagatgatggcatggtacttgacgttatcgacatcggcgataactcctattcatcgaaggtcaggaagtaagaactgattgagtgactgatcggatagaaacattggtagtaaacaaccaagcgacgggagaacgcttactctctccattgaaaaatcgatcagaaaactgatcatggacggcgtcggtcaaatgatccagtctcccttggacttctagactcgcccgacggaccgatcaagatagagtatgtcagtctactcgagtctgacactcctgtgttattggtaacagaaaaacacgtacgaaattgaacgctccggaggatagggcccttgagatgttttgggaatttttcatgggtgttgcgcgcttcctctcgttctgatttgagagcttcaaagtacgatagcggagcctttgaggtagcttcacattggaagtctgtgcatgcgtacgtagaaaggagtgatcaggcccaggtcagatcaaaggagggcaaacaaagaacggactcttctggtggtaaaacatgactctgtttgcataggatctgttttcacgaaaggaaacgagcaaataaacgagcggatggatggatggatggatgtcaacagatagatcactctcctcaagaaggaaggaaccaagagaagttgaacagactcgtaatccagaaatatttcgcccgactctttgagatagaacacgttcttttcactatctaagacgagttctgcatccgtctgagttttcttggtgtcatcccctacggtaggagtgtctccatcgaggtctgatcgttcagagccttcctcttgctcgaccaccaacagatcatcatcatcctctatgggctgagtcttttgcggggctgtcgagacagaagtggaagcagaagggatatcagggtggttcgagtggtacacctggacgggatccgggaggggcaggtatcggacttttttccgctgaaggagaggcatttcggagggagagagaaagagaggattggcctggacgcgattgagtatgtacgttggacgatcgattgtccttttcgggttatctgagcctcttttgtgggtccgtccgatgggcgcgtggaaggaaaaggaagcagacgcgaacgggaatgggaatccgataggtgttgtgggtatgagagggctgaggataaagataatttcagatcagctgttgaaagagagatctatggcacgaccggatgagtgaggatcgagagaagcttctaggatgaacgcttggagagaaactggaagcaaggccgatggttgttcagggaaagaacaagacgaacatgtgagacgatatgtgggaagtgtgtgggagaaggaaacaagaggaaaggaaggaaaaaaataaagcgaaagagagcgagtgaatgaacgaaagagacgcgcaatgaatgggcgttttgatttctttctgccttcttgggtttgtctttctctagcctggaatgtgcgtgtgtgtttgtgtacgtgtcttcctgtgcttcctttcttccttcgctctcaaaggatgtcatctatctggtccgttccatcatcaaactctccttctttgccgtaggtggatggatcgccatgtaggtaagaggcttctggctttgtcgctcgcgtctggtagggaagaagaggaaaaaaagcctggagcctgatgtgagcctgtgctggaagcatgtcaggcttggggccgcccacacgcgtcatcgcccaccgatcgtacgggctcgttcagtcggtcgcataaagttgactttctttcttcccatcgccgacgttatcttgcttttcctttctctcctttcttttcctcatcaccatctgtatacattcctcctgatccaatagcagctgcttctactatcaacacactatctgcactactatgtctacagcaagtgaagcccaagttttgtcaaaaaccttggtccatgcgatcccgatcaggatcccgctcctcgtcgggttgacgacgacatctcactttttgtttggaaacatcgcatccgccacacttggtcttccgacctggttcatcgaccacccggccgagttgagcgcccaccaaaaggtctccggttggagttacttctacaaacgaggcaaggtgcgaacccttttacctttgttttctccactctcttccttctcttttcatatttttccaaaagaatacaaaagaaaaccccctctcgtctgtcaaaaaatactgaacgggcaatacctctgttctcggcacaggcccaatacgctacatccgcgttgatctctgcgctctctttcggcctgatcgcctaccgaacgcccaaagggctggacatccgaaactatgcgatcgtcgcctgttcgcttgccagttctatcggtctcttcaccttcaccgccatgggcagcacgaacgccaggttgacagagttgtacaacaaccaggctctcgtctcggccgtacccggtgggctggaagaggcagaggcagagggcttgctccaaaagtggaaagacctcaacgccgtcaggatgacctttgctgctggcgcttggctcgccgcggtcggtgcgatggtcagcgtgtactaaatttgtacatacctcaccgcacacccatactgccatctccctagtcctctgttgtgttgactcttttgtgataattcatgtttgcagttgtactttttagacaatttttgttctccgtccctttattccagaactagccctatgacaaatcgcaacaaacttcagtcatcctatgtagcttttctcgctaatgagattgtgcaagtcttgtgaagagaagaaacaaagcatacacatagaaagaaacaaagagaccatgtttacttgtatccgtcctgaattcattacgtatggcggtgtgaagacagacccggatatctatgcgagaaaagagtaataacgaagagagaaggtgtatttgattttatcagatataaagaaagataggaggcagaaaacagagaacagaaaacagaagaaagactacagtggtagaagaaaccctagagaagaaaccgagatagactagcgatacactgagatatggatgaggaacttgagacggaaggcgaaagaagaaagataaagaagaggggagggggacagaaaacgtctacggacgctcttggtaaagaaaacagacgataggccggcttcgaggttacaaaccaggaacgatcgagacggaaagatatacggaaaagatggatgatcagatagaccaagtggaagaagaaacgatttattccgatgttcttttactatgtactggatgagcacgactagaggaacatccaaagggcgacgtcagaaaaaaggaggcccttgatctcagggacaaccgccccaggatgatgatgatgaagaagacagcacctacccaattcatgcggatctctggaattttctcttatacgtcctgctcacgcctttgcaggcccgtcctttggtccagccttcttctccttcgacatcttaaggagagcgtcatgatagtgatgcatggtaaatgaatatctgtccaacatgtccaacgaggaggccgacaaggcagaatcggacgggacggaatcactgtttgaggtagaagtggtgtctgccgacaaaaccgatgacatggaacccgagcgaggctcgtggttgtaggagatagcgacaggagtagatgcaatttggttcattttacggaaggcgcgatggttatgatgttgctggatatcctgacaggagaaagaaagatggggaaagagtgatatgaagaagaagaagaagaagaaaggaaagactcgagggtttatcttcaagaagaaaaagggcaaaacgaaataagaggacgcggtccgtgtggttatgagcgatctttgagttctgacgtgtacgtccgacaggctatagcaagtcccgctcagagagagggaaaacgaaaaggctagaaagctaaaggcactagagtggatcatcatgaatcatcacttatcatggggagagaagggccagcagggaggaggaaccggggcacgcttcccccgggggggcttccgaggcgcctttcaggtacattcagggcctattcagggatcaggcatttcctccgtccgagaaactcaatcatcagggcaccacagcgcccacccctacatacatatacatatacaaaagaagaaccctcgggtgatcaccgttggagctggcgctgagaagataggatgtgtttggattgatcgccaaaaaactgatcatcagtgacgtttgacaaggctgtgctgatcacgtgcgagctcagaccgttcgttcgacgcgtaacgcgtagattcaacgcgttcaaccgacgcgtcttgatttttccttactctacctattctgttcatttacttcgtccacttttgtgtctttttctctcatatcagatttgacatctgcctcctatggcctcaacatctgccccgttgggcgtgtttgctcagaaagcggctactctggataactatgagcttccctggtgaggtcgttgaccttttgttctccatcgctctctgcaatgcagattgctccatacctatgcttttcaaagctgatccatccctctcttcgttcttgctctctctctctccttcctccttcctccttcttcctttttctgacaacgctctctctagggtcgagaagtacaggcctaaagttttggatgatgtagtgggaaacaaagaaactgtcgagaggctgaaggtgattgctcaagacggaaatatgccacacatcatcatctctgttcgttattccctctccttcgtgctctctatctctcagtttaactgtcttctaactatcttaccttgtttctcctatttcttttcatcctgtctacttaccttcaccggtttgctgatcaatgaatcaattcgctttatcgtagggtatgccgggaattggaaagaccacgtcgatccattgtctcgcccacgcacttctcggtgacgcctacaaagaaggtgttttggagctcaacgcatcagacgaacggttcgtccagggattccacgtcttgtccttctcttcatccgtccgccatactcactccggtctatattggtctttcattcagagggattgatgttgttcggaacaagatcaaaaacttcgcaacaagaaaagtgacgctgccaccaggcagacacaaaatcatcatcctcgatgaagcagataggtttgtcatgtttttcctattatttcttctctctttcatatctcctatagttatccctctcctcttgtcttctccctttacttcgcctcagcatgacatctggagctcagcaagctctcagacgaacgatggagatctactcaaacactacccgatttgcgctcgcatgcaatatgtccaataagatcatcgagcccattcagtcgagatgtgccatcctcaggtttgcgaaactcaccgatctagaggttcttaaaaggttgattgaagtttgtgagctcgaaaacgtaggtcgctttctcttttgccgtgctgttcctaaacctgatactcattccctccctcgatctctttctttctttcttgcgcatctctccctttcccttatttgcacatttttacccctctttcccttctattcttcacaggtcgaaaccacggacgatggtctctcctccttgatcttcacttctgaaggtgacatgcgtcaggcacttaacaaccttcaatcgacccattctggatttggaatcatcaccccatcgaacgttttcaaagtgtgcgatcaaccacacccagttgtcgtccagcagatgatgcgcgcctgtgctaaaggtgatgtctcccttgccttggacaagctagaaggactctgggcagaaggctatgctgccgttgatattgtcaccaccatctttagagtggtaaagagtttcgacgagtcagttcttttgcgcattctcttttcttctctccctcgtttctgcatctttctccttcgcagattgtgacgaattttcttaatcgaccggccgactgaccttattatgtgactaccaggttgaccgaatacatcaagttagaattcattaaagtttgtgcccacttcctttccttccttttcattggaacggacccgagattgaccagacgataatggggcttctctggattcttatttctctcctctccattcttctctattgtgtcgctttctgttacttcttatgaataggaaatcggttggactcatatgaggatcttagaaggcgtaggcactcttgtccaattaggaggtcttatctcaaggttatgcaagctatcaagtttcgtccattccgtctttatctttcttcttcctattctctcccctttctccttctcttttcctacctcctcctttggttgtcctcttatctgtgaatcaaatcgatcgaggttctgactcttatcttgtgctcaaacagtcaaccctgatgatttcaaagtgtgatcggaacgaaaggacagagaactgatcctcacggacggatggacggtcataacttgtaaatgtaacctataaacctataaacctataaacctataaacctataaacctacaaacctataagcctataaatatccgatgtttttttttttacgttgatgttgatcgcaaaatgatatgcaatgacacaacatgaacgaaagctcacgaacaattcatccattaagctagcgtttttggagtggaagaaggaggagagtgaagagtgaagacgcggtgaagataacggaggggaaagtgaaagattgtatgtgagaaaacgaaaaaagggaagggggagggaagggggaagcgagagaaagtggaggatcgattactgatacaactgtgatatccgcacactgattcaaaagagcggccggacacagttacttgagagataatatcgagcgagcgagaaacagtgataatgacagtgacagagaggagatgatttcgagagaaaagaaagaggagaagagaacgtacggacagaatggagcctaaatgaacagccgcaaagatagagttgagattgcaaggagaggaaaacccggcgatggaagagtacaaggaaaaaaggacaaggtataagaaaggaagaaaataagaaggaaagagaaaacaaaaggccagcacacaagagaaaacaggatgcaaaaacaaatgagcacatggaggcttgttgtagaagagacaataaatatgagaaagcaaaaagatatcaagagagaacacagagagaaggtcgtcttttgtatcagaagggtatccaccaaagaagaacagaatactgaatagaggggcaaagacacatgatggctgaaaaaaaattgagtctccaaaaagaaatcacacagtggaagggtatttcagagtaagtgtaagaagaaaaattccagcaggacaaatatgcttaatgattgtagcccatcatagtgatcaaagaagaacaaggcttaaacaggagggcttcctagcctgcccaatcctcgtcccccagcattactcataccaggacctccattctggtgcatcaacaaccccatcaagtcagtctgcccacctgatcccatacctcctacaccgttaccattgccagcaaacatcatctgttgctgttgctgttgttgttgcatctgaagttgatgcagataatgctgctgttgatgatgttgctgcccattcatgccttcgtacgggccggctccggctcgtcctgaaaagccattagccggcaagttttggattccacccccactgtttggtgaatttgccctatgtacgcctccaactccagatccggtgacgttgagcatcatctgtcgcagaaggtggttttggatctcggccgcgttgggaggcggaagagatccagacgaggctgggccagccatcgaaggaagaacaccggccggacgggaagcagccgaaggaggcgatgcataagagaacgcgccagagggtccatgaagagacgagccagggctgtctctaccctcttggaggggttgctggtggccggctgggtgactgatcggtcctcggactcctcctacgccggttaggttgccaccggacggcatttgctgcagctgtctcaactcagcaatactgtaccctgtctggccattggatggcccttgttcataccgggctgatcgaggatcaatccgtcctcctgggttgatattaccgctgactcccccatccggcaaatgctgaagatgctgctctctttgagcaagctgctgatccaaatcaaatctttgctgcgtcatttgaccttgaccagggtaaaaccttgagaggggctgattgggatgaccagaatgaggaggctgtggtggtagtggtggtggaggtggaggtccacctctaggagggtaaactaacgacggttgttgaagctgagagtacaagtgctggagtgggttattagctggaacgccggcagcacgttgcatctgctgttgttgaagatgaagttgttcacgttctttctgcgccagaagctgctgctctcgatctcgttgagcctggagctgagcttgagcaaggagaacttgatccctatccctttgttgacgttctcgcagaagaatctgctgctgatgttgctgctggtgttgctgctgagccagcccatgggaagggtgatctgagtgaggtggttgtcgctgctggcccgcggggataggcgatcgcatttggtttggaacattggtgttcgtaaaagatgtccggccctgaggccaggctggttcgaaagcaggtgaagactgagcctggggttgctgagtaggaggttcgagggttggttgggacggcaagagtaggggagatgtcgcttgacccgggctaggcgtagagttctgtagcatcgccagtagtttgttcatttgatggtctccacccgagccacctgctcctccattcccagtcaaaagtcccatcaatccggctgtgtctactgcagtcgcgccagcatttgcactagccacagatccgggtgccccaaccggcactcctttacctctttcatcgaaaaactttttgaacctggatgacccacccggagctctccttgattcgccgttttgtagagtagactccccaggtgtaacaggtaccgaagcagaaactacatccggcttgggtcccgaggaaagcggaagcagtgtgggtttggcctgagtcacggacggagtcgatttgacggatatgagaggtggccgattggttggctttggtgaatctgattccgtcggttgcgagttggttgtggatgtgggcgtacgagcagctgggtttctgagagcgtcccgctcgcgcatctctcgcttgaatctctgaatttcgtcttccttctcgttggacgtgatggtcgagctggcaagagcggtcaacaggtcatctttcttccctttcgcgccctctttggtggtcaatcctggaggaggtgctggcgaagaggaagtctccgtcatccaggcaggtacctcatcttcgtcgtcatctcgccctccaaatgtattcctgtcccgtcgactgtcccgtcggtcagcactatccctctctcgcagaggaggcgcagggttccatgctggtcggccaggcacgcgtgagtttgaggatgaggatgagtgagcgtttgaaccggacggtttagcgggaaacgactcggaaggccgtataggaagagacgcggcgcctatgaaggatcaagtgaggtcaaagtgagagtcaatggcgattcagtttcacatttataggcagtcaaaacactaacctcgtgatctccaatctctgctatcccctgttgagctccagtcgccatctttgcctcctcgtcggtcaccatcccgtttatcatgtttatcgtccgctccagagtctcttaatctctctttctcgctacctcgggttgcccaagacctagaattcagtcttgtggagtctctgtctcgttccttatcataggtgtcagacaactaggtttaggttgtcgatgtacaccaaaatagcaagcagagcagccaatcaagaaggtatcagttttctgatttttacttgacagcactaaatatcggaagcgcaccttcttcagtccgtcgccttcatccttgtctcgttccttctcatcgtccttgggttttccatccctatctccgttgatcagcactcgtccgccctggtgcctgaagcttcccatccgagatgccccactgtcgccgattgcgcctgttccggctcgagctgtaaaggatgtatgaggaggccgatctctctgtaggggagacttggtattcagatgcggagatccagtagcagcactatgagagtgttttagaagaaggtggtatataatgaatacaagggattagacattagttgtcgagtcagacaaagatggtcaaggaaatgacgaacgagcgagttctgtccgttgattgggcaaattgttcacgccgggccgatgatgaagaatgaaattctctgcagggcgaacgaaaaggagtgttgaagagaagaacagagaagtgttaacccaaagatctcatcatactaaaggtacaatctttgacagccagcccatcttgcccttccgctctcaaggttttttccatccgcctcaactcaagtcttcaacttttaagactcttaacaagctcgttggtaacaagagattagtcaggtactcaaggaatagatgacgtacccaaaccatgttttgaaatctggcatgccttcgattttgtctccggctttggccacgctgtcctttttggagagcttcaaaagtgccgagcgagaatatctgatgacaggcgtttcatctttctgggcttctttcgaggaagctagaggtgaggttgcagagggagatttgaggagatcgactagaggagtaaatggaatggttcgttttcgttttttgtttgttttgtttcacaaaggcaacgatcaagtcagagaaagaaggcaaacgatcagaacacgaaaaaggaggatagtcaatctagaatggaaaataaagcccaaagagtctcaacaacacgcacgctgtggcatagtcgtcagagaaccttataagacgatcaggctgactgcttgtgggcacctgaattatatgaatgtggatgtatgctatagaatgagatggttgaatagatagaaggagtggaaagaggggtgagtgtttggatgtggatggttttcagacaaggccaaagttttcctccctttttctcgtgtattcttgttgtactctcgaatagatttttgatacaacttttctactacaacttgtcgaacttttcttgctcagcctctacagttttgttacagtcgataattttatttccaatcgtcactggctatggaccagcggtcagaacaaaacgaaattgaggtattaatctagataactgcctacatcacacgcttcaatcttgcttttgaatcttagcttgaacagctttcgtccacctccaacattgacgctatgcataagcaccgcaccatcgacccaccaccgagcctcgagccgcatgttcatgaagttgtagagcgcggcgatgtgaagtgcggaatcaacgcaggggtcttcccttgctagtggagttgaccgtatgacgggaggggtgggtgagagaacgacaccgcaagattcgagtgccatcttttcgaagtgaattgattcgttagcgtaatagtcaggagagtttgccggatgacgaccgccagaaggttggttcatcgagggggagtacatgagcgatcgagcgaaatatgacagttggtcggctagaatatggaatggaatccacagctgaagaaggagaatcagaaggcgaagataaggagatgtcctggctattagcgaaccccaaatgcaggatagatccgagtaacagaagagaatacaattaatcttacgtcaattcttaaaaacggattggaatcctttgagtacgtctctatcaactcctgcatcatgcccctggccaacttcagactcttcacatttggctcgttctttgtcagattttccatccgtgcgaccaaaccgagccttcgttcctgcatcatcgccgagtctcttaaatcttcctggcacagccgacaggtacatcgaatccggtgtttcttcagtattgccgttcgcttgtcgagatcgatcctcgaagcgtacgatattgtgagctcctggcccttcttcaaacctgctctgggtcgaatgcacatagcgttaccccagaaggtaagcgagcagttgcctaagcattcgtgatttattactgaaggtaggatgtatagccctgtcggtgaggtgtccgataggggagaaagagaaccgtaatcaggattccattcgagcgcaggcgatatacgacgcggagagaacgaattaaaagagatggcggcctcgacatgtgaaatcttgaatgggaagaagcgaaaaacgcacaaagaaatcagatatgagtgcgaacaaacatcgagggagttcagattgagaggccgtaaggagcacgatcactcacatcaatgtctacgggctgcatagagggttgagttcttggctggacaacttcgagcgctgaaaagacgggtggaagtggaaattctggtccggcgtacagacaggaaaacgccttataagctgaagggtcgtctttgatgtgtgcgagcacaggttgggtcaaataagattgggtggcaatgtcgatagtgttagtatggaggttacaactgaacaaagattgatccgggcccaagtctgtcttataaaccgctgcaaactaagttgagagaggtttagaaggaagggttcagctaatggagtatttcatgagacagtttagagattggatgcgtcaaggttgaagatatacaaaccggttttgacaagatcagaagttgtccagccttgacgtcctccgtcaaaaatagccctcgccctcttccgggactcaggccgactttgaccggtcctgcgtactctgccacgtccaccgctggattcgtttgcgagctcttataaagctctatccagtcataatatccactcttcatctcgactagtcgagtggcgatggccgcaatcccgtttcgtgcctcctgggattgtggaaattgagaaagcaaggagccataggtagcgttggcgagtgagtattgaccaagtgcatactgagcggttgcggaacggaagagtgctttttcgagtagcggttctgggattgaagttgaatggtaggtaagtacgtgatcggtgtcaacaagcgcagatcgaaactgcttgagtctgatccggacggccgctcggttcaacctaagcgcgaggtgatttggatcgagagcgaggccttgagagtatgtatgctcggcagcgagcaacctgccggctgataataactggttgcctgtcgtcttaagctgctccgccgtcttttttggtttttcccgccaaatctcttctggccagaacggcgcctttttccaactgactccacgaacgagcgcgttgccttcgtcgacccagataagaccggttggggaatcgactcggatggaagccgcgccggcggaggacaatttgtaataaggctctcggacggccaaaatagagcctagaggaaaaagtatgtcgagatcaggtccagttggggtcattccgataggagcgttgtaaaacgcgagagtctcggccagcccggccgggtcttgaataacaaacgtgacgcctactatccgagctatccgacacagtacgaagagaaatggtcagcttgaaagtagtatacgttttttacgtgtcttgagtagcaggagacagttagacctacagggtctggagacaattcggcagagtagataacttccctatgcgcccgtcgggaaagcacaaagaaattagagacgacatgctttatgagcttgtttgtcggattgagattggattcttgatgatacgcgctatcaagcatttctttgaccggaaagatttaaagagattataaactaactacatgaacctttctgcacgacatatctcccagtccaatgcggttaagctttcgaatgtcgcagagtgaagagtgtttcttgccagcatatgtttgtttcatatcccggtgacccgtctgaacgagcttacccatggcgatacgtttctccctaatatattcggctgtttcgactagctgatctaccggagtaactgagagtaaaaaagaagccgatgatgatgagagaagagaaaggtcgcaagtttagtatttgctgaacaaggcgaacgaagcaagaccaaaacatagttgaaaaggcgaataaagagtgaaaaggggattctgagagcttgccgattgaaacgtatcgctcggaggactactgacatattctgttgaaaataaaaatgatttcaacattcagaagtaagcgtttcatcgtcatgatcgtcgtcgtcgtcgtcgtcatcatcatcatcaccatagctatgcccgtcatttcagcagcgataggagcgagcgcacacgcgactcacggatcctctgggacggcagtctgctcttgggcgaccgctcgtcttgtatcttctaaattgcgcagaaagtcgaccatctcggttgacgtttgatggtactcgaaagcctttgacattggcttgtcttttgggtcgcgaccagaatgatggccaaagtcgaaaggtaggaaacgctagacttgagggtattaaatggccaggacgtgatgagcagaatgaaacgctctatcgcttggccgatggacaaagtatgcttccagagcgaaccaaacggagatgaagcgagggatggatgagaaagaggaatgtgagctgcttcttgggttgtttctaggagaggcaagctgacaatggatttctcgagtcgcccaacgcgcgtgcgtacacatgtcctagtcaatgagactgaccctggttagtataaccctaactctgactttggccgacacaccacaagagttaaacctggacgagaatcatcactcatcgcaaagacactgtgatgatttttaaagaaaaagatcatcaaaggtgtagatgttgaagaaggcgcaagaaaaagaaggcaaaaaaagtgcaaaagatgaactagcccgatgggggggtcgaacccccaaccttgtgatcacgtgtgtcttcgagaagccttaaaagtcacacgctctaccgattgagctaaccgggcggttgttatcaagtgtaaacattatgactttatgtagacataatgttaaactcgacatctttttcgagccattcattgccttgtctcatcgttctccggtcatcacacatccttcaacaccctttggatctttctatttttggctcaaggatggctgcaaggttgactcggaagccattgctggatgatggtcttaccctggctcatgttcgttctctctttttcccttgtccttctgtttacatgtctgttcactctcgattgacactctgctttgacatatagtttactcatcagaccactgtaatctcattgtatcgacaattcctacgttctacccgaggtgcgcgtctctatttgaatcttctcacttcatctctatcgatctaggcgtctgctcatatctcatctggatacacgcgatacattgagtagcacttcaagcgttacctaatagaaaggaaagtatcgatttctaccgcaccgactttcggttgaagccccaaatgggccgacctccatcacctgtcagtccaccatctctctgttccttcctcgttcgtctctcgcgtcctaaacttgagtattcgttcttgatacgctatgctgccctacaatctatcgcgcgatggtttttcggatgctttcttcgataaaggatgcgctgcttgcccacttatcagcccttcaaaggttgttggccagagtcccatggtcatcttatagcttgctcggtcagagtgtacacgcgggcaccgagtggcagaccctaggacgtggacattggagaacaggagacgtcgtcgtacttaagaaggcaatcaaggataaaaactcggaaaagtgagagagaaacaccgaccatcgttccatccggttcgttttccttcttcatccgttctttgacgtcttctatccctgtcaggacgcgagatctgactttgatcgatctgttcatccttccaaacctagatagaaaaaagcttaaaaggactggaacgtagctatgaaaacaaacgttcgatcctgtatacacacaaatatacctcaagtacgaagagatctccgggtacatctttttccatataccaaactaaatgttggtcatccggaggccgaaaaggaagaagcgtatctcgccctctctgctgagctcgaaatacggccgggtcggtagagagcgcgtttatgagttttgttttatcggtcgatccatctatctaatgacggttcgaacgttttattttcttctctcatgtacgctggaagttgtccaacatgtataaagatgacaaaatggaagaaaaagtaggcagatgtagacaggtagggacggtacgatgttttgtttgtggaatgccgtcaaggtgtatcatacaaccataaacaaaaacatatttcaatctggaagaaacggtgaaaacaaaacaaatgatagtaacaaggaacagaaagacaacacagggagggaaaaagaaaggaggagaggaaagaagtcctgtggccgaatcacggcggaaaatcaataattgtaggtatgcggagctgatatcaactccctctagacacctccaccagacttttcaggcgagatcttgtttcggaagtaatcggaatctcccatagtgatatgggtgaatgcagagtcaatcgacaactccttcattccagcggccagctcgcagaagtcgtcgaaaaagatagctcctcgtcgatcaaaatcaacttcggagatgatagcttggatggtctcatcctcgacggaagagtatcccaaccttgagagcgcgtgcttcaaatccttggcagtgatcatctcgtcctgatcaaaatccatcttctggaaccgagtcttcaaatcagccacctcctcgggcgtgaagagcgctctagagtagaacgcggcctcgtctacgccgggcaaccgggctggtgagatcgaactcgtcactcgaggcacgtcggccaacttaatgttggctttgtgctcggccaaacccatagatcgcaggtagtagactagaaggacaaaagacagatcgcttacttaaagtcagcgcactatcgacaatgagaaaggatgtgaacaacgtaaggatacgcacgggcactgtcaaactccttctcgactctttcctggttccagcccaactcgctcgccataatctccaagattctcggcagcgcagagatagtagcgtcggtgttcaggaacgacaacctagatcgtcgaccgataaagtccgcggcatgctgagcgtactcaaatcgacaggcgtacctgacctcggcttcgatcactgggtagttgggtgaaagtcgaattccatgaagaggccaagcgtaacctgtgggggcggccatcgagcagatcgtccacgcccgatctccatactagtgaacgaaatgatggtaggaaacatagagagcgatgggattagagatccgcttacccttctcacactttacaagaatgatgtccgaatagacgtacgttttcactgagatgcttggcaacctcgatatcaagtccgaattgctgaattagcttgacaaacatcagattggtccatccgtgagagccgatcaacttgatatgtgcggtctcgctctttccatcagtcttgagtccaaagtgcttgacggcttcgtcgacggtctcttcggccatcgctcgatacgtcgtccatttaccaccggcgattgtgagcaggccagactctgagatattgatcatgtggtttcggacaagggactgggtgtccttagcagcgggatcccgaacgagcggtcggataccggaccaagctgacaacacgtctcctcgtcgaaccttgatatcaggagaaagatagtttcgaactggaagtaaacgaataaattggtctcagaatgtcttgtataacaaagtcgatctacatatgttggaaagagacaagagaattcataccttcatcaagaatccactggatctccttctcggacggtatcgggttttgttccacgttcgtaggagcatctgtcgttccagcgatgacattgccctgccagggcaagaagaaaatcactcggccgtctgaggtattgggatcaagcaaacccatcgttttaggtccgtagtacgccttttagagcgaaagagaattttgaaggaaacgaagaacagtgcgcgttgacagtaagctcgactgtcaaatcacaacattttacgacagatgtttcacgcacaggcaaggttatgtgaactccagaggaaggagcaacaatctcctgggtcatcggctcgtctagctttcgaagtccatcagagaagggaccggtagcattgatgatgccctgttatgatatttgtgcagattgctagtgtcaaattcaagtcgaatgcaagtaacttttcttcaaggaaaacataccttggccttgacctcccactcttctccatttagctcgtctcgaactcgagcacctctcagcttgccggcttcgtccttgagaagagcgacaacagacacatagttggctacggtcgccccattatggacctattgatgcaacgtgatatgattagagttttgaaagttacttgaagaccgggcagaagagacaaaaaagaattgaaggcgacaaacagcagagaggatcaaagccatgttcattcgagagtcattgtgctggcctgtgatgagaatcatccaggcatagtttctttagtatacaaggaaatagatcagactttgggaagaagagtgacaaaccgtcatagtagacgacacctccggtaagtccttcctgcttaagcatcgggaaagcgtccaacaccttggacttgcccatccagtacgcgccgatatttccgccctcagaaccagccaagatatcgtacatcttgcaaccgacgtagtagtagggcagctgccaccacgtgtacgttggaaggagaatgggcagcatgtgcgataggtatggcgctgtctcaaggaaaattcgtcgctcccgaagcgcttcgacgacgagcttgtattggtctaggttgagagagcagccaatggaagggatgtgagtctatggcgttcaagagcaagatgagcgaaaacacaggaaggaaaggaaaagacagaccatagtctagctcaaagatagccttctgaaggtatcgaacaccgccatgaacgagcttggttgattttgaagaggttcctgttaaacaaagtccattaatgagctctacgctgatcaaagcagatctcgagcgcaagattatcaaggaaaaaggaaaccaaccagacgaaaaatcatccctctctacgagcgcaaccttgagacctcggctggcagcatccaatgcgactccactcccggtagcacctccaccgacgaccaagagatcaaactcctgttggtccttttcttcaaacttggccaccttgacaccctttccggatttcttcaggttgtcgatcatttgcgctcgcgtaggaggcgaccagagcggtcccggacgagaatactttgacttctcattcaacctcgtggcggcctcgagagacaacggagaatttgatagagcgtaggtggtaccgacaagggcggtggttgtgattgctccagcgtataaataaggtttgctgattcgggggagggcacgacgaaacatggtaggaactgtcgtttaggctagcgagacagagagaaaaaggaagagaatgagcggatgcggttgtcaatgagatgaatatcgaagatgttgtaaggagggaggagagaaagaagaggaaaaaagaagggaatgaagaggattcaatccaggaattgataaacgttcgcttacctagatgaaatgtggattcaaaaggatgggagagacagagatgggaagagagaaacgatatatggtcggcgaaaggaacaaaagggaaaaaaagaaagagacagctggatctatccgaaagttgtcgaaagagatgttgggatttctagggatggtctggtttcgtcggagagaccataagagattagctttctttttttttcctcgatggagtaagaaacagaaagagaaaaaagagggtaaacggcactgatgtcacagctatattaattagtcccagtcgaatcagaggattgactaggctttttcgtttttcatgctctgctctcgtctgtcctacctatgcctcgaatctttctttataaacaaacgattaaaaactcaccgttcgttctaagtgcgagatgggtataccttgaaagtgagagaaacccaagaaaatagtcagatggagaaagaagagaagagggaacaaccgtcgagcttaaagagaagcgcgacgtttgccaccaagactacggtacctacggtacctacggctcggccggcattcccggtccctgaccggaccgggaacttacctaagtcggcaatacttgaatgtcagggtagccgaaggcggggtctccatttcaaactccttctttgttttctcgatcgtctcgggttcaggcacaaggcctatttgatcgcggatcgttggagtcccctggctgcgcaacccggacatcaaaaagaagcgtcagtacctgcgtattaagtaagcagacccctcacgtgttacctttcccccgccttgtgcctggccagctggctctcgtaggttctattgcttgccctgcgcggagggagatgggggccagcatgtgaatctctgggccaagccagccagcgtttttccgtctctccttcctagttctttgacggccaaccagatccatcaagaggaagaaaaagaagatagataatggccgacaaggaaactatggcttctaccgagtctggtctcagacatcggaaacctgcgcccatcactacaccttcccaacagactaccgataatgacgatgagaacgatgccgtttacgggcgaacgtgggatgggaaaggtatgtctacttgctcttctttcttttctctccttttccctttcatttctttttcctttgtccctctgttcgttgtcagctcgtccttgggtttgaagattgggctctttggggtcaacaccctcaagctctatcacacagataaaggagatgcaacagtgcgcacatattgtccatccaatgagcccctcatagtggtccgaaagacacaaagaaaaaaaaaggaagaaaacccagccagaggagaggagaggttgctttgagttgtgtctgcatcttctccgtttcttattgtcttgcttcattacattctcaacggaaaggaagaacgataggagacgttgagagcaccaagagattaatatctacgccttcggtttttcttaccaactctagttttcgtcgttcctgagacccattcattcatccatcatctcttctcatacggtacacgaaaatcacaacttgacctgctcaccctggctctgcttggatctcaatggttcgttcgtcgcctaaccttctctatctgctcttcctcttcctcttcctcttcgacgtcgcggtctgtctgagctaacaaaatattctttgtctcttccgttccatctctacagcattctctacctgctcatccctcgctcggttgcccagcccctctttctggctttgttcattatctttcgactgatgtacaacctcggcctcggtatcatcctcacgaagcaatctcagtctaggtggatcgtccgggaggtcctccgtcgaggttggctcgacttggagaagaaccccaagatcgccggctggtggaggaaagagctcgagggcaaagtcggcgggaccggtcagagtcgtttcgactgggagaaaactccaattgactttacggtttggctgctgttcagacaagtggttgatgtcatcctgctcaagtaagtcctcattctcatatggctctgtggtcctcggatgtcttagctgctgtcgttctcgtactcttttcttgtgttgtccactctaaaagaacgtttggctaaacactctctgcgcttcttctccacaaatttccccttttcgtcagtgactttgtttcatactcgcttatggccttttcgttctgcacgcttccttctaaccacgcctggtgggcccatgtccttcgatggaccgccggcttcatcctcattgctttcaacctttgggtcaaggtttgtaactcccttcattgcatcttcctttctcttcttacccccttttcagatcgtcaagtactgtcagattgatcgatttccctgaaaaacctccatagatcgacgctcacagagtcgtaaaggattacgcgtggtactggggagacgcgtcagtttctctctattctccatatctgcataccactgagcctgaatagcgccgttaacggtctctcttttttgttctccgcttcgaatagcttctacaccgccgtcctcaaaaaagatcttattttcgacggagtttacgatctggcaccccacccgtatgtcctgaagtctagtctgtccgttaagccaggtctgcgcttgatcttaacccttgcttttggtctttctctctgtctctttgattgccacagtatgtactctgttgggtatgctgggttctacgggctttccatttgcatggcctcctacactgtcctttttgtcagcattgccgcacatgccgcccagttcggcttcttgctcggtttcgaaaaccctcgttcgtctacagctcgtatcacacagccttgcctttcccttgcgctaaccccaatcactcttgatcatgacgttgtcagatatcgaaaaggtctacggaacccagcgaccgttggctgccagaattcctcttcatgctttcgaccccactaggcctaccgccttgaatggagagattatggaggaagaggaagattcgaccgaaccacacactcctggtctcaccgctggtacgtctaagttctttcctgtctcaaacatttatctggcttctcaatagacgatgtttacctatactatcttagcgtcctccgataccgactctgcggaccttagcgtcaccccgcccccgatatcctccccggccatcaatactcgttccctctcgttcatgtccttgtcttctcagcgattccagagcgaacactctgctaaggccaagaagctatcaatgttggatttggagaacaagttcttccggaaggatctgatcgtcttcaaaaactttgacatcttcaggtcagggcgtctaatccaagacatgattcagccgcacatcaacctgctgacgtccgttcttctttgctgaacatatagaactcaagacttgatgaccctcctgctccttgtctataccttgctccctacgcttttcccaaaggcaagttcgaccttgaccgcttacttcgcccatgctctcttctggcggctcttccactcgttcgtcctcggtttcgctttgaagaagcaaagtgagaaccagtggctcgtccgacacttcatgaagcactaccactatccaaccacctcgggcgcggtcgaggagtgcttcgggaactggaagggtgcttacaatctcagtctgtgtatgacttatggttcgtctcttccgacaagcgtcttcttcttctatctccaaatcaaggctgagccgtctgctcgggtcaatttcttccttttgtatagtttcgttcatcgcgtttgcttggaagacgtactcgattcccactgactggactgtaggaggtcaactgctgcgacataccctcggctttgttcgttccctctcttctcctctcattttctttccaagctgtattttgcttgttttctgtactgatcaagagttaatttggccaatacaactgccgatcaacagatgctcatcgctctacaactctacagttccgactcaaccttctccgcccttggacctttcggctggctttattctgatttctttctggctgatttctacccgcctcagttggcttacaccggaatctaccgattcctcaacaacccagaaaagttcatgggtggcgcggcctttgtcggtattgggttgatcagcggaagctggattgttggaggtttggctgtgctttctggtgtgtgccactggtggtttttgagcaacgttgaaaggtaagaatttgagtttcctcctgcttgtgatttctacatcttctttctagaattggaaacgactattgattccctacctttctcttctgcacaacccgatagtccgcatatggagaaggtctacggagacgctgtccgaaaggaggccggtgtgaccaagactctcaagactgtcgttgagagtcaggctaagcggtttgatggtaaaggcgacattcatcgagtcgtccgagaggttcgtgaattctctcattcccggactgtatcaacatactttccttccatctttttgaatagaaaaaaaaatctgacgttttgagtgcgttcattcaggttaagggcacgtttggaaaggtcgatcagaaaattcaggagacggtggatgagttcctcgagagtggttcgttgtctaattattaccgatcatgtacgacactgtgcctgttctgatgatttctgctgttgtggcctacagctcgacccaagttgtctggcgttgttcaggagggaaagtatctgctgcagcaatctcgggaaagactggttatcacgtatgtccagatgattcaagtgcagcgttatcttttttgttccgtaactgacgactgacttttacaaaaattacagtcgagttgccgacgtgtcttctctcgatccttctcagtacgcattgaaaacgttgccctcggccaacggctccacatctcgattccatatcggtgaacctatccctatcaagtggcaagctccccagaaccactctcgaaaagactggataggaatctaccgattgggcgcctgcaagtcccaactagtcacccgtgtatccagtgtggggaaatgggtgcccttgtttgccgaagagtatgacggagaccagccagtagacactaaaggagaggatggtgtgaccaatcatgtcgtcggccaggagtcgttcgaccaaggaaaggtcgtcttgcggggagatgcacttccctggcagagtggacagtatgagcttcgatatcaccacgatggttagtctgcaatctcttgtcattatgtacggatttgattttctatacctgtcttgtctgatcgagcgtgcgctttgtttttttctcgtccaacggctcttgtttacaggcaagcataacgtgatgactcggttggatcatcctatcgaaattttcgttcctcaggcgtccgatccgatctctatgacttctgttcaggacatccttactcggattgttaccctcgctttggactctgatccagcgttgattcccgcttgcgcggctgatgttcctgctccgaactttgtcaacccttcggttgataccaaggactcttccttggattcggcctcggcctcaaacttggcctcctccgatcattcggtcgcgacaggatccgttaggtccagtctggcttcctccttgaacggagttgaggctctcaacacctcgtctctgtcctcctcgagtcactcagacaggtcagacggctcctcggccgctccggatgatcaacgaccgacggtcgacaccatgccgtcctcccgacccgccgacgcggatcctggggactttatcgtcatgtccctttcccaagcgaaacggatggttctcggtattagggaaacgtttggagtcgagtttgcgacggatgtcgtccttcactgtttgaacgtgatcgagttgacagaaaagatcgtcgaggcgagaaggatcttaggaggtacactccagagaaaaacatctgggttctgaggaatctttcaagtatggagggggctgggcggcagaggagtcgttgagagggccaaaaagagaaagaatgggttggagacagattgtgggaagaagggacggggcttgtctttattttttgttccatttattttcttgtttcaaaatatgatagggaaaagacaaagataaatgtttcttattcggtatgatgggtaggaagtcatttaacgcgtaggcacgcgaggcaaaagagtcgcggtcgaaatcgaagaaaaacatgcaatgtttaattacacttccaacagcgatcatgtaagtctgaggaccaacatgtcttcttcactacatcaaaccctacagactctctctctctccgataatacttctccttcgtcctcatctcgagtgcaaaacaaacctctaccagcactcccgttccactcgtcccgcacgccgtattcaaacacatacgacgcattcggaagtcaaactggccgccctgtagcatcgacgtcgtatcgacccagcgagcctacgcgtcccgctgcccatgcacctccccctc

SEQ ID NO: 1660 - DNA, 37474 bp, Xanthophyllomyces dendrorhous
ccttattcactttacagccagccaattggatacacgcctgatgggtctgtccgatctcttgacgggcttcactctagtggtgcggcggatctagtcctgagaaggagaagtccgggtgtgcctggcgtcggaaggatggaccgtcatgagcctgaaggacgggtaggatatcatgtatctgggtaagttctgttgaagagatccgcttcattatttacagagacaaagccctaattgatgatagttgattgtttgttcttctgttctgttctttctttcttttgaacaaatagtagcgagtctcggatggatccaacgacaagggtgccaactacgggaactctgagcgagtctatgaacaacaggccgtactatgacctacatgggcgttttatagttgattctccatctccatatatacaccttcctcaagcagaccattcattccgtccaaatctgccatatggaaatcaacatgttcgatatcagcctcaagcgccgcctccgctcccggcaccacctctagagacgctctcctcatattcgacatcgccaaacagaagcgcgacaacagagacttaccagcctaggttaactagccagaggtatgacccagttggttctttgaattctacgccaggccgtatgatgagtgtgcatcctgctccttctcgacatgttctttcatcggtccagagccttccaaccacccctactactccgcctcgtccgatcgcgcagactgatgcggtctccgctcacatatactctccctctacttcctcgccaaaggctccgacacgtgtttctccttccaaaagaccacccagctcaccagcagactcgtcactcacagagtctccttccgaaaaatcgaaggataaagtacagtgcagcgggttcactcagaaaggcattcggtgtaagaagatgggtagtagttctggttgtcgacgtgctggaactggaactgtggatgacgataccacaggttggctttgctggattcatagagaagttgtcttggccgaggaagggttctatgttgatggaaaaggaaaatcatggatcgagtttgatggttcgtttttttttcctctttctttggttgtatcggagattagtactctggagccttacatatcattttattctgaccactttcatctccagcttggattccttcggaattgagcgaggatatccggctagcgatccggctcgaaatggaacgtccgatcactgcagctgatcagacgcctggatttgtatactgcttcgagtatcgaggtttgtttgaggcagagttttcatctttctcatcgttccaaagcacatccattctaacgatacttctcggcgtctgcgcttttgctttcccttctcctttttcgctctcaactaggtttacagacggaatctcataggacattcaaaatcggtcgctcgcttaacccagtggcaagaatggaggaatgggggaggcagtgtccgtctcatcgggcggtcttgttgggctatcgacctgctccggttgggtcagaggaagaggaacgtgcgggtggaggaaggatgagagggatgagacgactaggtggggatgaagaagggcaagggccagggatcaagggcagcgcaaagtttgaacgtcagtcacctttcgttttccttctcttttgaaccttctggagagaacttctcttctgactagatgagctactcaacattctgaacaggtcttgtgcatcttgaggttggagatatgtatcgaggtgtaaaaacgcgacaagagtgtgtcgactgcaaggtgtgttgtgtgtttccaattctattctatttctctagcttgcgctcatcaagaacgactttctgttcttcgtcactcctcctctacccacactcaccccctttagaaattccatcaagagctctttctcatcccccgggagacggacagtcaggaatggatccgacaggtcgaaccggtgatggaccgatgggaacggttcgtgcgggaactgttccggtgaactcggctctggcttacataagacacgtccggcttaaagagccacgtaatccgaaccagatgggctgttcccccggttgccaagactgatgccgagcctgggaagcgaaagagactggggccaaaggctgacacctaaattgggtctgccctgattggcaattaccgctcagaacacgtgtccaagcgatccgtgctcgcatctcatccgccccagacggtctgtgcacgagtcaacatcagatggcttcttaaggcgtccattgttttctcgtctctttttttttctttcctttttctacttctcttcttctatccatcaacgtccatctgctgctcttgttctccccgtccatccctttgctgttcatcgatcgctacatctgatctctcacctgttagtgtgttcctgtcggtcgattgtctgttatgatgactcgctagtttctcccatctgatcatctaccttggttccatctctcggcacgtgcactgttaactagaccggccatgacatctaacattcctctcaattcggaatccgagtccgaaggaagaccttccgtcgcctccgaggcttacaccgctgcaacagcacatattcctgtcaactcagagtccgagtttgagccagacaccgagacggccgttccggcgtacagccgaggcaggcagcaattgcctagcgcctctcatctcaacgaacccaactcgggagacgaggaggacccttcgtctctccaggtgtatccccctcgatctcgatcgtctcggtctcgaacgcccaaaggccagccaggtctcggtggatctcgaagtcgatctaggtcccgtgtcagccagaagggcaagctggaaccaagaatgatgaattccgagtcggaagatgcgagcgcgagcgaggtcgacggtccgggaggactgtcctcgctacacgagtctgccgagcacagcatcccggcctacgttgcacaaaactctggatccgaggctgatgagccagcggatcgaaagaccggcaggagcccgccaagggccaggtcggccggtttgagcacgggcgagcctaggaagctcggagggagtagaagcaggagcagaggaagagtgccaaagtacgatgtgcagatgaactcggagagtagttcagacgagattgaggggaccgagaccaactataccgatgttcgtcccgttccttctggcttatttttatccttctgatacttggataaacagaaactcatcgttcggctctctcgtttctttctttttgtcctcgtgaatagaatcgagtcggagtcgagaaggtcaacctctccaagggtctggaactcaactcggaaagcgagcgagagtgattctgatgttttcactcgtctgagctctattatgtattcaactccgtgttctgctagcacctctttctctcgtattccttttgctgtaacctatatcaaagatcaatgtgtcgctctctgttttacatctagcgttcagcatccaggctgtgcagatctgtgccgtcccagtcttctgccttctaaatccgggtacctctagatagttattgctatgatctcgcgcaaagggtcatatacaacccagcatgttagtgaatgagaacagaattttggatgagtggctgtatctctgctttgcttcaacaggcgtgttactagttcgcagtttggaaagaaacgcccccccgcccggagaatatctcctctttctttctttttctactttgaatctccatgttttattcttctgtatttagacttatatcttgcccagctcggccaataccactttgacgccctcgacgatgataccatgctcgaccttgtgcatcttttcctccaactgatcaagcgactggtccttgaagatctcaacctgtctgaccaacaacggctccccttggtcaacctgctcgactaccctgtgaaccatgacacccgtcctctcgatctctcctttctggaaagcggcgtaggcccgaccgatcgcgtcggctccgtcgaatgctccggggagagcgggatgaaggttgatgatcgggatctttgccaacgggttcaagaacgtaggcgagaggatatgcataaatccggcaagaacgatgagatcaggcttggtggcctccactcttctggataattcggcatcgtattcttttctggagtgggtagggtttgcgttcaggtatgtctttaggttgaacgtcgagcttgggatcggtgggttgtggttggccgctcgggtcagtccgtaggctttcgaccggttcgaaataacgtaggtcacaggaagggatgcgtcaagtagcgcttgaaggttgcttcctacgtttgattcatgttcgaaggagaggagaagcagacaaaagaagacagcataagagagaagaaagtggaaaaagatagagagagaaaaaggaaaaggaaagattgagaagaggaagtcattagattcagatcttctcgtcatagaaaaataggtgaaggtgaaatggaccgaccgcttccagaaataagcacggtaattcgagcagggctagacgaggaagacatgatcgtttgaattttcaatggttgtgtatatctcgctctttcttctcagcctacgtgtgatattgtcgttgtggtgaatggtgttagggtggagagagagatgaacggtaaaacccaaggctacgaaaaattgcgaaaaacgggtctcgaggcaaacaaaaaaaaaacacacgttcggccgtgtggtcctccggaggttcgtctcgttcatccatgcgctttaatgtccgtatgtcactttaattgatttgcttttctttctttctttgcacttttcaagacagtagatatgggcagaacatttgatagaatgaaaggaaaatatttcaagaatgtaccaggcattatcgactgaacaacctcttaccactcccgtccgtagacaggcagcggcggtcaggtgtccattcctatgtcctggtatgaggaaatctactgatcccccgtggcaccctttgaaggccgatagaaagaatgacggcagctcctgggcgtagcagagtgggggcagatgctttttgatgggggaaagagaaggaggatggcgtacaaacccacgtatttatacttctccggaattgatccgagcgtgactgccagcttgaactccgacgtgacatctctgtcgtagacccagcgtcgtccgatatgaacagcaagggcgagagagtagaagctcagcgcaaaagagagaaagtgttccatccagaagagaagaaacacttgatacaaaagaaactgttggagtttcagcagtcttgacataatttcatctgttatttgtaatctcttcttgagacatcatctgcctgcctctatttgcgcggagtcccaaggctctctttccgaagagctataaattttctggcgggtttcccttctgttatcctggtttctcaatccattttactgaaacacctgggtggtgtgtatatgatttgggaaaccagtgaggacttgattgggaacaagtgccagaacgaaaagtccattttcacccttttatttcagtaatattcttcagaaacgaacaagtcgagcaggttgagtagatcacctcgcccgtctgctcactactctgcctcaaacttttccttctcgtttcgtctggttttcgcctcttatcctattctcttcctctttccctccttgtctatctctctcttgttaccttgtatattgctattcagttcatgacgattttacacaaacctgaaaagacttatacaactgcgcgtgcttatgcgttctgcatacagaatagactatcccgagaaggcaacctagatttacatttgtcagctgaacttgagccaacacaccggcaacctctacctacctcaattccttggacaaggattaatgatcccacaagagaagtagaagaaatcgcgctgatgtggcttgttaacacaacataattatactaaaagacttcgtataacaaccgcccggttagctcaatcggtagagcgtgtgacttttaaggcttctcgaagacacacgtgatcacaaggttgggggttcgacccccccatcgggctagttcatcttttgcactttttttgtcttctcgccattctcacgtattcacctggaccgttcataaatacgaaactggaaccatggcatcattctacaaacttgtttccactacacgccttcgttcatcttctctagttgctctccatacgcatcataccacttcttggatgaatttgcagcaaacctgaaagatcgcgcacggtaggcacacaaacgaagccccatcatcaatatcgatctctcagcctctctgtttttcacactcaaccaccacggcagacaatctggatgaagagactcacccagcagcaatctccttgtcgcctgcactccatttctggtcgacctcggtaatgaaatccttgaccgttagcgccgcgctgttcttcgattttttgttgttgtcaggatcatcgtgatctctgttgacaaacgaacagcagggacgtagagaaggaaaaagaggatacattggagcttaaaatcagtaagaaggaagtgtcgtccgtagaaaaggctcgaaagtcagagagatacgaaccggtgcaagctagatcaaatgaatgaacacagataggttcgttagggagagaaaagttcagtcaataggtcgatcgaatagatctggagaacgattcaacgataagacccttacttggactcaaccaagggaggtgcaacctcgatcactcgaacatttgtcttctccagctgatatcggagggaaagagctggatggatcgtgtaaagttagccaaagcccaagtcagatcgaccgatgaatgtcgcgcgcatatatacaatcgattctcagaacgacttactccaagaatgaatgaacgcttttgtagcacaatatacaggtactcccgctttgggtacgaaagctagcccactggataccgtgcagataaccgctttgggctgtttcaatagatgaggcatcaatacggtcgtcagatggacaacgcttagaatgttggtcgtgatctcgtcatccgtatcttgaaggatatccttgactgcctcggtcgattcgagagcagcatatgagattggcttttgaattcctgcgttgagacagatggcatccagatcgggatgctcggccaagagttgctcgacgtactctggaaagtgcttgatattttgcaagtcgatctgcgaggttgacaccttcccagaatatgtcttggagagatcctccttggcagattcgagcgaagaggctgtccggccggcgatgatcactttctgcatagaaacaagagtaagggcatattgataagtcgaagaggatcactttgtaagaaagaagaagggaatttcattcgaacctttcccttttcaaggaacagtttagtgaaggcgagaccgagaccaccgctacctccggtgacgaggatcttgttaaactcaaggttagatgaagacattctttctttgataacttttgacagatgagagagcgcggttggatggtgcagtagagatggatggagtgtgggtatgtgtctacgagaacagttatatagtggctctcggtcatcccatcgaacatctggatatagatcagacaatgacgcatcggtcatccacgtcattaatgatcggctcatacgaatcttgtcttgcttctattgtgttgaagtctctgaatcctttcttcattcttttttcttttaactcctgattatcggtgagcacatccatatcgtgggcatgggtagagctatcagagatgagaaaaatgaccgaaaggaaaggcaagacagccgaaaagcaaggttacgacgacaaaaagggataaccatcttgatatatctgaatgtttcatattcacttcctgcattgaatccccttgcctctctccctctcttttgtctttctcaaggagaggaagccttcttaccagtctggcctgtaacccttgctctgatcgtccgtcgtcatcgacgcctgaaccctgaccaaccgggcctggaccttctgccaatcaacagcgcgcaaccaggccttgacataagcctcttttccccagacaccatgatcggctacataggcgtgctcgtgcaagttgatacatgccaacggaacgatcgttgatcggaagctcatatcctcgtgagagagcgcatttgtaggagtagacgactcgagctcttgccagatcggaggaagatcgtaaatcgacggagtcgtcgaagacgaaggcgatgatgatgatgatgacggagaaccctcttcggcctcgttgccctctatcgtatcctgctcaaccgggctcttttcgctgaaggtgtcagcatcctgttgatcagctaccccgacggttccgatcgaagcgagctcgccccacactcgaccttggtcgtccatcccgctagccaagaaaccgagtcgttcgtccgatccggccttggaggcaagccttccgttagacacaagcattgtcccctccccctgagaggtcaccagagcgagacctgactccttgagagcaggatcttggacgagccagagccagccgtcagaagaaagtcctgaagctgtaccgatcagggtttgctcgaagccagagtttgaaccgaacgatgaaacaatatgcttcgagatctggtaagggtattgaccgggtttcgatgtgtctcgctgtcggccaaggaggagatagtagagataacatgagctatccgctcacatacaacgctcgcagaggtttaaagaagaagaagaaagcacatacaagcgagctaaggaaaaagttgttgttcaacgcttcacaactcaacttgaacagtcgatcgcaatccttcgtccactgttccacagactgatcctccggcttgtctgacaatgagggtaccgctgtcttggagaccaaagactgaaccgtcgccgtctgcaaaggggaggacgaacctgttccaaagagacgcgtcaatagaaaaggggtccatatcgaattagaaacaaattagcaagggaaaatggatcagaaagctagagcaggctgaagagaggtaagagaagctagaagaacagaggaaaacgaaacgtacgaggtcgaagagccttgatggagctcataaggtatcgttggtactcatgggccacaacctggttataagagaacattcggcataaatcatagccacaagaggagcgaagtaagaatgaaacacaagaaaacgcccagcaaagttcttttcgtcagcctgtgttcagcctcaataagactttctataacgaattaggttttgcctcgtcgagagcgaaaaggatgaaaggtgaaggacgaagagagaaagtgcaagaaaccccactctctcgaggaacaaaaataccagaggaataacatgagcaagaggacaaaacgaaccttgacgcttcgtgcacttaaaaatccatcgacgtctctgtcagaccagatgtcgaacgacccgatcctcgatccttccggtcgggccagagccgtctgtgccgtctcagatgaagccggcgtaggttcggcagaagaagcgtaggatagtctggtagaagagattgctcttcgagagcttgaagaggatgaaaaggccgaaaaagaagaagaggtagtggcacaggatgaagaagggaaaaagagacctcgacggagggttcggagaggagaagccatggctgtttgatcgtcgactgtccgtttgttactttttctgtgtttgaaaggaggaagaaataggcgtagagggtccgactgttctgcctgtctacagttctaactgaaggatgaaagcaatcctggtatgaggaatctgaaccggtctcgtgctggctgtttgaatgatggacagatgaacgacttagaaggcgaaaaaggagaaaaagttgggttgggcggaagaaacgattggctagggttacacgtcaggctgggcgaggcattgtcttcccaacatgtacactcgtcttgcagcaaacacaatgtaaaattcatttatatatgatacaggataaacgcgtccaaaagtaatcgaagacagatcacagcagataaaacacgatagttggccttcgttcagatggggaggaatggagatagacgtggcttctactcaggaggaagagcagatgagagaaagcagaaaagaagaaaaaacacaacaatgtcagaatcagagatctcgaaaacacaaatgaggagaacagaaaggaacgaaagcaggagtgaatctaagacgaaaagaagatgtcacggtcgactgatggaagaagggaagggaagggaagacggaagggcacgcgatcctgatcagttctctaaatgacgcaacaaacacagacgtgtctgagggatgaaaaaagacaaaaaggctgatcgcttatcctttttctttccctgaagaggagtaccgtatctggcgttctgatttcaaagccaaagggagagagatccgtcgggagaataccctctaactgaatactttcgtccgggacagaacacgaaagagagaagcgatgaaagatggatggcagggagaagagcaagatagatggcaagaacagaaagagacgaagacaaacaatgaaagaaatcaagcaaacctacgtctatgaatgcctagcctactcgtcgtccttaggagcgaatttatgcttttcccgagatgaatactcagtcatccctctaccggatccgacaacgccaactagcgacgaagaaaggcgatccaaacatgtcagctgtgtagatacatatgcatatgtatcgggaagataacttctctgagcacttaccttttccgttgacggcatctggggtcttgaagatgctcgagccgtcaaggccggcgactttgacgcccttcttcttggccttctgaccgaatgcctgccagctcgactgcttcttgatttgctcctcgttcttaaccttcttgatctctttccacttttcgttttttacttttttacgctctttttcattctcctccttgaatttttcttcggcctttcgcttttggcttgccggcagaggcttcagcgacgagagaggaatggtcgaaggtggggatgacgcgtaagaggtatatagcacagtgtagattgggttgcctgccggaccggactgagagaggatttttgccgggtagaatgagccatcggtatacttcgcgagtacaaagtcagagactttgaactgggaagccgtcaccggtggttccacaccggtcgttgtcgaggagttcgactctaccggtgtggactttgaggatgatgctggtgcggatgtggaggaagaggctgctactttcgcggaagacagagatgaagaaggagcaggggcagaagggggaggaggaggaggggcataagcagcctttgtgagatcgatgagctcttgaagctcagactccaagccttgtagttcggcgttggatggatctgccgagagggcgatcttgacttgggagagtctatttccgaaagagtaaagacaaatgaatgagaatcaatgtataagaaatggacggaaaaggaaacaacggaatccaaaggatgctgctcactgatactcgtactgctgaatctcgtctgccatagcgggatggatgtggatggtacaaaggaagaagcaaggaaggaaggaaggaaggataaagaggaaacgccagagcctttacagggctgtggttacgagatggttacgtatatctttatcttatcgttattcttatcaacttatccttgcccgtgcctcgtttcttcctatatccttctcagagaccatccttcgtggccatctctatgcgtgtcttcccgagtgcatgcttctcagctcatgagtgtatgtgctagtacttggaatgatggtaataaatagaaggagttagttgatttgtcgatagcctgtctattcagatggggtctaccctcagtctccttcaccatctatcctctttgacggctgtgtgctataccggttgttccttctcaatgctgctgacgaccatgtctgctccctggttctctgcgctcgagatcttccttatgcagtacagtagctgacataatgaacgctcttgttccgcgtcttgggtttgttctaactcccgatatgcatcttccttgtttgctggaatggataggataaccagctccaacaaggcagactctctccgaaaaatctctgattcactatgagaccgaataacaagaggcagtataacatgtactcatcacctcatacccttcgattttctctcacttctcgaccataccggtggtgacagagacttgtgataatggtctgttcgtctttttccgagagcaatctgaggataatatctcgaaccagagttcataagaccatatcgttttcgcccggaagaggcagtagtctgccgttccaccaatacctctggactgggcgtcaactctcaaatagtcgaaatagtccataaaatctcaagatctcttaagatcatccagaatgctgtctgcttgaacgaggcaacctcaaatgcttaaggctgttcacctccagcagcatgtttcagagcttgtgctgtacatcctaataaaacgttcgtcgctgccttgaaagcgctatcggttatacaacaccaattttaccaaacgaccgtcgagacgtatagaaacgcgcacaaagtatcttttaactcattttgttgtcacacctatatctcgaatctgttaatatccgatgttatgagcttccacaagctgtaattgaaagacaccgctgtgagagttaacgtgaactgtcggctcgttgtacatacatgctcgcccataactttacaactatctatctcaagaccggctgataactatgctgagattcttgaatattttcaatctatgagctttttgagtccttctgaatgaggctggtcggcgtgctttgtaaagatttagaagtgttaatgtatgattgacgacggagcttggtacatacacatccccgactcactcaagcatcgatcatcgtgtatgccgctttgtttatatatcccatgttctgtatatatctgctacatatcatccccctttcagatgcacacgtcacacctctctctttcaagcatttgtcgatgtatgatatatgtccaatgtgtgggacagttatccaacgaaggactacaacgccatactacaactgttgtaataagagcttctaataaaaatctaacctctgaaaatgcatagagcacgtttccatctcgtctctctttctcctctcactctttctctcttccttcctcccatctctctgtcttctccatcctccattctttctccttctccctcacatacacatactatggccgaccctcggatcacccagaaagaggccttcaacatcaatgcggtatgtgtcaaattgtcgtacctcgatgagacacaatgatagtcaagatgagactaatctccctttctttctcgattcctttccaactccctgaatttttggtcctgttgattctgacgatctcaacgatcccaataggcggctgccgtcaagcagtacaatgttgagccccgactaggcaagtttatgtttcaagttatattgttcatcgtctccatcgatcacaacacttatcctgcttgtctcgcccttgtacagactatcgaaccgtatctggtgttaacgggtgagtccgatcagcctacattcccttcgttcgcattcttgggaggaacacgtttccttttcctccttttctgattgaacaagcatctagaataacatgcctattccacttcatattccttctttcacagtcctctagtcgtgttggataatgtcaaggtcagttgcggatccacccgacgctcacgtcttttaccctgaaaccacccttttcgattgacccttcgacttagcttcgtcaacccatactcaaactccttcttatgcttgaaccactagttcgcctcctacaacgagatcgtcacacttacccttcctgacggatccaagcgaggaggtcaggtcctcgaagttagcggaaagaaggctatcgttcaggtgcgtcatatctcttcgtattttgaccacgctttttgtcctgttcttatcatccaactttccctcatccttactatttataacaacaggtctttgagggaacttccggtgtagatgtcaagtcaacccacgtcgagttttctggatccgcgatgaaactccccgtctcggaggatatgcttggccgaatcttcaacggatccggaaacccgatcgacaagggacccaaggtatttgccgaggattatcttgacatcaacggttctcctatcaacccctattctagaatctacccagaagagatgatccagactggaatctccaccatcgacacgatgaactcgatcgctcgaggtcagaagatcccgatcttctcggctgccggtttgccccacaacgaggtctgtcattttctatccatcttctcagattactatctgtttgaatggcaagactaaatactgtttcttctcgtcttcttagattgctgcccagatttgtcgacaggccggtttggtcaagcgacctggatccaccaagggtgtccacgatggacacgaggacaacttctccatcgtgttcgccgccatgggtgtcaacatggagaccgcccgattcttcaagcaggatttcgaggagaacggttcgctcgaccgagtcactctcttcctcaacttggccaacgaccctacgttagtttggtcttcctagagaatttacaaagataacaacgattctgatcaaggggctctcttttgactgttttatcgtacaggatcgagcgaattatcacgccccgattggcgcttaccaccgccgagtactacgcttaccagctcgagaagcacgtgttggtcattttgacagatatgtcctcttacgccgacgcccttcgagaggtttcggccgcccgagaggaggtgcccggtagacgaggatatcccggtatgtcctttatcatgatcttatgcctgaacgccttctgccctcccccttctcccaaccagggggtttgttcatccgtttactaatggccacactgtctgataactacaggatacatgtacactgatttggcgaccatctatgagcgagccggtcgagttgaaggcaggaacggttcgatcacccagattccgatcttgacgatgcctaacgatggtctgtctcgttctcttcctattgtttcaattaagtcgtttcttcatttcggctcaacaggtttcgtcctaccaatttacagatatcacgcaccctattcctgatttgaccggttacattaccgaaggtcagatcttcattgatcgacagtaagtctgcaggtttcatcctttttaaagtcaaggatcatgggaagcctgaccattgaccatcttttcctctcttcctacctaaaagattgcacaaccgacagatctccccgcccatcaacattcttccctcgctctctcgattgatgaagtctgctatcggtgaaggtcttactaggaaggatcacggagatgtgtctaaccagatgtacgctctctacgctactggaagagatgccgctgcgatgaaggccgtcgttggagaggaggccctgagtgcgaacgataagctcgcgctggagttcttggagaggttcgagaaggactttgttggacagggaacatacgagtcgaggacgatcttcgagtcgctggacttggcttgggagcttcttcgaaaattccccaaggagtcgctcaaccgaatcaatcccaagatcatggccgagtactacacccgaaaaccatcttcgaagccaagcaacaaagacacgaccgacacccacgatgacaagctggttgacgcctaagggtctacgtttgtttttgtcattatcctctcatgaattttctatcatggctttctctagcttgttgttctagcttcttgttccagtccgactgtcctctaaactacaattctacacttcattggtcttggatatgccgacgcctgttcaatcttgactctcttctcgtcttcttattttcctccttctccttctctgcctcttctttctattcattgctcttgtgttgatagagttggtctcgatacatgattcctgctcttagattgcaacaaagaagacgtgcagatgagatagtttgagacaaaagaactaattcgagcactaaacgtatgtatccgccggggaagagcgtgcatgacgtctactaacttcgttagctcggccatccgttatctgtccgtccatctcttgttcgattgtctatccttcatctcatacccatcacaccccatcacatccatcgtgtctcttgcatctttcgtactgaagaaatgaacacatcgacagtcgctcaacagctctcaggtctgtctgtctgtcttgtcgtcctcttccttgtgatggccggctggttgtgtatcgatattcgatctcgatatctaattacatccgataatctcttctcgatctgttactttagatttggctcccgccttactctctccttcggtcggtcgtcgggatgaagtactcgacaactttgtatggcagcaagtcagactaacctcacctctcgtcgatattgaagggcttagcaaagtcagaaactttcttcaggccgaggcaatctacagagaaggcgaggttgacatcagcaagattgagtgggacgaagggtatcgttccttctcttccgtttccccctccccccttatttctccaggttctttggaatcctcatcgttctttatatgcagccggtcatttcataactgactgtttgtatgtcgttcttgtacggttgtacggtacatgggtttgcgctgaaccgcaggctacggttggccacgatcacgtttactcagatggtcacggtccctcttctcaagctactccgacttaagataatcgatacaaagaccacccttcacttgagaccttctcgagagaaacaagacaatgtcgagaaggacgatgaaggacaacctacgctttggtggattgatcatatctctatagaactcatcacatcaaaccctttagtgatgtacatctctcctcttcttgcgcgaacggtcctcgtggaaggaaagagggaacaaagagctgactttcttcctttgggtgtctgtgggacacaatctagctctccgatactttcggttgtcctgccttcctttggccagctgcttctgcgtactcattctttgcactctcgccttcaggccaaggcttcccagctaccagccctgacgagttcaatcactcgagctgtaaccaagctgacgttccacccgatcgagaacggtccagtcgttcttgccgtgtttgccctgttctggatcggacttgctcagtcggtcgttgacttctggcagagaaaggtcgtcaaggacaaaggactgttgatgaagcttgacctcaggtgagcagattgtcgaattggtttctctttaatcgttacaaccctcgactggacaaaggtggttctaactacttctttcgggtgacggttatggccacgtatcgtaccggcgtctagtacgaatgtagagcctgctaaaaaaccaaagaagaacatcgacccgatgagtccattgaatctgctgaacaacccagttccaggagaatcgtatgctgcggctgtcaagcaccaagtttacaccaacggctcgggatcctcgaatcagaccaccaataccgacaacgataaagctccagacgcttctgcagcttcttccgcctttaaagccgacaagaaggaaaccatcgatggtaatagcggggacactactccggaggctgccaaaccagagaaccttcagaacaaccctgtgcctggggaatcatacgctgcggcggccgatcccaacatcgataccatctcgaccactgttgatactgaggagagtcctgagatcgaagcagccgaatcggtgagtttgcaggacaatcctgtccctggggaaagttacgctgacgccgttaaggatagcgctcatgcccaccctgacggacctgaatcggatggggtcgcattgggtgacgtgatgccgacaccctcagagcatgattcggacgaagagtagtcgtaagcataagtgaacatatatttgtctcttctatatcttgacttttacatgtaaatatatatcatatgtttctatatctcatcttgatctattttctctctctcctttgcttcttctttttgatatggtctggtcaaaacttggttgtcagatagcattcaatcattctgtactgctgtgctcttagtgaaaaataaaataacatcgaacgacggaggtctcgcagattgtttcaagacaagaacagtatggctcgatccgattcatcccaatctatatatgcatatttcttctacggtttcctcgtttcctctctgtgtcatcccatccatcttcagacgatgatctatccacttctcttttcgaccgtctgatcagtctgctttgaagaagcccatctctttgcttctcgtaaaagcgcaagaacgtctgtttccgaggggagacccggagcaagggggagagtcctctgaagtttaaacaccttgcgtgtcggtcgggtgagaggaggtacagaatcatgcacaggaacgggtgcaggtgtaggtgcggatgtagatgcgagtgtaggtaaagtgacgggtacagaggtaggagtgaaagtagcagtgggagtagtagcgggcgcgggcgaacgttcagatgaccgagactgtaatgaagacgtatcagcaacgatccgagcaggagctgatttctttattgaaccccctccaccagacgtttgttcgctatccttattcttcccgttgtgccgatcgaccgcaaccgacaaaggtaccaacggttgcagggacccagtcgccgccgccgtttctgacgactgaggaaagctacttttaccttgagcgagagccgctctgacagtttccctctgttgggtatcaggcatctgcgagaattcgatcgtctctgcccctcgggtctgtgtcggctgagaatccaacggttgatcagtgtatgttggctggcccgttcgaagcataggaaccgtcgaccaagtctttgagctggtggtggtggcggtggtggtggtggtagtggcagcaacagcggcagtggtagcagcggcttgcttgtcgggttgattctggttttggtcctggccaaaatttggttcagtggtgggttcagcagtcttgggtctcttttgttcgttatgcgtcgtaaggaattcatcgaggaccggtcgctttctagagtttacattcgtaacagttgggatcagcgctgattctaccgctgttattgtcggtatagattctaccgtcatctcggatgtcgaaactatccggtctggaacttgaactagaggaggatggctgataggtggaacaggtttctctgttggttgtgatggcgattgtgtttgtgtttgtgtttgcgacagcgattgagtctgagagccagatacagaaggttgcgtcgacggacgaggtggagatagtgactgaggctggtcaagtggtcgggcttgagagggttgagaggacgacggttctgtcggtggccaagataacggtagagactgtgaccgagaaagcgagtcggtgtcgctgtttggaactagaacggtactggaagctcggccaagcggtctcttggttccatcctgggcttcggtcgtgcgtgagatgccgtccggcttatcggaagggaggacgactgtatgctggagcggagcggtggatgagagtcgagggggtatggaaggggatccgtgctgctgtgagggtgatcgaaattgtgattgaggttgagataaagaaggagggagtgagggtctggtcgaactaggagacgaatgggtgatcgtttgggattgagaagccagcaaggatttttcgcgttccggtactttcggatgggccacgtccgtttcgttctgaatcatttctgtgtcgttgttcgcatttacagtcatgatcgtagccacattgatttccgcagaaacgggtgtcgagggggccgactttggagggggcggagtcgctagggaagggacgaccggttctgtatgaggagctgtttctggtgcagagggtatctgccggacagggtgaaggagactgcctttgactgtacctgcatttgtgccgatgaccctcggttttcgaatggaaagctcctcttctgaatcttgatccacaattggaggatctgtcgtagttattggtggaataatcttctcgggaacggaactgggcggggatatcgctcgagatagctgaacaggatgagaagaatcagagtgccacgacggtgaaagccgtgggcgggatggttcatctgtatcctcagagtagtcaaaaactgtcaatcttcttctctctttctctgacaggaatgggcatgatggacaaaccgatagcatcgagtaaaatctgttgatcgggtggaataatccaccaacttagatccagtatattcttaggtttagtttttggcgggggttctgactctgacgggtttgcactgtatgatgggagggatgatgcatgagggggaggtggtaacgaggtattagctgacgatcctatggaagagctaggctgaatgagggtgggcgcaggtcgagtggagggatacggctcaacagaatcggtagtaggtgatgtcgggattggtctaagcccgatctggttgtacttcctagcaagacgagatagaaccggattttaagccaaagagatgaagaatgaggaggattctatcaatcagcacctggacgatatttgtttctacttgttgtaggcagtaagaagctccgacgaacctcttgagcccatcgacccagtctcttagttgtcctctatttatctctctgctcgtgtccttgacacgatcgtagtatacaggctcatgctctcctccactgttcatcactgtgaacgccaagacgtcgaacgcgagatctctcgtttgggctttggcgaagggaagaatcagcgttggtctgatcgacgtcaaccgaagcacagcacggcggagggaggtgatagatcgaccggtctgcctaacaatcgggatgatgatcaagccacaagttaacccagatggtctatctctgagaatagagaatgaaacagaacggacgtttgatattttagggcggattcctccgagaagacagcgaggatggataattctgaatctcctactctagcccagtacggactctcgaatgttagccactagatcaattcgacaagcccatcagaactagttagctgacaacatctctcgagttcactgccaaacagggatgctcagggtgtgattgagcgaaacgaatgacggacggacggactgactttatggacttgaatgagtttccctggttctgctatgtcgcattcgagtccatgttttctagcataactctctagccgacgagctatccatccgtctagagagtctgccatcgtgtgagaggaatgtgtctgtgtttgcgtaggacaaggatcaattgatgccagaaagagtcggcgaggagttggatgacggctgagagaacgcaatgttcatttcaccttctctcaccgactcggccttttcctacgttgatgatggggacacgcccgtttactcttcttcccgtgtcttttcctcacttcttctgagcatctcgaggcttttatagggacgcgtagaccagcagatgacataactgatttggaaaagaatccaagctgaacgcgcatcaccatgctgattttcttcagcgaggaggttttatctagattcaaacgctaacgtgttgcgacgcgcttcacttctccttctgtccgacatgatcgaaccttttctccttcttccttgttcattcttctatgtttaacacgctctccatgtgcatatctaattttgatgcagctgtgtcaatagaaatactccagttggctctcctccggcggacggtaaggctaactcgcatatttgtctatcaattcttaactctgcagcttggcatacaacaccaaatcatagcactcttgcgatacttcttggccaattgatacctgtttaagagccctcaaagactgtgctgtcatacttatacaacgaggatactccgctttctctctcgtacagcgctcactagatcattcaacggaacgacgcgtcccttgtggctcaccgccttctgacataactgcaccatcagtttctcaggtgggctgggccagtatgatctgatgtgatggcgttagaacgatcgatgttaggctttttaatctttaaaggcgtgagtgatgatgagaaaagaggaaacatcaaccgatatattataattttgagaaaaaaatgaaagaaaagatacttgagtacacctgaataggaccgaacgagctaatccagttaggacttactatctttctaccatacgagaactcttatggttgatctgaaggagaatcaatgagaagtctattccagtatcaagaaagtgtggcccaaaatgcattcccttgtcctttacagtatgatatagacgaacacatgttgatgggccgcctgcatgttgacaaacgcagcctgtctttgaacttgtcagtagaccatccatttcgtttctgaaacttcttgcctcttgaaacgtttggtgtgatgccgttgatatgtttgtaatgatctcgtcaagcagaggagggatgagggtaacccttgttcgcctggtgaatagtacggatcgattggcgcacgacgaaaagaaaagatctccccaggcaagtcttcggaacatgtttcttgttgcctctcactcagcatgttgccatcatggctggttagcgatttctcgtctttacttgctcctctcttcatgtcaacctccccttatttacagcgaagcgcccaagcagtttacttttcgcttcggtggatgaccctaggatcagaagtagattcttacccggtgaaaccgtagaagattgatttagctcagcacacaccatagggctgctatgtatatctgcctgctcgctcaccatcgcaacacaattaaccgaatcgaagaggatattgtaagacgtatcagagtctaggatcacaacgaagaaagagccatcccggctatccgcggttattggaattgaaaccgggttgtcggcccgcacttgcgatcgcttcatctacaaaagcagagtctctgctctctctaacgtatctttctccaaaacatctctctccattctacatctcatctagttaaaaaaacatactgatatcatagacatgctcgtcggtacaaccttcccttccactcaccccaccggtctctcctctggagaaggagcggatgtgatcgctaaaatcgaaacattccgagtggttagtttccatctacctcatttactctctgtttctttcgggaactctctttttgctcacttgtcttgcttttgttctcatcaagcttcctcgatggctcttcgttcgagttgagacatccggagggaccgtcggttggggtgaggccactctcgaaggacactctgaagcggttgagggagcgttcgaggactttagacaacgtttcaccggttggaatgtcgacaacattgaagacatctacacctcggcataccgacatcgattctaccgaggtggtccagtcctgatgagtgctatctctggattggatatcgcactatgggatatcaaaggaaagaagctgggggttcctatctggcagcttctcgtgagtatctcgatgttagtttcttcgaatgcttccaccagtttcggatccttctttcccgtcttcaagtatctgaccaaggaattttaccctgctctgcatgaatttactatagggtggtcgagtccgagacagaatccagtatgttcatttcctctttaactctgctcactctgcattttataaccgtgttggcaagttactaattctagatatgtattctacttcacgctcaacttagggtctacggttggatcggtggagataagccttcggacatctacgaacaagcaaagaagcgaaaggctgagggattcacaactgtcaagatgaatggctctgaatcggtatgtttctactccaggactttttcctcttatcgtcctaacgcgcggatgtctgaccgttcacttttatgaacgaacgaaaacagctgggctggttagcttcgcctgccgacttggacgcaacagtggaacgtctcaaggaggtcaagtctctcgggatggatgccggtctcgacttccacggtcgagtccacaagccaatgtccaagcaggtgagtcgtacactcttccaaatgttccatgtttatcctggttcttattgtttttatagcgctaaccaactgaaaatatttgtagcttgctcgaaaattagaacctcattctcctttgtttatcgaagaaccgatgttgcccggtcagatcgaggagcttaagaaactctatgctcagacgacgattcccatcgctgtgagtgatcgccctactattcccttgtacttgattgatgatcgtaactgacggcctatccaatctggatatttatatatgaatcgggaaacagttgggagagcgattgttcacaaggcaggatgtacgaccatatctggaggccgggtgcattgacatcattcagcctgatatcgctcatgccggaggtttgtctgtctttttccatcttcttcgatctactattacaagacaactgaggttctacttccccctctctctttctaaataggtatctcggagacgagaaagatcgcgctgatggctgagacgtacgacgtcggggttgctccccattgcccgctagggcctatcgcgtttgctgcttctttggctgtggctgcttcgacgtgagttttttcactctcttctatcgtcatctacttttcttcaaacttcaaaggggtgattccaagttcgcacgaattaataaacttcctttgctggctctctttcgaaaacaagtgtcaactttgttatctgcgagagtaagtcgatttaccctttcttctctctgttaccttcttgaggtaacccgttctctaactcttgaatctgattttgtcatcgcagtgagtatcgccatgcactacaacgtaggcgactatgatctcctgacgtatatcaagaaccccgaagtgtttgatgtcaaggagggaatggtcaccacgttgactggacccgggctgggaatagagatcaacgaggaactcgtcaggcaggtcgccgttgacagcaaagactactcgtggaggaacccggtttggagaggagaggacggaagcatcagggagtggtaggcgttgagctttgatgtcttggaacggacaaagagtcgggttatcttcaacctttgtctgatgttccatcatgtatttttctttttcttccatcctctttctttctttcacactaggggcgatacttccataatatttaaccagtcgtattcgcatatgtctatgaaacacttatgttctttatatctttccgggccgtttcctcattggctttcttgtgacccgagagagtgaaagaattgtacatgaactaatcactgcgcgcatcgaaaaagaaaagggaaagaatatgaatagaagagatctgaacgaaagtgaaaagggtagaaaaagaaaagaacagaaaaagccagatggtcgaagggggggaaaactggagaacaatatgccacagatgaaaccaaaaattggatgcatcctgaccagacgttcacagattagatcggtcagacagatcagacgaggaagaggactgcgaaggtagaaagaatcgaaggagactaggctgaagaaagagaatggaagaacgatggaaagatacgactaaaaaaaaaaagataaaaacagaagggccgggtgaataaggtctttttcaattttggggggaaaagatgcaacaacagagttcataagcgaagtggagggagaacagtgaacggattgataccaggagaaacaaattgttagaaaaatagtatagacagagtagtggtggatgtgatatgaagaaacattcaagtttcttcttgcggtgtttggtgtttcatgggttctcgattcctgctattatatgggctgaacgagagttctcctgcagctcaagtggcataaccaataagccccactttgaatttcagaacaatttagagaaagcgatgactcgaaagaacatgcggatgaccctagatcgtttgcgtaacgggctgcgaaggcggcgactgatgatgttgcaagctgtgcaacatcagtgtaaatatgtcagtcgtttcaataccaatatgctatttgaggaaagagcagaagcaagtctgctgttgggataaccaggagaaggacgaacctttttctcttcgctttcgtcatctccttcctcaacgctggtgcatctaatggcttaagtaactcgaatgcacacagtagttcctctgagacagccatgacagctgcatagttgtcgaatctacggtgtccaaatagaagaaaggtgttcagctagctggtctttgcatagggattgaatgcttgatgaaagagccttggttagaggaagactcactctccacaatagttctttagggcgacagttggtgtagacggttgagtcagtcacaagcactcaaattgttgagaagaatgcacaaaagatgagaagagacacgaacgggtgcggagaacactgtaactagcgttctttcattccagaattcgtatccatcttcgacaaccatatgcgctcgacatatcagctatcaatcaccatcaatagtggcgaggaagagaggggcgaaggcaagaagggttgaaccaaaggaagcaaagccatggatattgagttgtctgatgggtagtgcagttgcaggcagagagaagaagtagaagtagagaactcacgtcgatatcgtacgtagccaagaattggttaatcttggttcacaaaaataagtgatctactcatcaggcctagttttctcgtctttggatgaaggatggacaagattgtgagatcgtgagatgatagagacgtaccacgctctttccgaaacagtatgatacaccacgttcattgtcttcccaatcatacgctgtatctgagggatcactccacaacaggtcgttcaactgatatgccagaccttcagattagcatgtagacagtggtggaatagagacgtatgaagatcgagaaagaagagggaatggggtacaaaccaatccataatccggcacatcagtgggtcgctgaatctttcgaatatcatccatcgatgtcaaagaaggcgagagacctccgtgaacacagaagatctttgatgcgacgatagcagcgataggaagggtgttgaacacgtcgactggattgatggagattgataacgagcaaagaaaggagaagaaaccaaagacagctttagattatgcttgatgtattcggatatcaagcatttaaagtaggaagagagatgaggttaaagcacaaggacgaactgaagcctttccagatcttgatgttacagcgtcgcttgcactcgtcatagaacccgtagactcgggtcacgttcgctgcctcgtggtttcctctcaaaagaaagaaattctccggatacttgatcttgtagcagagaagctggtttgcagccacagaacgcaagccaaacgtgtttagttaggcgtcataccccgagatgatacaagggcatcctaacgtaccaaaaggatcgtttccaaactctgctttcctctatcgacatagtcgcccaagaataagaagttgctgctgggcgggaagccacacatctcaaacattctaatcaaatcactgaactgcccgtgtacatccccgacgactttgaccgggggtgacagctcgagcaacgttggctgggataagaagacctctctagcagcgagacagatgctcgtgatctctgcattctttaatgcaggtgtcttggtgatcttgcctgtgtaggcggaagagaggagccgggagatgagcgaatcgatatcaagtgttcgaggaggagttgggttcgaaggattcgagggagtatgggaaagtgtttgtgagaggagcgatgttaaaggcagggaggatgatggattagaagtggagagcgatgggttggataagattgtctgggtcgtaggaacctagagtaaatgacgataggtgaaccaggaatgccgtgagtgagttacgggttgggtccatctgcgaagagagcgttcaaggaaagataggcgtagatgtggatggatggactgatggatgattgatcccttggaaaagtaaaggatacaatgatgtttccgatcatgtgctgcacgaatctccacctcattcttctcagccccctgacaagcggctagcctctttttctatctcccggcgtacgacctctgtcttagataggtagaaaaacaaaattaaagagagaagatggagaggagagtgatggatcacatctcctcgtttgcatctctttgcttctgctattcgtcttggtcgacctctatcattcataggttgccagaacgtgcaatggtcatgcacgccttttggttcctttggttctgccatctcaaccatctatcttttggacagcctatgctccaaccacaatagacacaggacggaaaggcaagaagaagaaaagagagagagagagaggatacaaagagaaagaagaaaaagaagacaaacctcgttggctcccatgggtaccggctgagtgccgtccataccgtcttccgttggaggtccgtttcccgccgccatcgccgctgccgacccaacagatgatccaggcggaggtgatccgtcctcatcagcatcatctctaccctttcctttcttcctagaccctccagtcggtactcctgatccgacggacccagattcattatctccttgaaggcttcctggtctagccaaggccgaggcggatatccgcccagcgggcaccggcccagcaacagtgggagtgtcatttgggttgtaggacgagtgtttcaaaggagatggctctttagactttgtcctggatatctttttagacgaagacgatgacgatgtgtttcccattcttgtctgttctctttgggatggatgaaagacgggaagggaacgaagggaagatgtgggttgatggtcaggtaatagggaggattttccccgatcgcttgtatttaaaagggccccggggctgggcgcttggggttaggtaagacagttcgttgactatttgatttgtctaatcaggccaagcttactcttatgctcactatgtattcatcgttcgatgcatgctgagagaaagacatgaatcggatatatcgttgcttatgagagagtgagagaaaaaaagggaaaagaggaaagagaagagagataacaactggaaagaggacgagtatatggaacgaatgaacacaaagatgtacagagaaggaaacaagaacatgaacatgaaaaacggcaagcaaaacgactcctacacccaatcctcatcatcatcatcctcctcctcctcctcatcctcatcctcctcctcatcctcctcctcattaaacgctctgatagtgctcaccccgctaacagacctgcgagtagacgacctccggcgcgacagaccctgcgctcgacgaccaatcttcccgctgttccccatcgcgctcttgatactacccggacgagttgagacctgagcggcccgcgtggacttgtctcgtacccgtttccccatcagcttactctcgtccttgctagctgtctgatctgtctgttcggtcgatgatgacgagcgagttggagcttttctattgaagaagaaggaagaagtagctgatgaggattctggctcgtctccggccatcccttccgccgtcggcgttttgcacagagacgatagtctatccgtcgtgggagactcggcttcccctgtccagtcatcggccgataaaaactcaaattctgaacccagagctctcatcggcgcaggtcgtgtgttctggttatctagggactctgcttctcctcctcctcggtccaggggagatgggctggtcacagcatatgacgtcgtgtcaagcggtgaaagcgacgaaggaagagcggttgacactggcggaccgagactactagagaacccggatgggaacagacttggaccaggataggaagacgagatgatctcgtctctactgataaactctgcgatctcatcttcgccatcttgtgcgatcttgacgtcctcttcctcttcctcggtcggcttccgtcctagatccaatggaacagattgtggagcatgagaagaagagggccaagggacagcctcctgaagagaggacgatccatcatctggatcagtctccgagaacgattcgagtccagccgagtcgtcgtcatcccaattgacaggctcattcacgatcgaaaagatagcgttcggcatctttcaatcacaaagatacagcaacaactaagattagttctcgtccaatgccatcatctattaaactggattattcttttaggtaaacaaatgaaaaaggacacatacggcagaaactcttcgcttgaagtccaaccaatcggcttcatctaagcagaggaaccctaggagcatgctggggtcgagttggctgaacgccattttgcgaaccttctcacagtggaacgtctgaagcgcaccgaacgaatacgcatttgcataccatcctgacagcggatccaccccacctgttagagaactagttggcctaccctctgctctgagaagggaaggaggtgtagtcgcccggattgtcgaatcttcttcgggcagagagagcggcggcacgagatgacctgccgcagactccaaagtggtgtcctctgattctttcgttttgtcttcctcctttcgttcggggtaatcgatatcagtagtctgctccgttgtttgccgcatgtccgctcggtaaggaggcggtcgaagaaccactgctggtcgtgtgtgatgtggatcgaggtaaatcaaagaatcggcttggtagcccaagaaataatacgacgatgaaggacgaccacctgctatcccgaccgactgagggaaggtgaacaggttctgtattggtacaaagacacaaggtggagaggaggacatggtgagtagaagaatcagagtagaaacacatgagaagagatggcaagacacaccttaacggtctcatgataaatcgggttgactccgtccagtcctaacctcacgttgaccaaaatcaaaaccggtcttcctccccacgagtctgccgactttggccgtttcttctggatagagagagacgacgtggccgctgataattcgtctgaggttggtatagatggaggttgggaagcagaaagaacttcggattgaaaaatgacactgtcggccgcgagggttacagatacaccggcatgagggtacaccgtcgtcaacgctctaaggatgtatgcaagaagagttatcagcagcagcagtagcagcaagaaacagcaacagaacgaatttacttacttgatagcccctccagctgtactaggtccgaaccactctccgacctcttttccgagttgtttcccgacaagtgccatccgatgaacagagaaaggtgcgaaaggtgcaggatcatccatgaaccacgtcaggaccttgacatacgtcccgtactcgatgatttcttggtgagacgaagatgatgtcggaggtgacagtggacggcgccaatctatgaagcgagacggtgcatacagaattcaagaacgtttgggacgattggtgaatttaaaagaaacttttggaggaacaagtacaggaagcaggaaagtaaaatcaggctgtacctcgtccgagatggaatcgaatcaacgcattggctagcaaactttgacctgttcgtagcatacatccccatccagtgtctgctgtgaggcctttctcgtcaatcccacttgcactcttcacccaagcccatcctgtatgcgttttaggaataggcgaccgatccttcaacacatcccgggtttttctgatcagactaggaagaggtagaccgtccgcgtcgaactctgccggtgacggagtgagtagctcggaaggtagagaagagattgcggcatactgtgatcgataagtgcaccagatggaagtctgaaagtcggcgtagactgatcacaaacagagaaggagagaagattccatatttagtgctcagtgcgcttagatgggaggtagacgataacatggacggttgaactaacaatcctctggccacctgacctcctctcttccagctcttttatcctttcgaggagaagaggatccgtcttctgttccgacactactgccaggaagggtggaaaacagactggtgaacttgcttggggaagagaccgggggatgacttatggatggcgcagcctgtttccgaggtggggaaagcggtgttgaccccgaagaagaagtctatttatcatcagaaggaagaacagtgatctaatcagtcattctggtcctttctcccatcgctgccgtgttccttggtgttgatgtaggaaagcactcacaaagttttcagcctgaacagtgggttctgacaactcatcgctcggtctactcggcttccaaccttcatgaagttttcccatgatccagatcccctcctcacatcgatctggcttcccagcatcggtatcgagcaggtacctcattatcgcgccattttctctagcagcggccagaaaccctctcttaccttgtccagtggaagcatatgaggggagcgctctatgcgcggccgagacagtcggagatggagtacgcccaggatgaagagatggtgggatgggcgtcggcgtgaacgatgacgaatgatttgttgatgacaacggagagtgaacggacgaaggctccgagaatgttgacgagacggacgatgatggacgatgcattggacgaggtggacaggctgtgtttgatgtggatgttgactgaacaggtgattgatggtttggtaagagattggaaagccagccgcctagacgagttgggaaagtactaggaccagattccgacgacctcgctgtcgacccggcaataaaggtttgatgaagtccgttgggagcactgggatggcctccttctatactactcgtggacgctggctggctagcagaggtttggagtcctatcttcccagcgcttcgtcggcccaacgtaggagacgtaggtggagattggaatttgggaggagaatctaccacgatcgttggatctgactcagacgttgaggctggagctacagatgaggagaaagagtgactgaaaggaccggagtgggtgttgtcccgttcagttgcggaagaagccaagttgatggatccgttcgacggctgctgctgctgctgctgctgctgttcaggtcgggtgctcttgtctttgtcatggtaggagaacaacttggacgtctttttccgaagagttttggccctactcgtcttcttaggtggggccgggttcggttctctatcgatctgctgagctgacgaaaaagacgaaaggtctctaccctgttcgaaactgccctcggtatctagcgtgtcagatccgtcccgcccgcctccctcgctctcattcgtgtttgcaaaggaacctctggcagatcgtcggccacccgccgttcttgacctatcaccggaatctgaaccattctcgatctctgggagagggaattcctcgtgggtcaatagaaactcaaactggtctgaatctgactgccggcgggacgtcgtcgcctttgatctcgaggaaccggaggaagccgaatagtctcttcgtagaaactttgtgagcttgtgttgatggctggatggctggatggacacgcttgaggaggatgagactgatcgtgtggaccgataggagctcggccgtgagacctgaggagccggcagggcaggcgaactattgaaagacgtacgcggttgggaggatgtggaggaagaggacggagaggatgagcgctcggttgaaagaacagggcgggcgagggtgtttgccgagcctgcagcaggctctatggatggtactctagacgttgtcggcaaagacattatccgagcttgatcgcagagctgatccaatctcctgaacctatatacacaaaacaagacaagctgagtcagaaaaacagatgacgatcaattggctacagagatatcaagctgtgggaacgacctcctaaattacgtgttggacctgtcaggcgaagatggctgaacacagggaaagaagcatttagactggagctgataggacatgaacaagtcaggatctctgtgaatagacatgcttacgttgtgttgtgttgtgttatgttatggatacacccgaaagatggacgatctgctaggtggtgatggagtctgattgatagatagtcggtcgcctgcttactccagagtgatgatggggtttgctgtgtgctgtgcaagtctgtaaccctatccctttttttacataccttcccatcaaaccaccacttacacgacctcctttccggcctttaccctaccaccaccaccaccaatactcgtacaagcatcactatgagcggacgacctgcccagcgaaagtaagctatctatgggtgataaaattcttgagtttgttttaatctgtcaacactgtattgatcattctttttgcggtcgatgatagctacatcggaggaggagccgaggctcctgctaccaactttttctccgccttctggaagacccaggtgaccgctcctgataagattgagggtaacatcgcgttcgtatatagttcttgttgaataccgggaaggccgtagatggatagaggagatgctgtccggacgttaggaggcggattttgtggtcacctttttcatcccgcgttccagtctgtttgtagactcaacatacacactttcttaattgcttgttcttcttcttcttcttctactacagcatcgccgtgtcctctgctctctttgccggtgccatcatcttcacccgaaactttggtgatcttttgcttcctgctttctaaagcaaagagaatgaatgtaaaagagcaaaggaaaggacgagggaaacaaagagattggtacgtccgagtcttctcttcctccttttcttcttcttggccgtacaagagctcaaccgggtatgtttcctctcttgggtgtgacagtagccataatatcaatgcattcatgtgtataccttgggctcgatccggtgtatcggcctagtcgagcagtactgatgtgtaagaaaacgagccggttcgttcaggttgggcgttacgtcaatcgttcatcgaaggaacagttgcttgtgctctctcttttggtcagagagaagaagaagaaaaaaacgaagaaaagacacaagctatgatgccgcgatggatggctgcagctgatcgttatatctccctcttgggacttcgttcgagctctagaccttgagatcgacgtgcttgattacttacgcttgcgatcacaagtaacggcggagagtgattcgtgtgtacctggttacgggtcgacgaaggcatcttgtacgacaaggaaagattgatcctagttctagtactgagctagccagagagagtcatggaacaaaacacgacttgcagaatacacgacaagaagaggagtctgagtgtaacttgtctttttgtttgaccggacgacatccatcgttctgcgagagtttttctgtgcggcccggatgtgggtagatgactgacctgtttgagcgaaccaatttatcggggtttaaagcccattggccttagtactcgttctttcaagagggcaaacagagagtaaacgcgtcatcctatctatgaagcggagatccactagaacaagcgggcttatttcgcagcatagacttcaaatgaataattaagcgtggtgcttgaacagaggagagagagcgacaagaagcaaacgatcgaacgaatgagagacagagcagaaaacacttgtatgtttcgacctatcaagttctcgcagacggacattgcttgatctaattcaacgacaagcatccacaaagagaaggcaaggaaggcaacgtgggctctcgatgcgcagtatccaaccgaacctggatgggaaccggcacgaaccggcataagctctttccaggttagtcgatcaaaaaaatgaaagcctctttggggacgcactcagtccacccaggtttctgcctttcctgatctctctccgatccatcagcgattaccgaaatatccttctagttgatctgctttctcgtgtacctctctcgtttaggcctgcctccgatccctgaagagaaaactgagagaaactggggacaagcagagagtgatcgatcaacaagcgtttaaatagaggggggacaggaaactaccaagaaggcccagactgtcccgacggctgccgcgcctgtgctctaatcatattctccgctaccaagccttttttttggcgtgtttgttctgatttgtcggttggctatagacgactatgaagtgagtccgagattgactatgaaggctatcaatatttcgtttctatctgttgcttccgctttcttttttctttttccaatctctttttttttttctcttgtctcttctaaagcactcaacctcatccgctcccttttcttccaaggccagcgccttgtttgtccatcatacacaaatggacggcaaaagatatcggagagggagtggacggtagccgcttttcatccgcttcttatactccgtttctcacatacaatcctttttctttttctgttttttccttctttctctctcctcgggctctatccctcttcttgtttaacaaagtgaccccgatcagactcattccccgtctgccacggcttcatcaacggacgacatgccttttctatcccgaccggccttggcggctactctatcgtcctcctcaggtgtatcgacctcctcgaccggttcatcccctatgcgaagcggtggcattctcctccatcatccctcgccttcgttgtcgtcaaatccggtagaccctacgcacccacactcttcatcatcaacgctgccgccgccatcgtcgtcgtcgtcgt

SEQ ID NO: 1661 - DNA, 4726 bp, Xanthophyllomyces dendrorhous
tcgtcgtcgtcgtcgtcgtcgtcgacatcatgggcccagacacggcctccaccaagaaaaccagcggtctcgttcgcaccgcttcctcctccaccgagagagcgaagaaactcaatcaccattggtgttgctgccagaggacatatgctggctacacagcagggcggtggtggttcccgaccaaagaaaggtcaacagagtgttcgtccctcatgcgcttgtgtctctccttcgtgtattcattgttggtagagtaacgatgaaactgatcatgtttgcgactgacttttgatgtcggatgcgcaatcttctttccaggtggtgtacatacagatgtccgacgaggattgggaagcgtacagagcgcgatacgcgtctcaggaggatggcaggtcggtctccctctcgctcgtgtattgatatcatcatcattgccatcgacgacctaattcgatccttcaatctctttggatgaatttctttgcttctgcagtgttagcgtgccagacatcggcacgtttgctgtgcaatcgtcaaaaaagctgttttccaaacttcgctcactctccactcattctcaaacgagttcatcatccacaccttcaaacacatcgtctggccgtcggtccttgttctcatctacgaaagcttccgccggttcttcgagcgaccaggatccatctcggtcgaccgcttcttcctcttcgagaccatcatcgtcagcatcctcggccgttggggctccgttggatccgggttctagccggctgcctggtcaggctctaccaccgagtggagagccaactcagtcatacagtcagaccccgagaagaggtcgaagtccaccaccaccgcccagaccccgaagtccatgcccatcggcgttaccacagacagaattatcgtcttcatactcagtaccatcgatatccacccaatctgataggtctgactgtctgtccgatctaaacgatgggtttgatgagtactcggatgaggacgctctggatgacgaggacgaggaggacgagggcgagggtgatgaggtagacagagatgaagagaaaagggaagaagatgaaggtgatggtgagaggaggttctcactaggcgagatcaacgaagctttgtactcgattgcaagatctcaacaacaacagcaaaatcaaagacaccaatatcgatgggaatcgggaaccttttcggacgcagaatctgacgcaaacgcccgtctggacgagcgaggctcgagacggaactcggctttcctcgcccaacagcattggtggttggatgatcagaagtatgcgcctaacgggatgatcgtaggaagtgccggcactgccgatgacatacgatccggtgagatcactcctagacgacgaactagtttcggggataacagtcgggtcggggctgtccttgacaaggaactctcgaccgagggaaggacgccaagtgtaagccaagcctctttcttttcttcctgttgtgatctggctaccgagaccttgtactgaaaatatgtctgtgcttgactcactggttctcagcgagctttcgttcttgggttcgacaaactggatgccgatcgagctccggccaactgacctactgtttatgtctctctacacaaacctcttctctcttctttcttctgttttgtatatcctctcggttcgtttcttgttgtatctatatggctcttttgggttttctacataaggaggggttcatcaaacctctcgtgcggaggtatcatcagttccccattcggtgtggctctcacactttccttcctccaccttctgttctctcgtacatccccgcacatgtggggaagggatgaattacctgtgctctgtatcatgtctcgagtttttccccttcttttttgctgcatcaccgtgtctactcggctccgcactgaataccctttctcttatatttaggatccaatatgctgctattcttctgcctcttcccgttcaagtattccctcgaatagttcctctcttgatcacgtctctccatgaatattttctcaagagtttaccacacaagttcatgtttcatgctttgctccttccagatcgggtcatcaggaagttttgggaatatcgatccttatgttactctgttctattcccttcgacttgtctgactggcatttggacctttgtgaatgaaggaaacatcgatcttttgagatatttacatatattattgtgacagccacgcaccactaattatcagcttatcagagtcagttctacacaaagcgatgacacttgtgtcgaaaagaggaaagccgcgtgttgtctgataaagtgaatttgatcgagttgtctgagacaggagaaatacatgtcttcatatatatagaaagaaaggagaaaacaaaaaaggccgagctgcggaacacgtggtagcccgagtgatccgaaaccctgcatcgcaacgcccaccgggccgcgctgtttatttcctctctcccgatcggcgatgtaacgcggaaagaatcttgaaccacacccagtctgtgcaactcatagaacgcagacaaaccgatcgaggaggattagatcgagaataaacaggatatgttctcctgaaaccctattcttttccattttgcttcccgcgggcgagaccgagttggtgtatcaatgggtacagcacacccaaaagggaccagatgactcggtaagacacggagagaaagaaagactcgaaaaagaagaagaagaaggagcatagatacgatgaagtctgagcaagatccgagactgtgaaaaaagacgaggtatcttctctatgacgatcagagagaaacagaaatgaataataaataaaattcagcatgaagtctcacttcctcgtgttcggtcgggttcgcctttcttcattatttccccgctcccttcgcacttttacccatgtgctcagcgcaaacacgcataaatatagatttccccgaacaaccagcacatcatggtcaatgacgtctcggactcagaaagaaacgtccgtcgaaaccaagtgacgcgtgctgttttgtcatataaagcaaaagtagaaagagaaggaggataggaggaagtgggtcgagatatctttttaagaaagcaaacaaacccccttctgtcccgttactcttcttgatccttttcaagaagcccagataccaaacgcagacagtctggaaatccgttggatccttttcacatctaccataaaccatcatcgagacctacacacaaacacatacagagaaatacatccgtgactgatacccaccttcgccatgcacaccgatatgcttgcgcctatagatgcacaccaaccctcaacgtggtctttcaacatcgagaacaccagcggcgacgactctttcgataacgatctaacccctctgccaactttggagggtgtctccccgttctttgtctctccggaggacgagctcgatggatcacttcaccaatcgtttgttgcagacgctcaaccattgatcggacttccatttgggtgagttttttctttctttctttttttcccttttcgtcctcttttcttcttcggatgtttcattactcttgtagacgtactgacagcggtggatttttaattacacatttgtttgcctattcgtctatttgtttgtttattcgttcattcgtttgtctgtttcaacgcaaaaggtttgctcaagagttgaacactcaatcaagtctgcaacagaactactttccatggagctcgacctggcgatgtgagcccgtctatgtctctcttctcctcactctaccaaatacatgtgttcaacgttcttccctgttttccttcttttctctagcattccaacaggcaaaccaggtccgccgggcgagtgcgggttcgttggacagtgatcgagaccgaaacggttcggcctcgtccagctgcaacggcgagagacgagatagctactaccaaggatccatcgggaccaacgacgacggttgggatgatctgtacgaagatcccgaatacaactgtgcacctccgccttcgttgccacttccttctttaccgatcgccgatggcttttccgctctttctctcgctatcgagaatgaattctcttcttcgtgctcttcgtgttcctccagagaggctggcgaccagtatgcgaacgccgaggacgaggagtcggcgaaccgatacgattacgacagtggagtcgagacgtcgatgacccaacgtgcacaggacctgccgggcaatttcgatttccggcctcattcagactctttctcgagcgagacttcccaactttcgttctcgaggttcgaggttgaatatgctcaattctcacaaaccgtaccgaaaatgacaacgatgataacggcggcgacagtatcgtatcgcccggagcctgtgcaagacagcttcgagcacgatgaagacgatgacgatgatgaggaagaggagaaagacgtccgaacaccgggattggtctgtggaatccgttactcccatcataaagatcaacaaccaagtttctttttcgatcaccaatctcgaaagacaggcccgttgagcgtctggaaggagagttctgttagtgccgatcctcatctcgaggtcgatgttgtaggagaggtctagagcgcgcttctcattctgtcttcaataaatctgtgtctcatcgaaacgcgctgtccctctctctctctctctc

SEQ ID NO: 1662 - DNA, 1730 bp, Xanthophyllomyces dendrorhous
tctctctctctctctgtttgtatctctgctttccagttgcttgtccttccacacttcctgctctttctcgcccctcgatcttgactggtcctctttactgtaagaccatctgtatgactatcttatgttttccctacaaagtctcgctgttttattttgcaaagatcgtgtgaatatgggagaaggtattgcttggcctgcctgacgtgacatagtctggactaatcaaaaacctgtccataactcggaggacaccgacacaacgaggaaaacaagagaagaccgatgacagagagtgaatgcaaacaccgagaccgaagaaagacaactgtcgaatgtgggctgtgagtatgtaagcatgacatgatgagaactgggaaaacgagaaaacattcccggggaaggacgaaaggggaaggaaggtagagcgatgaacattggaagatatgttccagacaaagatctagacaagaagcgggtaggtcgtttcgcaggttgaattggaataaaaataaaaataaaaataaaaataaaaataaaaataagaaaaaatcggtctttcaagacgaacaggaatagatgcttgtgacagagcaaaggaagaggacatattccccaacccggctagctttccatccgtctctggattctgatcagattcatcgttcgatctgttgttcgttttttgttctttttctgtttttctttgatttttcttttcttttctctcctgtttaatctgcacgcgacacttctccttctgttcaagcttttagacccagctgacaatgttttcttcgtctgtgcgacaaacggtgtaaacattgactgtgacggtacgctgataactgagaatgtaacaaagactcatagatcgctcgggaacaaacgattgatgatctaagcagagggctgggttccctcggcgaaggtgtaggtaagactgtggatgagggagaagaaaaaattgtcagaccgagtgcacacgttcaaattcagacatcgaccaaaaaaaaaaaaaaggaaaggcttggctatacgtacccacactttccgcaagtctgtcggttggagtggaaagccatgaagataccagctccgcactggggctgggggcactctcgacgaagtcgcttgatctttccatcagagtcgaccttgtagtacttaagaatagccatcttgaccttctttcgcttgtgcttgatcttcttggggctgttcgagaaaagagaagaggtgattgatgtcagatggagtctatttagccactggaaaagaacgaaaaagcacacttacgtagtgtactgcttcttctttcgcttcttggctcctcctcgcaacctaaggacgaggtggagggtggactctttctggatgttgtaatccgaaagggttcggccatcctcgagctgcttaccggcgaagataagtcgctgctgatcagggggaattccttccttgtcctggatcttggccttgacgttgtcgatggtgtcagaagactccacctcaagggtgatggtcttacccgtgagggtctttacgaagatctctaaagaatgggaagaaaaaaatggtttgtcatggtgagtttttgatcctttttttctatttcgcagcctgctctcccaacggacagaccctcgcttgattcagaccagagaggcaaaagatttactcacgcatgtcgtcgaaactaaccaagtgttggtgtccttgttgttgac

SEQ ID NO: 1663 - DNA, 21385 bp, Xanthophyllomyces dendrorhous
ggggggaggggcgacagataatttttctgacggactcatgcttgcaggagccgaccattgtgtaagtaacgaaaaaccaggctgcacggatgtaacacataatgattacgtaagactttcaatagaggggtggtattgaacatggtaaatggcctcgagagttgtttacacatcttttcgacgttgattctctctcagacccataacatagttttgtttgctatgtgtccgctgaggaggtatgatggttgaactagtgaattgaatcttcaggctctcaagaaattcgcagcgctccgttcgatcaatgcgcaaacaatcgaggtatcatcattataggcatgtgttactgatcctaaggctaaagagacctacgcgacaatgaaagggctatttcgatctaggaggaagtcattcaagagcattcaagagtgattcgaattaataaatgaagcgaacgaaaggtatttgatagagttgatgccttgcgcgcaagaaagcaacgaaagtgagaatggaagggggaaaggataggatgacattctcttgtatgatcacgtgagaatcgaggatattatttgaatataggtagcatatatgaagtaccttgttagggttacaccaaacgatcactcagcttacatctctctgcatccaccaggccaatgccacggcctcttgagtgctctaaagccactgatgccctcagtgatacctattctctttttgttctgttttatattatattatattatatagtctcgctgaaactgtgcgttcgagtatacagggagctctcggagcgttctcagaagagtgcatagtctcctgtgactccgagtttgagcccggagagaaccagagtcactagggaagccacgcaggattaaaagacagcttagagcagccagcggacgactaggctgaataatctatgatccgaacgaaccaacaatttacgttctgggcaattgggccataatttcatttttctatttttctatggttcctttattttatttatccattatttatttatttccccttctttcttctttttcaaataaggagagaaaagggaaacccggcgaaccgctgccttgcccgctcgcgcttatcagtctgaaattaatcaaaaccgatgaaaccttaggctcaggggcgaaagtcggccgaggcggcaggcgagaaccatgtgtggacggaagtatggccagcagggatgagaggcgagcttcaattcaaactgcgctttgatgacgatcaggcgcggctgagaaagaagccagggtaataaggggaaaaaagataacgctcgacgcggccggacgggcacacgacaagagcatacacggatactgttccatacacgtgaaatctttctaggcggctcgttttttttttcccttccttcctttctttcttcctttcttcctccctatcaggccgaacagagaccgacgatagaggcaatcaggaacggaagatctgatatgcgcagttgacgtgagccaatttgtctcctgccatcccacgcctctacgcgtccaatcggtcattccttcttattctccttctgcctctgcagcctctggcttcgtgctcgccctctgctctggtgcctcccaatcggtttccctggcctttggccccgttagcttctcttctggctttccccttcttttccttctccttccaccctcacccaatcccccggaggcaacccaatccaaaccgtcaacccatctcgagtgtcgtccaacgttctctgttctctttctccgtttgttcaaccctcatcctcatcgtacatacacatctttgttcttcgtctaggtgagctcttttaattcgttgtttctctgttcggaaacttggtgtccgcgtcggtgtgctcgtcaatcttccttcccttcctcccagctcgccgcccttctctttgtctctttccatcgcttttgattcgcttcgtctctttttgtcctcctggttctggagacgcctctccttccttcttttcagcctacatcgtccagttcgagctggtctttgtttcaatcacccatccacacgcaccttcttggtctccttcggctcatttcctgagcatagtcggctactttctctctccaatttcccgttctaagatcttccgcgtcgtccacctatcgtcctttttttttttcttcccttcgttcaaccaacctgacaatcgaaccgttctcatctcttttctcttcctattgcccagcccagatctctcttctctcttctctctctctctctctctctttctctcttcttccttctatttcttgctctttttctccttcactgtctctctgcttctcccggccgttcaaccagcaaccgttgcataccgcactcggcctctctgcttcaggaaacaaacacgaaatagcctagctcctcgcggccacgtcctacagatcgctcaactcttcctatctctccctcaccggcacccatctttctgctttcgcctcaagctcaagccaaattccttcttgagattcatgcatctcaaaccaaaaggttcattctcatcttccttcaagtctactacggcttctatatcaaacatgggcaaatcattcactgtgagtaatctcaacgtgtcttcctcttcccttctcttctctgctctctccattcccttcctttccttctattctctttgcacatcagacagagctgcagccgagagagaaggagaaaaaaacctcccaaagacgacgtgttgctgatccaccccccacgtcactttgccttcttcccgcgtccacgcttctcggtcatcgtccacctgatcttccatcttatccatccacctctctcgtctttcaaaatccaatctcgcctacaatcatgttttctcattcattcacttccacctgtactcccacctccgctcttcctattctaccccgctctgtgcgtcgatctcatcctgaacgcacacagacatcctcccctaagccgattcctgcaccggctcccgtgtctccctcgctcgagtcacccattccttccaacccgtcgtcctcccagtccgccacatccgttatgaccgaggacgaggaagtaagtctctataagccttctatttttggcctgtttctcgtagagacggtcactctgacgcgtccgtccctttatctgtgcgttctttcccttgtcgccatctatcaggatctcgagggataccggcaaggtggctaccaccccgtccgtatcggtgatctctacaaagacggacgttatgtcatcatccgaaaactcggttggggccacttttctaccgtctggctcgctagggataacatgtgagtattttgccggtcagatcgaaaggatatgctaggcgggcgaggattgaatcaatgggatcctgcgaaatatccgattgggctgtgaactgaatgcgagagacgaaggagattaaacacaaagcccacatccttccaatccgtcgctctgcattcagattcgcctattggccggatttttctctgatcaatccgaccaacatggcgaatgagcaaccctcctcttctcaaacgctcctcttctcaaacggcgttttgctcaagctgaccatcccatctcgcctcgtccatcttgcctacagtgctcaacgccatgtagctctcaaagttgtaaagtcggattcacactataccgagactgctctggacgagatccaacttctccaacggctctcgaccgctgatccgaaccatccgggcaagagacacgtcgtcgctcttcttgatgatttccagcatgtcgggccgaacggaacccatgtgtgcatggtgtttgaggtatgctctctcctctctttctcgcatcctaaggggtatgctatatgtgtccaagctgaatcttgttctccttgctccgccaggtcctgggtgagaacctgttgggtctcatcaaacgataccagcaccgaggagttccgcctcatatcgtccaacagatcgcgaagcaggttcttctcggactggactacctccatagcgaatgccaaatcattcacactgatctcaagccggagaatgtgttgatctgtatcgacgacgtagagtctgtggtcgctgccgagctcgcgagctgtccggcagccgtacccaccaagcttgtcggtgtgcctcccagtcaaggcagaggtggcactcagacacccaagagcgagggaatattcatcgtcggaagtcaaccgttaccaagtccgagcagctcctatggaagcaaccaccagatgctcgacaagtacaactttggaatgactagcatgacaaacgagtctgcttcatcttcgctctttgcaaagaacgctgtaccagccgccggtagcaaccaaaagaccgcccttccttccaaaggatcatcctcgacctcctccatctcatcctccactggatccgaccttcactttggagaaaagacccaagtgaccccggccatccaatatcacggcccctctctactgtcccaacaggttcatggtcatccgtccccatcgatggcgccaaccgcttacctcggttcgacacttcccccgagctatccttccagtaatacgaacaacacaaacaacccgtcatccaactttgactctgcgttttcgtccgtctcgacgacgacgacggtcggaaccgcttcctcgacttccaacatgtctgctcccaatacgcccacccctcagaccccgaatgacgggccggccaccccaccacccatcaacatttcaacatctatcatgtcctctctctctgtcgccgacgacggcgcaccagacggagatgacattggagtgaactcgagtgtgtccgacacaaagtacggtactgttcctcagtcccacggggcgggtgctaggtccttaccagactacccggttgccccgggggtgaacgacccggccgggctgccctcccctccgccagcaccttatgatccggcaagcttggagcggatcaccgtcaagattgccgatctgggaaatgcgtgctgggtcgaccatcatttcacgaacgacatccagaccagacagtaccgatgtccagagatcattctcggcacgcagtggggaccgacagttgacaactggagtgcggcctgtctgacgttcgagctggtcactggggactacttgtttgatccccagccgggcacaaagtacgacaaggacgatgatcacatggctcagatcatcgagctcctcggagagatacccaaacagctcgccacgtccggtcgatattctcaagaactgttcaacaagaagggtgaactccgacatattcacaagcttcgatactggccgatcacctcggtcctgaaagaaaaatacgggatgacggacgaggaggccgacttgttctcgtcgttcctgaccccgatgctgaacgtctggggcacaaaacgagcccaggcgaaggacatgctggaccacccctggttaggtggtgtcgtcgtccagggtgaattggactgtttggaaagagaagagaaaagaaggcccaggacaaacccgatcgccgagagtttgggaggaggagcagccgacgccagttggatccaaccgccgaaaggaccgatcgaagatacctcggccggcgggtttacgcccgggtcgggcaacccaatcagcctgccgccaaagtcggctccgtcgaaagctgtcccacaaaagaagactggagggttcaacatcaaggcctaacttttttctcttctccccctcccccccctcttatctgttattcatgtctctctaaacttgtattgtgttcgttcggccagacctttctcccggccaaggtcttgtctttgtttccttaattctcttgatccaacctttcgtccaccacggccggaggtttccaaatccaacagtctctttctttttcgttcgagtctttatagtttctttctttcccctctcttcattaagtttctctggtgattttacttctcttttcttcccactgttctcgtgacgcatcgtatggttcctcttttcatatcgtttgttcttctctttctccttctcttccatattgactgcgatcttgtttgcccgccgtctttatattgtttggttcttgatctctccatcttaatacgtttgcctttctatttctcctgctctttttctcccccgtcccccctccctccccctcttctctctcctttatcggccaacccatctttttgtagctcttcctttgtctttttttcgttcttgtcttaacttccgcttctggccattttctttctcttcatattcccaatacagacccctcctcgtcggactcgtcttcctttgttttctcgcctacttttctcttctctccttctatctaattttctttcctttatagatgcatctgtctgtctgtcttctactcgttgtgacttttttcgagcgcaaagcatttcatctgataagaaaggggagaggttcactaattgatacagtttacgaatcgatcacccagacctgatgatgtcaccagggaggggaggggggcgagaataacaggcgaaacgacccaagtcttagcccagcgcttcacacacgcacacatgtatacatacacacgtccaggggaaagggaagagaccacgcacctaagtctccggaaccctcggggttctacttcttgtcctctggcttgaccaactctggggtgtcgtttccgttctttgtctctgggtcacatacataatgtggcttggatttgtccccggccgaatcctcggacgacgcgtttggcttcggcaggtctttacccttgctacccccggcagcgctctctcctccgctctcggctccggcagaggtagcaggcgccttaccctccacatcgggcgaagggatatccttgccctcgggactgccgtgcttgtctaggaattctttggtagcaggtggtacagaggaatccttgtcggccggcccggagccgtagccgtgggaagatcgggcgatgctatgagatcaagaacggtgagatgagacgagatgagatggcggtttgtacagggtatgctgagcctttatgcgcacacgctagacagatacacttacgatgtcgtctggatagaccgacggagggcgggcgagccgatcgctcggaggataggaacggatctgatgaatgcagcgcacatggttgctgtgtatgctatggtatgatagatagacgagacggatgaagcaaaggacagggaagatggggagatgggaagaaggaaacgaaagaatagaaagagatccaaagaaaggccgctcttttgaacgatcgggaagccgtcaaggcgtcagggcatcagggcaccagggcaccagggcatcagggcatcagggcagtcagggcagtcagggcatcgagatggagttcaggtacgattgcgcacgggccgtcgtcattatgggctacacgatcggctgcctggctgtaaccgatcgggcatcgggcgagagccaaagattgtaaccatgacgtgcactgtgattacataagcgagccttccggtccggtaaacctcacttgcttgctgtatcgctttcggtcactaagacctatcaactagccatcaactagccatcagtatcgtaagaatgcccgttggcgatactgttaacgatgctgctgatagcagagccgagacatcttcatcccgaccaggtcttccggcaagaaagtcgttcaagaatatcgtcaagatcgattgggacgcgttcacctcgcttgggaatgtggcagaacgtccagactggatgggcggctttgtcctgctaggtacggattcatccttcgtgctgtaataggctaatgtctgtcgccatatatctcggttgtcggatcttatcttccacagaaaccctctagaagacgagagaaaaggagcaggaggtgtgtttggcgcatcagacgagctcttaactggtcacactaccaaagggtgagaacgccagctggcttgacagaacgattgggatgctagtgtataggaaagagagaccagacaaactactccagatgctatatcctacctctgatcagcgtactgttcattaatcaggcgacatggttcagtcttcaatcaaaagcaacttgaaattgaccattgttgtttcgtcatccctctctcttcccttctcgcgtgctgttcttaccttctgatgataactatgaggacagatgtattggagagtaagtcaatcccagcctaaattcctgctatcataactttactaatgacccccctctctatcgaaccctttggattatcaatcacgacagcgttcttcgattctagactggacttgatcgagcgacagcttaaagtccataaagatagactaaaatacaaggctggcgaagttttgtcaaaatcaagcgccaatctccggtgagttctgaatctttggtttcacactggctctttatcattattgaacttcactgacgctgacaaggctggaaaacaccacggataataatgataatgataatgatgggcacatacttaatcgctcagtgctttggcacccaagagtcctcgtatatggccttctgatcgaccagaaggggacgaagactttacggatagagggataagtcgtgcccggtcagactcacttgaggaagcagcagccacggaacatgcaagaaaaggtatgaagaaggaggaacgctggctcttggccgagaaggaattgagaaagttcaaagacaaggtcagtcatgaattctctattccaagcttcgtctcccctgcgcgtcgtcggtttagtgttccgtcccgataggatctctgcctcagagcactaatctaaggttttatgcgttctacgatatctcagactcaggatcggctgcaatcgctgtcaacctcttgggagtccgccagacatctccgaaccagggacaaagtctctttcttcttcggagttatgaccgtcttgacgagttgtctgatggtcgggctgtatccagaatggattccactttggtagtacgtctcaattcccagtactatcgacaaacgaactgggaaaggctgataagagactgaacggaccgacatggatgtgggacaatttttcaaccttttctcgtcgaacagcactatccagagtgcattctatctgcctgttcggatatggacatacaagaagaagcaatggcactactttctttgggacatgtgctattgtacgtcgcttcgactctgtcatttatgttgttaacctcatgtcgcttgaactaaagacctaatctatattgtctttcacgctcgtgatccagatgtgaatgtgctggatcttatttggatgtgtacgcatgctccttccttttccgtttcatgtatctcgaaagatctcattctcaccacgtcttgagatccatatctctcacttctcgatgcttcacagggttcttccctgcaaacaccatcttcttcacggcctgttacttattgacaatgggtaaacacgttccacggttttttgttatgtgatcaaaaactgaccatctacttctttcactggattctctggttctgataggccctctggcgtcggccattatcacttggaggaattcgtaagtcgctcgtatcaatccggccgccaagtacattactgaactgttctgacttctgttgtctatttgtatagcctggtcttccactctttggataaagtcacctcactatttatccacatatgttcgtccgtctctatttgtcatacgcaaccgctttttcgtcccctttcttttaaaataaatttgttaacccgtctgaatgaatttatctcttgacagaccctccattgacactcacaacgatcatccatttttacccaaatggagcggagagatggcccggaatcgtaaggagtggagaaattgcttggtggaggaagatggttctagggatcgggttctatcttgtttggcagatgatgtactggagagttcgtctttctctttctcaacactgtgtcactttgggccatctgacgtcaagtattcaacttagtttgtcgtgatcgggcgtagggaaaagattaacgctggaaggattacttctttctccacgtacgtcttgttcaattcggaaaaagcattactggctacctaggcatgttctcacaagcgactatcttcattattcttctattatcgccttctggattaataccttgataatgccacagactgctgaaagataaacacaatgtgatcggccgttggatgagagctactaagccagagaagagagagtcgcttttcatgttctggcaactaggtccgttacgagcccgatgtttcacacgtcctcctcttgcaaactccctctgactaaactcttgcttcttttcgtctcgttcattaccatgttgtagtttacacggccgtatgctttttaccgcctatcttcttcttatggaagagcaaagtaggatcaggagtgttcttgattacagttttcgctgttgctacctggaacggagcgtcctactatgttgaggtttggggtcgaaagtcagttctcttctttatatttcgtctccttctctaagcatctacaagagcagcgattaaacttactttttgttaacgatcttcacagattcgaacgagaactggaggcacttcgaaaagagatggccactctcaccacttcgtcgtctcccgcaatgtctcaggcagatcttcccttttcagaaacttcatctgttgggttatcttcggcgatggcgacaacatctcatgacgtgtcatcaacagctgagaaaagacctgggttgactcaagttccttcgttctcgttagatgagaacagtgaaaaaagcgaaggtgcattggataaggtcgaccgaaagttgagagatcatggagcggagattggaggtggatgaggtcttattcatttttgttttcattaagactttttactttctttattgctgttttttttttctttcttcttcgatgcaattgttgtatctccgtctttctctcgttaagatctacgacttcgtactttgtttgcgtattgattaagtcttgtaaagattggacaagtgacaagcatctgaaagaaagaaaaaaactatatatatacttatcgatatgctcctacgacacattcgtacctagtactgctttttacctctcagatgagtctccatcgctctctgtccccgtgtcctcaagactttccagtccttccgatctatcactgtcttatccggcacgtggtagagtccttcgaaatcatccaacgtgcgaagtcctcgtctgcctttcttcttcctgttcttcctgttctcccattgcttctcctgtttcgcaaccaacacggcatctaactgagcctcctttcgtctggtttgaccctcagatccttcgttcaatttggccgctcggtatcgtcgaagagcaaactcataagtcaaaatgacatatgtgagatgggcaatctttgagccctgctgataaacgacgtatcgagcgtgaagcgctcgaacgtctggccagaccagatgaggcggaagaggatcaggtcggatagtatgacggggaatcattcggaccaacgatttcgaaggaagagctggtatagaagaagatccaataagggacggcggatacagttcgacaaatcgtcgtaggatcgaatccgccaaagacagttcatccgctctgtcggagaggatggaaaatgaaaacaaagaagaatacaaggaacaaagagaagtagaaagagtcaaagcgaataagtataaataatgaatgaatgattgatagtaagaagagactgggacttgcctcgtcatgattcgaatcatgtacacccagactccttcgatgtttctctcatttaaccccagactctccttcagtgactttgcgaacgtcgcccctttcgagagttcttccttctcgcccatgttctctaccttcctctcaaacgcctgccactctttgaaaatctcaaatgcttccttcgctgctctctgtctatctgacgaatttacggtcatcaaccgttgaaggatatgcaagtacgaccacccgtttggtctgaccttgacttctgaccaaacgtttctgaatcgttcgacacaatgggtcaaggacgaagcatggtggtataccaccgaaaggtacgaatttaccaatcgaggggtcatttgaacgaatcgaagtggaggtggatggttggacggtgatcgccaatcagggttgattacatagatatgcgagtcattgtaggcatgggataaaagaacgttggcttcatgaagaatttcttgagacgtttgagggaggtaaggggaagcaacactaggggctggctgagattcctttttgggcgaaggagggtcagatacgcctttctcgtttgatgaggtagatgaggtagatgatgatgatgatgatgatgatgctgccgttagtgtggcggtggtggcttcagctgtcaggcctgagacgattgatgatgtcggaggagagttcaaagatccagacggggatgtagacatatcaaatgtctccttaaaagccgcctttccatcttcatccttaccggtggccaagtcgatgttgctaacctctcctcccgttgccttctttctgtctgttctctccttcttaccctccttcttttttcggttaagcttgaccatccctctcacgagcgacggttttgcagccgcataagccatcaacgcaagctccaacgtcctactccttggtgcaaccgcatccccaccatgagacgatctcgagaaccgaatcatctcagtcaatacccacctcgtcctcgccaagtcgccgttcttggccgctccttggagaagcaattcgaacgtctctctattcggagtatacatcttcctctgttcagactcgccctgttcttgggcgctctgaccaggaattactccagctgggacggagtatttgtagaagtccaacatggtcttaaacatccgaagggcttctccccagaacctacctaccggcactaacgcgcacaacgcagcattgaaagcattgacctcgggcagatagccatgctcctcggtcatctctttccagagatcaagcgctcgttcaggctgaggatcagtcgatgagccacatgccttgataagagagataaatgcctcgcgctgtggggttgcataagcgacaagccgcatgtgagcaaagagattaaatccggttgctcggtgagctggaatttcagagtggagtagaggttctatcaaggaaatataagtcttttcggggacaaatatcgattgatcctcgagagaatgaagcgtagtgatggcgcccgggaggtcggcgttagaaaggcgggcaattatcaggtgagagtgggcacttgctgttattttggcaccacctgataaaattttaggaaagaagtgaatcgttcgactctattgagcttggttgtacatgtattcgatcatctttctacgatgaatgtctttcagaaggagcgactcacatgtttgcattgcgtgtaaggttgactgaactccggccaagtctcctctcttggcaaacccatctagaaccatctcaaatccttctttccatacactctctccagactttgacattaacgttaaggccttgatactctgctcaagtgccttcccttccagagcattcacaaccttctccaaaggcgtgaactgtctcactcttttggcatcgaccgtcatcttattcctcaactgacgcaacggttttagttgggtttgtacttccacaggaagtcttgaaatgtagttatcagcttcgtgaaccgcatccgttatcatcttgcgccattcgttggtggtgatcagtccaagagggacatcatttttccggcggccttgacgtttcgacggctgtgtctctttatccaagccaacgagtgatggtctaggaaacacgttcgacgggaggtccaacacgagcttttctaatttgttgagaatctctgactgtggaggggagggcaagggaggtaggttttgtagtgaacgaaactgcttttgaaaagagttaggcagagtatgcatgggagtgtcagccaccgcggccgaggaggtagtatcagtgatgctcgaggaggtagacaaggccgatgaggtatcttgaaggtcaggctcgtctgttcgttcggtgtttgatgtgatctcctcagaattttgttcactcttcgttgcgtttccctcccagttcttcgagatatcggcctggttttcgaatagtgagttcaactcaaacagcgatttcgcgctccaatcactatcctcttttgtcctttcgactttattctccctctttatctccatagatttgagctttggcgtctgatcaggtcttgcgccgaccatcaccaattccggctcctcgtcctcttcgccaaagagatctgaggcttcagaaacttttcgtacctcacggtctggctcccatgtttcaaggtctttgagtgacggtattgttccttctcctccagaggagattgatttgagaagattctgtcggccttggtcaatttgttctgatccggcttgcttgtcctgagccggagggaaggaagacgcaggagcgggatgggtgggtgacgcgaggtgtggaatattaccgagctcatttcctgaggcaagcaaattgagataaaagtcttcgatctcttcttcagtcaaaggaggaagatctttgattgcctcctacgaagccagcatggatacagaagaagagatttgttaaaacagtgagttttgtccaaggtatatgacgcaagtacacgcagaggaacatatgccatcgcgagaagtcagaacgttgagtggacgacagacctcggtagcaatctctctatcctgtcgaagaacctgttccttgaaatatttgctctggacttttatccccttcatcctgtctttgagcttatgtcctgtcagaggcgtgagctgttcctcgatactcttttccctagagaaagaagcacgaccgacccaaaagagaaagaccacaatgagagtatcatcggtcagccattacaagaggaccaagttgtcatttgaatcaagagagttgatagcgtactctttctctctctcgttcaacggcctctttgaatgcggctgaaagatgtttctttctggcacgactcgatgatccaaaggattcgatcttgagaacgatctagagtggagtgttgtcaattggagaaccgtcgagcgtgagaccgatacggtccatcgagaggacaccctagatggactacatagtatcataacgttgtcgttcggttgcagaaggagagagaaatggccgtcagagcttggatgcgtgccaggtggagggagagtgctcacattttgttcagagtcgacgagaggggaatttccaaattatcgtcaatgcttatgtaatatggttagtcaccctatgtgcctcctcattctggatttcaatctttctgttcgttcgtttgttgatctcgaacgatttacgcattctagcgctaaatgtgttgattgaaagaaggataaagagataatgggtgcttcagaagaactcaatctataaatgaccttttattgaggtttaaaagtgcaatgtatgtaatctagggaaatgctagaaaccaagagaagtgaaaaacactaaatctagtcgatgatggatgcaacacagtaaccagcctgcgcttgagtggttgagagaagagacgaaaagagaatttgacgaaaagaagaaataagaaaaatcccaaaagaaagagacagagtaaatcccaaaagaaagaatgaagtcccaaaagaaagacctccccgcccaaaagaaataaataaataaaaagaaggaaagataaagaataaaaataaaaaagcagaagaactgtacgcgattggttgagatattggtatgaggatgtctgatattttggtgttgttcaacttattaagtcggaacaagcttgaaggtctttgagagagtggttggagaaggaagatgaaaattagccattaagaaccaaggcgcatgatgcatagagtcgtatgtaggatacgtacaacagcactataggtgtcggccgtatatcttgaagagaatttggattgattgccaacaagaaaaattgcctttgatttattgccgaccataccgagcatgctaataacggctgtatagcgaaggtttcaacagacacggatgtctgttcagtcacctcaattctttaagagaggaaaaggagagagaaagaacgtacatccatcaggattgacccaccgagtggtaagcgagctcgacgaagaggtgtatgtccaaatcgaggtctccacctgtagagatctccctgtggcagtattacagttattgctggcatactctgggccggaattggcggaagctgtgtgagaacaaaaaggaaagaacaaaggttgagcgacctagttgattctatctccatcttaaagtgctaaagagatcgatctgtgaacttactggaagcagacgcggtcaacgcaaggtaacttgagatcggttgggaggagagatggttgacgtcaggacacttgagattgtctctttagattcgtaagggataagaggaaggaaaactaacttgtagctatctgcagacatcacactgctaggactgtttggaccaacgattgctcctacgtttttatttccagaattggcaaacgcgaggttcccaggggatgaagatctgtagaaatcgtgaagaatggggacgaaatcagtgaacatggcgaacttaagacttctatgaaactttgtgacagagccaaagacatacggaacagagaccttgagggcatcgctcgcagactgggtgtagatgtagaaggtcgatgctaacgtgataatttttttccggaagagatttacggatatttaggcatgtttaaaactctcaaaaagtccaagagagaaggtgaagactcaccagcgttactgtcatcgacagctagatatccccgaacatcgccttgagagtcgatgatctggacatgatacccacaattgatcggtgcaccagaaacttgagcatctagaccaaaacaaatgagagaacgaaagaacgttgtcagtgaactcgattgcagaaacagcgctcagaatcaggatcaacttactcgatggcttggaccgtttcattcttgacggcctctcgatcaactgctgtttggaaaatactgaggacggttcgttatcgacgtgccacctgggcactcggatctcactatgtcgcttatcaatcgatgtcatctggccggccagattaccgaggccatcgagtggatcaaacgggaaaagcgagtccacactgtcaatgtcttctaccgatctggtcatgatcgacgtgaactttgttgtcaccgtgggcgcggcatcggaaaatctagtgaggagggatagtgcagtggcagcaaggatgaaaacggatcgcatcgttgagaaagaagcgcgcaggaggagaggaatattagaaagtaagaagatggatgaaaaggttggagggtatggggattgcgccaggcgaaggaacgaagtaggagtagagaaggagaaggatgagacaggtctagattagatgaagagcacgaggggatatcattctatgtgacgatgcctaccctcttttatatccatccaggtgtttaggatggctggtcgggtgaggtattgaagagttcgagccagttccggattgagacgagctttacgaagaagtaaagaaggagagtgagctagaggaacttagagaaaagagacgaggggcaacagaccacgttagcagagcaagggtgtgaattcaaaacttaatcaaccagccgagcgaccagccaacctcaatcgaccggccgtcacaagtaggttgtgagttcgcctatagtaaacaaagggacaacagaacagagagaagaggaagaggacgaaactttacattccagaagcggtattgtactcgaggatcggagacttgggcacacctcgagaagaaaaacaagaaaagaaagtaaataaactttcagacgaggaaagcccccgcaggagaggccagatcatgctcggaaagtaaactaccagtcagttggctagccatcaaccaggatcgggagtaaggtcgagatcagaagcgaaaaagagaggaaagatttgtagaaggtaagtaaatatcagcccagtttcagtcaacaaaattaaacgatggatcgaactccaggatagctgattgaggaggtaataagggcggaaagagagagaaagctccatctctcaaagcccgaagggtccttgctccgtatacactcataccccaatccgatatgctctctcggatgggacgaaggaaagaagtaagatgatgaaatagagaatcccgcgcctctatttactcttcgggaagcgcgttctcgactttttttcttctcgtggagattaaacgaaataaacaaatccacgaggctggcgctagctagactgcatttcctttgccacgagccacggccatgctcaccacgtgagtgtagaggccgagtgattcggcattcaaatgaatgagagtccgccccggactcgctattcctaaggagagagtagatcaacaactcaactagcccgttcaccctcaagccctgtctgctcacaacctctccttaccatatcagtcaaatccataaacaagacagtcccgtcaacagtgtcaacaattgtactgtgttcgatatccaaatactcatcttttaatcttcctttctcggtctcgctctgccttttgcgcttccttctgttaccctgcttgggtttcattgaaatcgtcacctttgtttacatcgaaaaagcatcattctggcaccatcatgttcactgctgttctcaatcgtcttgcaacacaatggacggcttcctttctctcctgttattcggcatcacttcgcttccctctcgcccccttgctcgtctcgatcaagcaacttttttcctatttctggtgtcgactcttgctcgcctcatgcaccagaccaaatagagtcccgaaagggtcccgagaaggccctttctttggctaggtgaacagatttaggctgagcgaaaagatcaagacgggacggcatatcactttcagaccccgttcgatcgccgcctatagagctcgacagatattatcagacagaaaagaagaaagaaaaaggatagcattccagatggaatggtctaactgtctgagacggaagtaagatagaaccaagtaagatatgtgatgaggaagaatattaaaggagtattgggcaggcgttgacagtgataattcaagttagcgcactgaagtgttcaggaacgactgaacatcatcgtctttcgcgacaattcatccagggtcatagagggaggatatcgggtgaaatctccatcactgtacgtttcgtcttgttatgttcccgaagtgccacaaaacgacatgcaatacagagaaggagagagaagatggaaaatagaaaaagacaaacaaatatttagcgtcaaagagtgatggatctacgttggctggctgtgtgtgtgtaaacatgatcagaaggaaagatttcaagatgatcagcaacatatcagggctctctttcagatttacaaccccagaaattgatagacatgatgattttaccatggcttccaaaacataagatcaaagctagctcaagacacactcagatctgctatatgcacagcttatataacaagaaggaaagaacgcgaaagtagtctctctacccgatactatctatcctctttaacatctggttggaagatacggacagaagaatgggttggattgaggccagatgagaaaagaagaacgtcagagtgcagcagagacgatcagtagacgaatgagtgcggattcgagacgtgaaccgactagccaaccgaccgaccagccatcatgggtttccagcattcttgagataggagaaaggaagaggacataacattgcaatccagaagctgagaaatctaaatgaacaagtcgaataatgaaggatgtatccttgtttctattagaaaatatgagaggcatatcaggggactgttcacatgcggaaatattcacagaatttgatgtttcatatctattcttcgaggaacactgttttgctgaatcaagatacgggggatcggctatatatgtagtggtcatatacaatctagttagagtataccgaggaacgagcttgtgtagtttcaacgtatcagatgaaaacgcttccattgttcgtttgttctgtgagtttccagcaataaggtaggagagattgctatgatgatatctctgtagcggtgtacgcgtgtgtttctacaagagttagaaaatgttcctccaagacaacaaggtcactgtttgagctgcagtttgaacagcagatatcacgtctcgcacgttgacgcggcttaagggaaagacggaaacaaataaacaaagatcgagccacatgatcatagcggtcgagtgatcgatgacttccgcaaggagaggtaaacaagtaaagctcagtcgccgttcaagctctctacttggattttgatcttaccttacctttccagtctgtctgtgtctcgtccttgcatgcctcgtctagtccaaattatcaacatctatgtttacctcgaagagtgactacgattcaacactctgtcacttctgaagacgacggcctttcgtttgtttgtttgtttttctaaataaaaaaaaatgcatcactctgctttccttcgcttattttcttctttgatctctgtcaagcaaccatctccggacctcggtgttttatatatgttcgttgctgtcttgtttctcacagcacagatcaagccagatccctcgtagagtgctgttcatagtctgacgaggcaaaaagaagaatctacgccggttgataaaccatgtcgtctatctaaatctgatcaatagaaccataaaatggaaactcctgtaaaggctgatacaccaaataggccaagaattagaaatagagagaaagaaaaaagggccaaaaattaagggtctaaacaaatatgtaagcagattgtggaagattgaacgacaaaagcaaactggagaagcactcttgagtgaggaagagaagtgtccaaaccaggacccaagagcggaagggaataaaacaaagataaaatgaagaagattgaactatatgacgaagaaaaccaatgagaggaaatagaagtatgcaagtggaacgaaacaggtg

SEQ ID NO: 1664 - DNA, 9835 bp, Xanthophyllomyces dendrorhous
  misc_feature (8944)..(8953): n is a, c, g, or t
cgatacagcaggagacagcaagagacaaagagagacagagacgcagagagaaaggagaaaaagagaaggagaggaaagaggggaaaatctaaatgccggataacccataggaaaatgagaaggaaaccttggaacagagctgagcttatcggatcaacgtaagcttgaaggtgacagcagtgtaggtgtccccgttgaacttcttggcaaatgcgcttcggtcgccgataaggaagacattttggtaggtgttaccgatcgcaccgagcatggtgaacgtcgacgagtcagggttaacccagacggcgttgagcgcaccggtcgatgggctgtactgccagacggcagtctctaccttctgggtcttgccgttcgcggtgttgtagtcgttggtggaggtggcagggacggagccggcggcagtggcaacggcaccggtgagcgggcagtagttgtacgagccagtgcccatggtgttggaggcagcgttgggaccaacgaaagcagcgacgttgttgttaccagaggcagcaaagacaagattgctagaagaggaggacgaggggagggcgacggccacagcaccggttgtcgaggtagtgtaagtccaatagtctagggagaaattcagaaaagatagaacgatagttcaggggtcagtcatttggtaaaagggtttgaagtgaaagaaataactcactggctttactgcttgaaggagcgacgtaaccgaagacagaaccatcagtgttgaggatctgaatgttgtagttgtacaaagtagctgtggtggaagctcgggcagccaggttcttggtcttctttatcctagtaggctcctcgatgagctgacgcttggagaacatagcagaaggctcattctcgatgtatcgtctgggcatctggacctttcgatcggtcgactgaagggtgggcgcggcagtagaaaggccggcaaagagagagagagcggcggtagcaaggaaaagaacggatcgcatagttgcaataagagttgagagtgtgttgtttttgaagttttgaagagagttaaaggcttgaaggagatagagcaggacgagaagcgagcaagatatcagaagaatacgatagccgagcaaacagcaattgacgcgatgggagagggcgagttggtagagggattggtttgaacggcgcaggtgttaggacgggaggaagaataacgggggagggatgggcagatagagaaggaaagccgtagaaaccagaaggaacgaggaaagagaaaaagatgcgtgaagactttcttgcatcggacggacgatacacatcctactttatagtctgccaagaatgaaagatgaataaggttttcgaacggtgtgcttatccagtgtgtgcgaatcgagagagagaacgggagatataaggtaaggtaagtgcagtggatttgatatctacagcaaggttagacataccttgttgtaacgacggcccaggctggtcgataggaagaaagttcggaactgaatgaacatttatctctatgatgtctcactttggagatagatccggaagatgatgtgcatcagtgtgtatgcagcccatgcggtcagtgcggttagtgcgttctacgcatgtatgtgagcggctgtgtactttgattaatgatatgatgaccgaggatagagttcgctaaggatccaagcgtgttcagtcgggtaattcgatggctctggtttcatgacattgtttattcatatgggttttgatgttatttccctcatatgtttctcctacagccaaagctgtttatgatcttcatttgtcgattcataaggctagccgaaaccatttctggtgaataatacgtgcgcagtcactcatacattcatgacgcagtttttgattatcatcctctcttcgtacgccttagcaaggggtaggacatcaactgagagaactagtgacgatcgagttcgttcggaagccgagaggccactaggagaatgagaggaaaagaaagaaaaagaaaaagaaaaagaaaaagaaaaagagatgggaaagtaaacatacgatatgtacagtcgagaatgtaaacaagaacgaggaagaaaaggcaggaataacgttgtattcactcataaaagattcgaacagaagttggttttcgtagctctggagacccccgttgtgtaacttgtctcgcgttctctaggtgtcattcaggcaagatcgcacaagaagatcacgaaagaagaaagaggagaatgataagaagaaagacatttgatatttcgggaaggtgagattagtctctattggctgtgtgtgctcagacatgatttgttgtcagcaaagcagaagtgctggaacaatcaacaaagcggaacatcagatggtgtctcctatgttccccttctttagttgttctatatttcggaagatgtaggtttgctcaggcacagtatagcattcgaggcgagcgtatccaagtcatattcgagtgatatccgaacttgtcatatacataggtttatcatgaacgaatgcaaaactctggtaatctcatatcgcagctgtcagggatgtgacctgagtgttgcatgtttatagtctacggctcaaagatcctctgccacaacttctagtcgttttgctagtatgtagtcttacaacgcatttgttcctatcacatcctgtaatcccttcttgcgtggatttcttccgcgcagtatatctctatggcatgtcgcctgattacagaatctctgggatctgatgagcacatataacacgaccttccttttccatccacagcatagcctctcaagcctgaactcttccctaattccctctttgtttactttccccggtcatccttgttctcagtctctgttattgatatctatccttgcgtctcatcagtagcgtatccatcctgttctcttgcgtcagtgttctcatcagacccagccaaaagtctggacttttacttctgtgctcatctctctacctgtttaacattcttgcaattcctaccaccagccgagttctgcggtccctgacagcgtgttagaatccagggttcgggtggcaacggcgggattgcgaaagtcgtaaccagacggaactgcagctgttaaggaggaatttcaggctcctttgctgaagcggttgtgaagaaggcgcaaggcggagagaatgaaagaacaagattggtatggatcgaaaatataagtatacaagggataacgaagcattcaggcttgagagactgtgctatgagtggtaaaggaagtccgtcctatatgtcatcctcatatcacagcggttatgcataagaaggtatggcatacaaggtgctagaagcatctacgctggaggtctatacacttgcaggttaatgcctttgtatgagcaggagaaatgaaggagctgaagaggcgcaacagtcgaagattacaaggttgtaacattcaggtcatgtccctgacagcgatcatcagaaagccacgtgaccatgatgttagggttagacactgtttaatgagctagaaaccccaacattctaaacacacaattcctcatcaaacatacgacaccacttgaagtgacattcttcctcctcaaaagatggactcgcagcttgttcaaacgctttctgatacactctcctccgatggatcaataagacacgctgctgaagaggctctacagcgagcgatggacaaccaaggttggtcttaatcaaatcgttcttgatccttcccctcttcaacggatcaagtttctcgctcctctttcacgaggaaagaggagcgatctctcttgtaatcagtagccaagacccttgggttgacaccgcatctctgatctctaattcgtgcttctagatatggggattgctctcactcagattatcttgactgaagacgttgacctaagtgttcgtcagacggctggagtaatgctcaaaaagttcatggacaaatggtgggacgtccttagtgaggagaacagtttatccgtacaggcaagccatcattcgtctctgttcatgcgtttgaccgtatctgagccgttatgttgacctgccgcgtcatctgtgattgcatttctctatatatcttttcgctcttatgacagacaaagcaaacgatgcttcagtacttgctccagtcactttccctaccatcgtccaaacttcgaacgctcgccgggtactcactctctgtcgttctactcacctcaaacacgtcttcgctcgtacttccttcgctgctcaatctgttagccacaggatctcctgatcaggttcacggagctatgcgcgtatttagagagtctgttcgtaagggagagttggatctcggagaggttgttggagatggacttgaaggtagagaggccgacctcagagtgctcggagtcgtaaacgaactgagtccagtgttattgcaggtgcttggaaacgaagcaagtcctaggtttccttcattttggttcctctttggatttactttgggttgaccatctctgttctaatcgcgttttcctcttttcggaatttatttggcaaaccgttcttcttgatcttccgctcctatagactcactctccttcaactcgggcatcgacgatctctgtgtttagacaatgcctgttcacaattcacatgatgaaagaccagctcccacaagaatcaaacgagcttatcggcttggtaattcctccctggcttgaggctttcgtcgtcatcctcggtagagatgaacaatcactcgactcggccgatggctgggaacatttgggtatcaaaaaggaaatttacaaggcaagtcgggtgacccccttttttggcgcgcatatatccgctcaaattgactgtctgctgatcgtcgatgatgatttgctctctcatatagaccatcaacgctctacaccaaagtttccctcgctcaatctcttccgacctgatcatctcgcttctcccattaatttttagagatatgaagacactacttcctccattctaccgccatttcgtgtcgactacgtcggacgatgctgtgccgagctcgctcggagagaaggatgaggaaacaagaatcgaacaggtcgtctgtccgattttagatttgatgatcgcgctgactagagcaaacaagttgggatccacctgggtaggaatcggccggaagaagaaaggaaccaaggctgaagctggggaagggacggagaccgcagagttggagctcgtggtcgaggccgtcctcggattcactgctatgacgactgaggatgtgagtttatagttggcctcctcttcaaggccaaacattttgaggccaggactgactcaaacttgtttggctactttgatctttgtgaatttccgctccgggtcgattgcgcaaatcctactcacaggaagacagctgggctaatgatccaaatgcgttcgtcgcggatgatgacgatgagactgatttgtataacatgaggattgccggacacgactttgtttctgtaagtgtttttttttgtccttattcatagaaaatcccgagtctgatcgaatgctcgtttgtgttgacgcgtttgatagacgttactcgagaaatatcctcggccggtggcccgagtgttgcaaaaaaccgtccacgctcggatcgagtcttccaaagcgggccaaatttcaggagatccagactggtgagtatcaatctgatcatgctgtgaaatcaactaacatggacgtcatgcccgtattgattcacgctctttcgcacttcgattcttgtgtatacatcaaaggtggaaaggactggagtcctcgttagccttaatcggagggatatcagataacttgcttgacttgttagaagaggaagagacggtcggtggtcccaagagtttcgacctcggagccttgttcgatcaggtgatctccaggtgtttgggcgccagaggttcgtctccggtttcttttaccagtgcgctattaagaacaagtaagacacgctgattcctgctttgctgtcaaactacatatccagacgtacctttcttgcaaggtcgagcatttgtgatggctagtcagtacgcgactgcgctctcgtctaatctggcgactcagtatttggaggctgcggtccaagtgttggaaggtgaggggtctggtgtggccgttaagatctgtgctgtaaaaaccatcaaaaagtaaatgctttagtctttgtcttctgcaacggagaaagccatcgactgggtccttctggctgacttgtatatcttttcctcttggtgacagcttctgtcgacatatctcgacaaaagccgtgcagccgctgtcccaccgaatattaagtacgatcgtgccgctgatccttcaagcaggtgacgaggtccttgcgctcgtcttagaatctcttcgggcggtattgggtgtggacgagtctgcgctcgagccagggctgatgggccaattggtggatgtcctccttgaggtctgggctaaaaacgtcaagggtaagaatgtctcgatctgactgtctctccgcgtctgctttctctgtgttgatatctctttccctgctcttttctctaatctttttcgttcggctttcggtcattcagatccaatcatctcatcgacgtttgaggacttgtttgctcatctggcgtcgacaccatcgaccgccgcatatgccgcactcggcagtcattccatcccccgattatgcacgacaatctcttctgttaactatgccgatcctgactcgaccacgctcgccggaacggctgttgagctgttgtcgaatatcttccgaggccgaagagcagggttagatccagaaggcaaaggttggacgggtctggtggcaaacgcgatattcccttgtttgattcatggcgacgatatggagctcgtccaggtaggactcttttcttgttagaaatttcccttttggaagacgttagatacttacgaacacctgaggaacaaacacagaacggagtcgaagtgctgatcctgctgattaggaaggattgccaaacgatactctcctcgacggatccttcgaccggccagactggattggattctacctttgccgtcatcgctaggttgcttcgaccaggagagagcgagtcgaaagggttgttcctcggcgatctgttggtccatctctttaggaacgccgggcaggccgttggaccggtcttgcctgatttagtgagagccatagtggagaggctgcagaccgcggtgtacgctacgttccagcaggttcgtctggctagcttgccttctccttcccttttcttttcttcggaaatatgccaacgtcaaagtgaacggttctgatttgggtttgaggagatctccctcttctttccttttctttttcttcttcttttcttttcttttcttttcttggcgggacataacagagtttgatcatcccgttagcgtacttgatctatacatcgttcgacatgatcctacctatcctcgaatcttgcttgatatcgacaactagtgggcaaagttctggtctggcagtattactccgatcatggtgtgagaacgcagagacgttccatggctcatgggccatccgagtgagcaccctcggtctcggcgcgctcttagtcagtggaagggaaagcttgaagggcgtgaccgtcagaggggatatgattgtggacgagagaaatgccggaggtctgtctgtcacgcgttttcttcctcttcttgtctcaattgggacgttcatgagctgacgatggagagtgatcttgttcgattctgggttgcggattggaaaacgtgtagtaatcatgaccaggtctcgaacgaagaatagtaagtctctttttctttccctcttgaatgaacgatgttacttgtatatttagttttcctcctttgttcttgctttccatgatttcagatccaacgacatactcttcaattccgttcctactgaaagcgttgaaattgacggtatccgagttgaacacgaccaaggcaagcgcatcctacaacgctgcctgggaggtcggcggagaggaagatggagatgaggatgaagacgacgatggagaggatgacgggaactgggaggacgatggaccgggtttcatcaagcggggacccgcgccaacagacgagtttggcttcctctctggttcggatgttttttagtttcactttttcatgctcgttaagctttcttgagctgaacttgatggtgtcttacaacttggtctttcttgcttgccctactcggatagatatgatgggcccggatggactaatcgatgacgacgaaggagacagagaggacgaagatctcgcgaccgactctgtttctacgatcgatatgaatgttcgtccagaagggggtttctttttttttgtgctctgcaaggactgctgctgcatgggttgaaccgactgatgtttagtttcttttctttctttcttttctttctttctttctttcttgttactctccggtgtccgccggttgactgtaggcatatctggtcggcgccattcggagggcctacgaaggcttggatagctttggagcgctcgctggtggattgaatgagggtgagatgagctcgctcggcaacgtcttggcctgaaccggtcatgaatcaaatcggggttgtgcctgcgagttttcgatggggattggacaaaactagtatgaacataaaaccggggaggtcggcggtttggtgtgtatgagttaatttcgtagattaaagatgagatcgtatttattgagcgatctggaatgatcttattgagcacagaatacagaaaggagcgctagtttgtgctgtcgtcattttctgttacaatccgtgtctttgtaaccatcactcaacaaagattgacaacaaaacaggaaagaaaaaaaaaagaaaagaaaannnnnnnnnnaggagatatacatatttaaaaacaaaaatagaatcgaatcagatgaagaacgaaacgaacaatactaccatccagaaaacagatggttacccaagtaggactttatcgtggtcgatgtgtttatagtaagaaggacaagaagacgctgaacgacaacccactgaggccggagcggatgattgtatcacatgagccagctggcacacgcgcgtatcggcgcagcaggtgcacagacaactaaattttgtgactggaccgatatttcgttttccttcttactttttttttaatacgcgggcgcttgtttcactcttcacgaccatttctctcgcctgcccagcaatcttcccgctttcacccactcggagattctcttccttctgtcgttcgcctgtggtcgactgccccattgtgtgcacagtgggcgctccttttgaacgaaggatcttgatattcaactgatcggccggcctggtcccctctcactttcatctgttctttcattcgtgattgaatcctgatcctaattctgtaatgttaccgctgctaaccgcttatccgctcacggtggcgatatattcatcgaggcttctgttggtgtgagataccgatactcggtcgagaggattgatccatgatgtcggaatccaatccgaatgctggggaatggttcctgtgcgggagagtgcctccgtgttacacgcgtccaacacgctctagggttgaattacccacgctgtcccttctgctgctgcttcttcctctgggccaatcctggtggcaagatctcggccaactctgggttttcttgttgtgttctcgtctcattcatttgcctttgcctttggcatctttttctttttctttttctttttctttttc

SEQ ID NO: 1665 - DNA, 24408 bp, Xanthophyllomyces dendrorhous
attttattttattattttgcattttacacaaacaaatacagagtgcggggagattataacgaaggaggaagagaattcaaacaatcaaaaaaaatataaaaggtgcgaagaagtggagaaggtcaatctggaggaaaggagaaaggagggaacgacgctggagaacgttgtcagtcgacgggcgttcaaggtgagggggaggggggggatgagtggctaggaaaggacaagccaaaagggtaaaagagcagggaaaagagaagagaagagaaaagcagaaaactatataggaaaagggggttgagattagaacagaatgaggaagaacacgaggagagaggtagtggaggtaaagctatttgacacgcttacgggttctctatccgatccagtggctgatcaaaacgcgaccatcgagttgaactacctcgccttcctcaccttttctgccttcttcccctaaattatctaatttatcttatttcccttctttgctctctcgctcgtcgagtcgtacgaaaatctaacgatcctatttcctttcgaaagaacgcccgccagcccgcccgaggctgatcagcgattttttttcctttcttttttcttcttcttcctgagcccactttatatttttaatctcttttcctcgcctctctgtctgtttcttgctgttcttcttcgccgctacagcaaagaattagaccactcccatttcatgaaggggggtttcattcaacgacaacccgttgtcctccatcccaccctttccctctccgtcgcgttcgtccaagagatcgtgctgctgccagcgtggtttcaaagcacatagaccgtcgtctcttcctccttccccttttcatcctctctctcgcttccactttctctccttccatcaatcctctgctcttgcttctgcctctgtttctctcttcttctcttcctcctttgacagtctcgacaggacacatcacgtttgtctgctctctttccctcccttcaccactagtggtcccaacggatgctttcatatacaaaaaactaaagacacctctgtcgacgtcaacttcagccatccattttttcttttaataaaacaaacaaacaaacaaacacagcctacacgtacttacggagataactcgtccgacaggctttcgacccacagaagagctagaagttttggcgcgtccatcaaaaccccgatctttcaactttctatatctctccctctcctctcttccttggggacaggtcctctacggaaacctattcccgaaaacatgagttcttgccggacgattgctagtaccggaggtggtcaaccaggagttccttcgctgtcgaactcgttcaccgcagcgacatcctccagaaaagtcttgagctttgatggttgtgtcacttgcagattgaggaagaaggttagtctctcctctctctctctctctctctctctctctctttctctccttcttcttctttttctccttctccggatcggaaagaggagacgaaaaaaagaagagtgccccgtctttatgcttttccttacaagggaaacagaacgtccagctctgaagccatcccttttctttctttctctctcctgatatcgttctctgtctttcattctcatggtccttgccggtctgtgtaagaaatgcgacatgggtaagatctgcatcgtttttctttactctttcattcccgttctgaagcgctaattaggttctcttcttttcttttccttctcagcgacatcggtttgtgaagtatgtgatcgatgttcttgtatatcccgatgatgccgatcttatccttttgatcttactgattccaactttcgggttcttcttctcttctcttcccatttctctttaataatctctctgcttaaactcataaaaccaaaatcaaacatttgtctcttgctacggaactaacggatgaaaataataatatttgcggtatgaaggcatgcagacgattgaacctagaatgtattccgccttccaagaaacggccggcgtttctgaaatcaccatccgtcgtcgctcagatcaggtccgatctcaaggtctttctcggttcccaaggaaaattagccaacatgcggaaagttgggtcttcactcggctcttccgaccaggggcaaacagctcaatggccaacagaagaccatccaccaccatcgtcaccgccaatgttcaggttcgatcgatacagggatgcactagatggcgagagcaaaaaggacgaatccgagccgtctagatcgcctcccaaaatccctactgtgccgctgtcgtcgtcgtcgtcgtcgtcatcatccatcgcggggtctagaccggcgacgacgtcaacaaagggcaaggctagggatctctggcagaacacagggacgatggatggtattgggaaaggcaaaggcagaggcagaggtaaaagagaaggagaaggagaaggagaaggagaagcagaagcagaagggatagaaagagaaagatcaatggtcgaggcaccacgaatggatccatccggttcctggtggccatcttccccatcgttgtccacccagtcttcttccggctcgcttcaagttaaccagcctcacgtccaaccccgttcaaactctcgtcctgaacatcattcccactctctctctctcaacaatgtgagagatccaggcttggccgggttttctggtaggacattcgatccaacgacttcatcctcgtcctcgtcttcagcttcagccccgttattctcttatgcaccttcctcactccagtcgatgaactctcaatactctcctcgtccagtcagaccggcttcacaaccgatgacgctgatcgaacgtaccgccagaacgccctctaggtttccttaccatcaacctgcatatggtcgtccccaaccggttaccaatcccggccctcatcccggccctcctcatcatcctcctcctcctcctcatcttcatccacatccacaaggttcctcattcgactatcagtctgcccctccaaacgtctaccagcaggtgccctatcctcccgcaccggaccatgtcttgtcgacataccccttatccatgttcgattatcgtcagaatgagcaatcagtttggcgaccagcagtaaacagatctcagccggccagatggacagctcaggacatgcacggaggagcaggaggtggtgctgggtcatcaggatttcatctatcatccggttacagtccctctgcggaagatacatcttcttcgcaaacaacgacgacggcgatgacaccagtggtaccggtcactggaccaaatggtatggataccagtcgacgacaatcttccaattcttactggcctaccgggtaggtcttgcgcctctatctttactttcctgttcttgaatgtaatcctgacccagagagttttccctcctctctttctctcttgttttcttcatgcattcatgttcttattgatacgtcgcgcgcgtcttcatcatgcatcaaagatttgatccatcaatgatctatcaattcaaccctccttcaaacccaggtccttaccgacctgtgaccaacgatagctcatacaattggattcaagatcctaccattccgatcgacttgacggcttcttccaactcggataccgctctaccggcaacggtcgaaggaacatactcgaataggccggcgactacgtcttccatgccaatgatgccatcttccgtgccgacgtcagctcaagtgcaagcgcaagcacagctccagccgcaggttcagatgttctttccggatccttatctatacccttctccttctcctttccttcaacagcgacaacaacagcagcaacagcagcagcagcagcagcagcagcagcagcagcagcagcagcagcaacagcagcaacagcagcagcagcaacagcagcaacagcagcagatccgacgagaagcatcgatgtcggtaccaatgacaagtcggtctttccaatcttcatcccagactaacacccagcaaacgaatccagagccaggtcaaggtcaaggtcaaggtcaaggccagatcgagtctaatcagagatccgtcctcgtagatcacgagatcccggaaggccagccaaacggattgatagacccttctttagtgagaggagcagcaaacagactttcacgaggcaaggaaggcggtgtagggcatatagagatagacgacgagagaacgggtcattaaccttgttccatgaggtgttgccagttggtttcatccgcctctttgttttctcctctcttttctcctctcttttctttcttcttcgcatttaaaaaatgacgtggtagacctttctctttaggaattgtcgtgctccgtataactcgattatcaaacccgatcatacaccatcatcttctcttgcctttccgccatatcttgcatatacgttttgcattctcttggtctatcctaccccttctctttctttcttgcttcctttctctatttcttgttatgttcaactttgcgactgcctacttccattggtttgcttgggttcatctgtttgtttgttgtcctataatctgttgcgtccctccttttgcccgtccatctaaagtgtaaacaaaataatatttttgctccccccccggaatgtatctgatcgattccaaaacaaatgaactatacctgtaaagtttaggccgagagttccttgcacgattagatgaactcaactttggcgtttaatctcgcgcggttcccggcatcaaaggaagaaacgaccatccgatattcattcttttccttttttgttgaaataacaaccctttctttgaaattaccatacagaaggcaacgtcattcctttccccccttcttctctccccaccatcacttgttccctcttcttctcttccgggaactcaatgaccgacgaatcgaccgagctttctcgcttccgcccgcacgctctcatcccaatgtttctccaaaagtccgatctcgaagaaacttccagcgaacgtgtttgccatctgagggtcatccacatcccctctccagacgccatcagccgttcggtcttcggacgccaatagagcttctacctttggctctctcaccatgagagcgacgacaaacttgatggcccgaagggcagaaccaggcgggaaataaagagaggctgacaaaagtcgtttggcaaaggcggcagctcgccaaggaggggagatcgaatgtgaggcgaagggtgaaaaaaagatgaggtcgagagcgcggaagaacagatcggatgaagcggccagttgagatttcttgtgggccaccctggcggtcgatgggttgtattcagtcgtctgtgagggtgaatcttcgatccgggggtcaaaggcgatgagcgggatcagtccgtacagattcgtcataaagtcgctcagatcaatgttgagagcttctccctggccactgagcagctcgaaagcggtcacagtggccaacagtctgagcctggtcttgtcgcctccgacccggagagaacttccttccgggttggtctcctcatcttcatccgccaactcgtccatctcgtcgagtttgtctcctttgatgagctcccgaagaaccttgagaagatctctgaaaaagtcaacgttgacgagatgagcgaatcgggcgagtccttcaagcgcagcaggcaacaaaggcgtccgtttggtttgtttcaggatcgagaagtataggacaaagagatgttgtaacgtctcggtttgctatttaaataccgaatgcaaaatttagcacaattgtgttcaagacaagcatctaagagtaggaaggaagaaagaaagaaaagaaaaagaaagacccacgtttcgaccggcctcctcctcatccacctcggcctcggcctcttccatatccctctcaatctctttgcgctccctcatgtccttccgcatcttcttcgttctccactctctcttcttgtccgcccattcaccagtctgcagcttttcctttcccttattgacaccctttcccctttcggccttcttccgccagtctcgatctttatcccaccgtctctttggtttaccccgatcgtcctttgacatagccgcccggactttgacgtgccataggcaggaaagaacgttcgggtgaacggcgaacttgcgctctttgatcattcgggcgagcagtcggacaagcggaagcgagtgggtcgaagacagatctgattggaagattgacgtgatcgctcggaggcatacgtcagagtcctaaggagttgatcatcagatggaaacacaggtagtgattggattccagtcagagaagaaaaaaaaggcagattcagaggatagaacatgcaaggaaaagaagaaaaaaaagacaggaagcgtacgcacagaatcccaagattttcgactgagtcgaccaactatgacggccatgatgttatccctaaagttgaagtgggtcacgcttgacagaagatcacacatgcacttgatacccaagctagccaaaggtgacttgtctacgttttcgtgcgaaacaaaagcaggtaaagaggaacttgatgagtcgcggttacggagagaacgagataaagaaaagatggcgaacagacccttaatctctttctccagcatcttgaggtaagcggcgtaggcacgaacaaggccagcctcaccatctcgctgccttcgaacttcttctcggaccttttcagcttgctcgagctcggtcaactctcgaattctagagtaaacacaaaaagatcccagctgattagacagattgttgagatttgccaggcgcagaacagggagaaacaacgaacctgtaacccgggatgatatctttaaacacagccatcatggacacgatggccagtgctcggacactcattgggttaggaattcggggaagttcggggttgggattcggaacggtaggtaaaccgaatgcggatagacgagtgatcaatgggatctttggagtaaaaaagaaagggaaacaaaacgaagagcagccgtgttaagaatgtcactcctacgaaaccatactcttctcgatgaagacgaacgcgacagcacttacgttatccaataattcgccccctcctacgatctccgctccaagactggcgatctgctccttgactgctcgctttctctctgccgaatttttgattcggaccgcatcagccaccgccattctaccccacctctgacccaaaccaagcccctctcctcgctgttcctcttcttcctgctcctcctcatcagaagagacgtcctctttcgcaacctctttcggaggcagtaccgtcattcctggcctcgcttgaatttctccaccaggcaatttgataggcaaccttcgcacctttgctcctcgcgtcgggtcatcctctccagaatcagaagaatctgatccacgtcgggttcggtggaatgatcgaggctgatcatcataagcctcttcttctggctgagcatgtcgctttcgcttgttgggctgcgaaggtcctggctgagagggaaggaaaggacgagaatcttccaaatcggaagcatccagcaggtcgtctgagtcttcttcatcttcttcctcttcgccttcagagtcgtccggagcggaatcttccaggtcagacacgtcggagccgtccaaatcagagtttaggtcggaatcgagctcgacgtcagacatggtcgaagagatatcggaagattcaatatctgaaagatcagccatcgacggcgagtttcctcgttgtcgtttttgtttaggaagcggattttgagttttgtcaattttgtgaagtcgttcggtctcctgaagtgtcctgtatagcggaagaaggaaagttgtgtcaaaacaaagaaaaaggaaaaaataaacagaccgagcaacaagtgccagtaggcatagacacaccttccgattctagacttgtcgatatccatcaaaaatcctgcgccttggttgtccttaaaaaatgccagcgtttcctcatccagtccgtcggcactgtctccatccgaatccgagttggcatccccgtacgggtctggatcctggtcggggatggcgattgtctttctgtcttgagccttgatcttctttgtggtgggatttttggggggagcaggcttaatcgactcggatttaagtgttcccttaggagcagcctgatcgagagaaagcaagtacagacaaagagaacgaaggctaacgtgagcacgcaagaacacactagtcgacaaaggcaacacctcataatcttaccgaagaagacaaaacaggcttcttggatttcccttttgccttgttggcgatcttggtctgcttccctgctttcagcttgaccatgatgtgcttcggacgtgtgtatgtgctgagcgaagcgagagaaatggacgtaaaggttcgggggaatcgctgggtcaaggtggattttgagaattacctgttcgaaattcctccagccaggcggtgtcttgagaaaagctatgtaagatacgccacacagccaaaacattcatctcatattgaccgccaaacacgtgactctgcctggacgtccttcaccgctctaatatcaccactcctctctactctatcccacggccagatcagatcacacaatggacgaccgaggcgcgatgagagacaatctgagggggactcttccttctcagggatctgtagacacagccgaaggaggaccgacaagtaagaagcagaaggagaacgcagagaggcggaagcttcgagtcgagtttagagagctgatcgatcggacgaatggtcagtgagcatagtgtgtttctatgggaatgactcgatggacattgacaaatgtaatcctttgttgcctcacatcgcagctgatagagtaaatcttacgaacctcacgtctgccgacctcaaaaagtcaatcttggagcaagagaaactattttctagaggtatgttggagtgtgttctcttctttcctcgggctcggtcaggctgatcagaagcaatctctctttttagtccaacggcctcaggaagctgctttggacgcgaaagcgtttatcacgacctccacatctgctgcccataaggctcggcagatgaaagtggaccaaaacgcgtttgatactaatgagttcatcattcggtccgtctcacgcgtctttctttggctagatcaggccagacctttactcatatgtcttattcttcaaattggaaagtctcaagtccaagcttggccagaaaagaacagcaagtgcagcgataggtgaagatgaggatgatgagatagatgagattggaggagggtttgggaattgggagcatataggctggatgggagcacgcttctccaaaagggtctgtctgacagattttctgtgagtagcctgtccaaatgccttttatacctatatgctgaagcgactgaccagtacatatgtgtgaactgacccggtcgcagactgggacctttgtcagttgagcaaaagacacgatcaatcgttaggcgagcgaagcttaacatccgggctgaagacaaagcggcgccaataaacgtcaattcggacagggtacccaaggacgccaatgagacgagtataatgacgcttcaggtgcgtttgctcgttcatcaaatggcacaaggcatcaagataccaaatgaagagttagttatctttattaacatctgttgttttttcttccttctttctcccaactcaggtggaagacttgctggctgaggctacaggagaaaacgggggagaaggtgtcaactttttcgaatttatgtacgttgtatttctcttcctgttagcttcacatatgtattgtggatgaagcctttaataaatatgaggttacttcgcatggaatgtgacatatagcatcaaccctcactcattctctcaaacggtggaaaacatgtttcatctctcgttcgttattggtaaagggaaagctgcacgtaagtacacctattctttctttatccgagcttcgacctgtgtttcttactttcaattgctctcccgtcaaacacgtatatagtcgatatcatccctgagactggcatacttggcgtctctggatctgagccagcagatgatacagacgctcagcaaggagttagtaaacttcagatggtcatggagatggatatcgacacctggaaggtaagcatttgctttctttctttgttgccaagagttcgctagcatatattaatacagtagttccatcgcgtataataggaagcaatcgaagtattcgacatccgagaacctagatggatcccacaccgacaagaaaagtagctaccactcaatagtaaaccttttgcttacatattcctccttggttttacttcctgccgtcattccaagtttcctagtttggtatggatcgaatcgcccgtcttgttgtatactaccttctctctatattcactaattagccgttttaataggattctaggcgccttccttatatatataccttgtcgacagtacaaaaaaaaatgataccatctatctgttcctctgtgcgtgtgcgtttatgtgtgtgcgtgtatgtgtgtgcgtgtgtgggtgtatgtctgtatctgtgtctgtgtttgtgtttatcgagagtggacagaacagacactcccatccgccaagattccgcagtttcacctttcgcttgcttgccaaacgatctctcttgaattctctcctgctgttcttgctcatcaacaagccagccggtatatcttttgcatctttctctttctctccctcatccgtcgcctctctcactcaaggatgagtgaccaggatacaccggagacgtttacacatcccgtttccagccggctcggtcgatctccttatccaccaccaccaccaataccggcttcaccgtccagatctcgttcggctcttcctcaacccggagatgaagtgtatacctcctcacgatggaatgaaaacccggataaggaaaaagaaactgggagagacaaagagcgaaggtaagcatcgatctagtcctctttttttttgggacaaaactttcttgtgttgagcacgatttcttttctcccttctctttaccgttacccaataaggcctcgtgctacctatccgtccaacatgtctaattcccggttggccgtacctcatccacctacaccaccccctcaccgatcaacttcgtcccccaaaagatcatatgcgccttccaacaatagatcatcccaccatcctcagtcatcccagcctcactccttcgcgtcctcttctcgaagatatccccgggccgcagtctcaggaagtgactacgatcgtagtctacctgtaaaaaccttaacatcaacagcgaccagcacatcgattgatggcagccatcccgaatctctaaacatgtcccagggtacctcggtgactcttccatctgggttggcggctagcgtgacaaaacatgggacgaattccagtagcgggcggacgttgtttgacccaatgggtggtcgagccaatagctctagggaaccaggaccgactagatcaggcgcttccgttgggagctcaagcagacgaagtcatgaccgagcagctggatcttcgggatcgacacctataggtggatacggaaaccatgctttaccgaaccaaactatctcgatgagcccatcgggctctttcgcacctgggatgacaaatgtcggcagtagctctgagcaaccccggcagttgtttgatcctaggttgcatgatcctgttcggttcgctcagaggtcgagaaacggagcgccgagtgtgacatcaaactcgacagggacttcccacccctcggtttcgagcaaaacggcgagtacgactttgacatcgatccacgaaccttcgggcgatagagaaagagaacgaagaaaaagaagagagggtagcgaacgaaaagcaaaatcgagaaacggggacagagacgagaccaagagcagaagctcggaaggaagcgaaagtttaaaggacagacagaggggtaaaggagggttagtcgatctagattcttcgccttgaaaaaagtcagggttgcttcgagggctaatgtaactgaaggcgtgcatttacagagatactggtgtgctcggaactttacgggaacagtacaaagctatccaagctctcgagctcaatctccaagacatccatcgacgaatgggccgggatgaggttgtccttcttggctcaggtgttcaccttggagcaaagatgggtgatgaaggctgggtagagcttatatcccgacacatgaagtacatatctgttcattcatcctcatagtttgatgatggccacttacttacaactgaccattgtatcttccactagacttgcacacgcacatcatgattttttgacagcctcactcgacgcccggttacctgcatctctccactctctccctgtcaaatacaacattccagctcgactatggcaaaatagttttcatcttttgatcgaacgtatgcgaagcacctggctcgctccttcctcctcgacatctcgagatttggcgaccatctctgatacgctcgcctctgcttcgacatcatccgctcgcgcgctcgaacatctcacagactatatactagacgcttattcattctataccacccttctggacgagcaagtccttcaatcgttccggtccgcatggattgaggctctaggtgatctggcccgatatcgaatggcagtagccaacatggtcggttccacagctgcttcttccggcgctggcacaacttctgcgtcgagccgtctgggtgaggagtccgatcgaatggcccgaattgacgacgaagaggaagaagctcagatggttccatcaggaaacagtataggaaaagaggttgctgacgcgtgggacgtcgaggatagagaaacctggagaacgaccgcgagggactggtacgctctaggcgtaggagagaaaccaggagagggcaggttgcatcatcggttggcgttgctcagtcgagacgtcaaaggggaggaagagagagcgttatatcatttctcaaaaaggtctgtctctcattcgagtttgcctgtgacaataaagaataagctgactgacacacgatatcggttatacagtctaatcacaaacaatgatttcccagcatcgcgggagtcgatcctcccactcttcgacaccgctcttcagaacaaacgattccatccagatgccacggcttccgagctttttgtccttctacatgggatgatattcacaaagatccagctggacgacttcgacgatatctttgctcggttctttgagcggttagaagaggaccggctgggtactcgaccagtgccttctttggaatggcttatgatgggaatcatcaacctttctgcctgccttcagtatggcgcggaggatgggctgctccgacgagcagcagcggaagacatagttagaaaaggaggaaagggcgaagacagagaggggtcaacggtcatgccccatgcaattatggttcattccgggcaaggaaagcgtgaagggccccctgagggcgtaacagggccggaatctgacgaaggaagtgacgggcttaccaaggataacctcgatgccattagcagtgaaggcgaggttcgtcagttaggcacccatactgtctctgctgaggacgaagaaagtctgccgcttcccttccgacacgctctccggctgtcgttctcgatcctctcattttgtcttgtgcacccgattcgaaaagatagctcgctcaagtcgatcgtgaatccgtacattccgattttcctcacgttcctctcaacaatcgccaaacaacctctggcactggctctggtcgaacgagccgtcccttgggaagccctggtctctttcctaaactcgatcccccgaaaagttgaagtcaaacagactgtgcctccaaaattatctggaggaggtcccctgcccgaggattggtgtcttcgagggatggaatgggtcggccgtcgagtttatgagcgaggattttggaaacagaggtcgaattcacctaccataagagaccaaaacgatcgatggtcgactgccgtggaagggcctcgatcaggacaggtcgtccaaagtgaaatggacgtcctccagttcgaggtcgagtccctcacgatggtcgattcattccaagaagggattgtcgagggtgaaggcgatggagcggacgcgctcgatctgtcacttaagaggtggaggcggattgcatggtctttgggcgtgttcgtccgtcacgttcctgggctcgagtttgatcgttccgctttgtcttcattgtcgggtgcaacatcctcagttggctcaaacgtatcgcaggcgggccgcaaagtgagaatcattcctagaggagcgttgcagcgcaagttggaggcttgggcagaagaacgtaggatccaggccgagttggttcaggccagattggctagagaggaagaaacgaggcttgctgcttgggagggtagtggattcgatgaagaggaagatgaggaagagagtgatccggacgacgaggaggatccagagttgcgtgcattgaaggcatgtgacttcccccatgtgtataccgtcaccagtttaagttctaactttttgaaaaacaacttcttgtcttttggtttgactctacagactcagagacgacaacttcgagccattcttcaagagacccgacgaaatgtgaaacctcgacgaagccgcgtggccaattcccgagcccacgttcggtctggggctcatctttcccatcgatcgttcaaaacgaccgccgatcttccacctgttcttcctggctacaccgtcctcgtattcgacacaaacgtcttgctctcctctctcgccgtgtttgcaaccgtggttgaatccgccagatggacgacgatggttcctttaccggtgatcaccgagttggacggtctgacgaaacaacctcctccgctgggactacaggcaaacgaagcattggcttacgtcacgtcccatattcgttctcacgccagaactctcaaggtgcagacgtcaagaggaaactacttgtcggatttgacgatccggtcggaagacctgagtttctcattctccagcgatgccgggctcgatcgggctcgaaacatggacgatctgatccttcgcgcctgttcgttccaggaagagcattttgtagaccgaaccggcatactcggcgtcagcggaaacagacacagtaacgacatcaatgatgataacgacggtgaaggtactgccgatcgacaaacagaggaggcgagaaaggcatttgctgtcaaggtcgtactgatgacgttcgatcggaacctccggctgagagcgaaagctcaaggaattcaagcagtcgatgagaaatcgatgttgagaattctggggttgggtagaaacggaaaacctctggccgagccttaattgagccgacttgtgtgtggcttacgcaacggggtttcttctttcccaaaaaagaaaagaagattagacaaggcctgtttgatgatacataaaaagcagatccttcttcttcgaatgaagaacatattctgaaggaggggaagcaaggcttgaagttgcgcatacgtaacgttgtttagtttcgtatctcttctttccctttctttcctgaggaggaggagaacatcatgatttcggattctagagcacgttgctctgtagtcgtcgtcttccaaatctggatccaacatcaggcttcttcttcatttctgtttgctcgaggatgcaaatcaagcataatcggaaatcagaattaagaggcttccttatcattaccttcctttcttctttcagtgttttcttctcgttgttcagctttgtattcttttcgctctaatttgcattctttcatgattttttcccttctctttgatgttttcctcactttcatcatcttatctaccattaaccattaaccactagatgcaccccgatccattccgcttctcattcatttatctacacatccatccaatattttgcacaacctatactaactttcctcacggtcgcacatcttcttctggtttcaagtgcatcaaaactcaaccatcatcgatcctctccgaatctgatcaatcttatctgtctagattactcgttccaccttggttcgatcacatgtcaccacgttgtgttgcgttagctcgtggagttttggaaggtcatgagagcaagattaaaactgattgaacaagtcattgaaagtgaatggagaatagatgtattatcaagagaggtcttcgtgatagatcgttagtacaaaaatgaaagaagagggaaggcaaaaagggggtgtggggcaaagaggagaaagagaaggaaagagaaggaaagtaaagggagaacatgagagcaaagtcgaccgtttagtgcttcacaccagagctctgaatataggtttgaccttgtccaggtgcataagctgcttggtgggatccataaggagcgggtccaccgacagggacttgcccaggataggcatgagggcctggctggaagtgaccactggtggatgtgtggagaaagaagtgcaagaaagagaaaataatgtcagaagcaagagttttcaatgggggttgtggatgactaaactaactttccgacatagatgtagttatttttgccgtacttctcgttggcctgcgctttcttgtagacgatccagatggcatggatctaagtttgtgaaagaaccaacatggacagatgagtgcaaggtgagtctgaaggaataaatacgagcgggaaggataggtaagactgggagagcacgaaccacgccgggaatataagccaagaaggtaagaatgatgttgagtaggagatcacatccacagccgctggttgcgagaacagcctaagatgagaggaaataaactatgactagttagggttgatatgtttgtggtgatcgaccaggctggatagccttgccaagcttgatggcacatgaggacagccatactcacaccgggggctgttcagtcagaccattgaagagatgaagaggatcagcttcaatatatggtgatcgtaacgaagacaggtagaaggcggaaaagtcttacggaagaagatcgccagctaatttgaggttgattgtcattgttggatgagcaagggaaaagagtgaagagcgcgaggccaagagatgaacatgaaggaactacgtcagtcgggatattccaaggaaacgagcgaaagagccaagaggagagataggaagcgagctgggtgagacgtacaatgacgagtagaagatcagctccttccattatgtgagtgtgagtgagtgagtgggtgagtgaaatccaagtgagtgaggttcaagtgagtgaaggtttggatgagaaataaaattcgttagatggaggaacaggaacggcagtaggaacaggaacagcaatagggactagtacggtcgggtatagccgatggctacgccgctgttacggtgtaatcatccgtgtacgtcattcactcacactcaactagtcatgagccacgtggacgactcgatgacgttcgtcggtcggcacgctcgatcgccagtcaaactgagatcgtacgcgaccgatcggactgtacctgatgtgccctgaacgtcgtgcctgatccgggtgcctgttcctccagaggttctgtctgatcccttaaaagagcgaagaagctgaaggaggagtcgttctttccttcttcttaaccaatcaagatcgctgtaaatccattccatcccacccttcttcttctcttccatacccatctttgtattgcttgagattgtatccatcgtctgctttagctcttgttaattcatcttaatcaaacatcacacttacacacatcatggacactatcaagaacgctctttctaacggcgcatcggccggtgagtagttgccaccaccacaacttctttcatcgttatttgaacctctgatccttaagctaacctgcctggttctctctcttccctcagctgctgacactatcgacaacctcactaacgctaagcgcaaagatctggagaaggtcacgatcgactacagtggacaccctgggttgaccactgcgcagggtatcaagctcgaggttcgtctaaaagtcccctctttctgttttactgcggttgacctccacctccacttttttttctctcttcctcagaacactgataccgcgctcaaagccggcgtcagagggccgactctcatcgaagacttccacaacagagagaagattactgctttcgatcacgagagaatccccgagcgagcagttcacgcccgagtatgtctcgtttatgtttcctcaccatcccttatcctttctgatagtcttaccgacctccctttgttttacgtgaaaatctccacagggtgccggagcccatggtcacttcaaattacacactcccattcccgagttaaccaaggcggctgtcctgaatgacacctcgaggacgactcctatgtttgttagattctcaaccgtcgctggaagcagaggatctgccgactccgtccgagatgttcgaggatttgccaccagattttatactgatgaaggaaactgggacatcggtacgttctagtcaatcaatacggagctcagaatctataaactgacagccttacgtcacattgatatttttagtcggaaacaacattcctgtctttttcattcaggaggcgattcagttccctgatctcgttcatgccttgaagcccgagccacacaacgagattcctcaagcccagtctgcacatgacaatgcttgggattggatggggctgcagacccaggcgctccacatgaacatgtggcagctttcggatcgaacgattcctcgatctttccggatgatgcaaggtttcggtgtaaacacatacaccttcgtggccgaggacggcaagtctcgatttgtcaagttccactgggagcctaaacttgggtctcacggtctcgtttgggacgaggccctcaagctcgctgggcaggatccagattttcaccgacgagacctttacgacgctatcgaagccggggcatatccttcttgggagttgggagtccagataatcgagcaggagaatgagcacgactttgattttgacatccttgacgccaccaagatctggcctgaagagcaggttcccgtcaagtttattggaactatgaccctcaaccgaaataccgacgactactttgcagagaccgagcaggttgcctttatgactagcaatttggttcccggtatttcgttctcgaacgaccctcttcttcatggacgtaaccactcttacctcgacacccagatctctagactgggtattaacttccatcagtacccgatcaatcagcccgtatgccccgttatgtctcacatccgagatggaaaggcttcgcacaggattcacaggtcgaaggtcaactaccacccgtgagtcttgctactgttgttcattcgtttctcctgcgcggacttcttaagccttaatctcaatactaaactactgtcttgaatgtcatcaacagtaaccgattcgacactcctactcccgttcctgaggccaagggaggttacgttcacccccctgacgtcattgaggctggtcacaaagttcgagctcgaggtcccaagttccaggagcacgtcaagcaggctcagcttttcttcaactcgatgtcgcccatcgagaagaagcacatctgtcaggccgccgcgttcgagttgggcaagtgtgaggaagagcctgtgcagcagaagatgctcgagaatttgaacttggtcaaccgagaactcgccgaatttgtcgccggcgagctttgcttggagctcactgctcctcctcctcaggtcgacggccgaaagaccgactttgtgtcgatggtgactggtcgaaagaacacattcaccgctgaaggtcgaaaggtcggaatcttcatcatggacggctttgacgtcaaggcgctcaccgccatccagactgctattgttggtgccaaggccatggccatgcttgtcggtgagaagcagaagatcaaatcgacagacggaattcacaagtgccagttcactttcgacacctgtcgatctacccactttgatgccatcgtgattgtcggaggatcaggtgattaccagagcaagctcaacgttggccgactcaagcacgccgcgatcgaagcctacggtcatcagaaggcaatcctcgttcaaggccaggccgttccctgggtgaccgacgtctgtctgcccggtcagggtcttgccgtcagcggagatagcggcgtcacagacggtgttgtctttgcgcacaccgtgcctggacccaaggatatttctacgttcatcgatttgattgccaaccaccgagtttggtctcgaaacgttgactctgtcgctttctaaaaaaatcgaaaataggaaagaaaaagaatgaatagaataggagaatcgcctggttgaagttgtttcgcttttgctcttttccttttttgttttccccacggcccgttgctctcctttgggtcatgtaactttctaatcttatctaaacccaatgaggttgggacatgatatatatatgtacctgtatctataaaagccatatgccatgatcttgtatctcgaatcatttcttttttttttctttgtggatttcttcaagcttcaaaaatactcaatactttaacaagaaagaaaagagaaagaatgattagtgttcaactacaatgtacgtcctccctgacaaacattttagctttcagttctatcggtattgttttagatacgttcttctccccttgccttctcgcctcgtcgcgtaccagtcacccccgtagcatcactgcatacatctttcgttccactagaatctctgaactcagttctcaagactttgattttgagttgcagtcgtacagggcacgaacggtgcgtctttagaaaagattagaaggtgaaactcctcatgaatgtcagtcgagccagctcctttgaggttctgatcgtacgaaaagaaaaaagggaagaagatgaaacggacaacgtatcaaacccttccatacttgactccaagtcatgtaacctttggcggatgatatgtcgagatgatcaatgatatgatgaagtaaaaagaagaggggaggatcagagcgaaaagatccaaatgacctttctctggcatatttatcagtagtctgtctgtcggttgactattcagccggtcagtgaatcaacgaaccaacgggggaaagagatcagaaacaagaagcaatcagcaggtaagaaagttctcgtccatccgtgtcagttgatttcgtgcatgtcaacatgatagacaggttccaaagattgaagaaaagaaaaatgaagatcgagagtatatcttgctagaccgagactgggtcagttccaagatgcctgttgttcgtctgtttctttagaacgaccctatcctcgagttgaaaaagtttcttctcctccccactcagagcgcgtgtggtttgttctgtagccactctgcgatcagagatacgtgcacactggagcgacccaagaaagggaatgatttttttaagggggaaattattcttatttattttacgacaaagccgatgcatcaccggactgtctagctctctccgctctcctctcccttccactctccaaggcctccaatcgctctttctcgaccgactggatcttcgaccatcgggtctcgtcatccggcttgatctgtcgtttaacgaacgagtcgaatgcaaaccgtttcttgagggagattagaccgatcggccgggcgaggatctgatcagccggtcgggtttctgcaggtttcaagataccattaagaagggcggattatcagattcaacaaaaggaacatgttagcgtgaatgatgatagaaagaaattcaaagaggttgacaccctagcctgatgaaaagacaagacgagaaaaagggaaaggaacagaagacgaaccttctaatgggtcatggatcatgatatccgtctttccgattgtgatctgtccgaacggattattacatcgtaccagaacatcatacgtgacaaacattccgataaggaatcaatatgagtagaggaagaaggtgtgaaggagagcagacaaagagggatcaagaaatggatcagtcatttaggtttagcacgacacccctttccctgatccttctctctaacgtccaatgctcaacccaacacgagggcgatgaagaccatacggatatcctgaacacataccttgccggtcttctcgtgtttttgctcaaacagtcttgtcaaagtcctcgtcttgggcgatgcacccgtctttgagataatcccgaatatcgttcccgggttttcagccaatagtttgctgattcgttcaggtgacggccatagttttctcagaaccgaattgggaacgattagaggaggcatggcttctttctagttctgaagttgaaaggcgaacgtggggactgttaagctcgttgaagattggagaggagctggctttgatggacgtaagagaatgaaaggccagaggtcgatcctttggacttctctttagaaagctgtgtaagctaacgaactccttgtttctttcttccgtttctcctccactttgagtgctacaaacgtcttgacgctgaccggatctgcttgtgcttgtttcttaatgtctccatgggttctcatgttcttgttataatggcacgtctgttttgctcaagtggcaacagggtgatttgctcttatttactctgtcttcattttctcaagcctaaacgccattgcttcatcaatccaggacgaaaagattacgcatcgataatccccccgttcagtagctcaaagcaaacacttccaaagaaatcaaagggtaacttagatgttggaagggctgtggagaaggaaaaaaatcaacgaggttcatagtcagcaaaggacaaccaaatcgacagaatgagaaggacacatactaaagcatgatcctgcaggaagctccgaagagtcgagcgggaaggttgactcggaacttggccttgacggcaccagagtttccgtgggatcgggtcactcgtccccagctgtttgtgtcatcagaaaaaaattcaaaaaaacaaaaaaggggccaaaaaaacgccccccagcgagtggttggtaccaaggttttacagcagttggccaactcccagaggaagtaactattggacaaacataactcggatcttagatccgttgatctcccgctgagcacggtagacgtaggcaactcgctttgtatttggggggttagttttagtggaagggatttgggagatcgacgggattaagcacgcgtgatgcaaaggagagaagaagcgaaaagaaggaaaatgataaagctacaaaccttgccgaggtagaactgagcctcctccttagcggcaacaccctcgatctggagcaaactgtgaggacagggaaaaaaaaggcaaaagggtcaggaagggcttgggtaaagaaaggatcatccgtttgacagatatacatacgaggtgttgggtcgggagtttcgctttctgtgagtttgcaagaaagcaagagcaagaagaaaaagatagtctccagtcagtctccgatagcttgtccttcttcacacgaacccaccctcctctctctcttcctctcttgttccacaccgaccgccccctaaatttcatccagccaagagcgaacgaaccctcgcttgtgtccggtgattcgggccttggtgtaaagtcgagtggatcccatgattgctgatcttgaagttgacgaaggtgacgacggcttggagaggaagagaagaaagaaagagagcaagaaaaaaaaaagaaagaccagggaaattttcagggtccgtgcgcagcagtcacagcctcaggcgttacagtcacatctggcgtgtgcatggttacgtgagtccgcgcggaagtcacgtggcgtgttggtatcgttactacgaccggtgtgagaatctagatagctcgaccttcgacatcgtagtccattgtttaatccttgttctaggacgtcgtacttcttgatagtctctgaagaagacagaggaaggccatatttgtttacgcgcacgaatttgttgctggtgatctttcagttcgctcgcttgttctttgggacaagcatccataacgagatcccctatctagattgaaacaagtacaaaagacggactgtatgaaaagcaaaggtaatgacgtccgccacggggtgaagag

SEQ ID NO: 1666 - DNA, 10110 bp, Xanthophyllomyces dendrorhous
aaaaaaaaaaaagaaaagtagagataaagaggaaagaccctgttggaaagaagagaaaggatgaaagaaacacaagacgacgtatgtagatgcgcaaagagtgctgatgatggtaaccaagaaagataacggagaacacattaaaccactaagaccagccagacacacaaagaagaaaaatgtttgttcagcaagaaaagtcgaaatcgtcgcaaacaactgcagtataatgaaatataggaaactcacagaggatcgagttaatgcatccatcgttctccgggttgtttgttatctgagcatactttccccctgtgagattcatcagaaccgagacgcgtcagaaaatcgcccgcacgcacgatccatcactacctttcaagaagaagaaaaaacaagaaaggacgcacaaacaacctttccaccagtggtaaccaaaccgagctcagacacgttgacctcgatgatcgttcctttagtcatgactccaagctgggtatacatcggagactgagggttcttcttgacaccgagaatagcgagctggaaggtagccttcaagtcggggtgcgtcacgttggccttcttgtatcgaagagccataggtcggacgaatcgctccatcttcacgggctttcgagtgaaaccctcaccgacaaaggtagccttggataccattcgcttccactgcttggtcttggactttccggacttgagaaccttgaacatctcatcctccgcaattcctcggactgtaagttgtgagatgaggagatgaaaagtcgatcagaacctcgagcattctttccatctgcacatgtatgcgcgcacgcgtgcgttcgctccctctctatctctgtttccttactcacccttaggaagaggaaccgagtacttggcggccttgtcctttcgtcgctctttcacagcagatgacaacgatttggcgtcctagaaggattattcacgagacatcacaagccaaccaagaatcagacgataccaaaggttaagtaacgtaaatcgtgtctcctcttgatcaccactcgctactcgctactcccaaatgcctggaaatcagacgaatcagactaaccttctgaccctctcgatccaacaaataggtgggcaaagctccttccggcacagcaccctcgtccttctgcttgacgtttcgctcgtcgtgagccttgagcgtcttcttcatctggaccttctcagagtgtcgcttggcgtggtggagcttggccttcagaccgtgaagcttctgggtgtactgggacgacttgtggacttgacgagcctctctctttcgacttttttatttatttgttcatatcgaaggagggccagaaggaagatcgagagtatggaagaagaatgatgtataatcaagagaccaagaatgatgagccaaggttcgatgatgcgatagcttgattacaaaatactcacgttcgctcctcgtgctgtaaatcggtggaagacgagaatatcaagacgaatgaggacgcggatcagaaacacagagaaacagtcaagtggatagcttacatccatctgacgaccatgtctgattgagaaggcaaccaaagaaagagcgaagaaagatgatacagctatcaggcccagttctcagacaaaacaaaaaggtctacacaagtggagtcgagacttaccgcttgatggactcttcgatgtactcgttctgtcaacacagtaatcgcgtcaagagaaagaggaaaatgggtaaaattgattagcgtgaaatacttttaccttactgttccagtacaaacagttcaagacagaagggagaagtatcaatcgtcacctgaggctgttagacggaaagaaaaggaaagtcgggccaaggtgtagaggataaaggcaagcattgtcagtctagctctacagatctgagaatttgacaagagcagtctcaagaacagcattctcaatagaacatgctatgagtttatgctccaagatcaatcgacataccatattagattctgtacagggtagggtatgtcgagttggttgtgtgtatgtgtgctgatatgagtgtgcacgagtttaaagagaaaagataatttacactgggtggggagcttgccacacacgtgcctttgctagctgtgtaatgatgactaatctagccacgcgcccagtccttacttcctcctgccttgtctttcacccgaacattctcctccctcttttagaacacactcctttttagacgactctcctctttgctctctttgctcttcttgctctctccctaggtctctaaaaagagagaaataaagaaacctttccttcttccttcttcgctttcactttgacagttaaagccgataatctccagtcactctctccttttctctccctcaacttcttccgccctctgcctcgccttgcctctttttagagccttgaacgcatcgcctcttcaagctctcttctgtcgttttcccctcaaaaactctatcagaaacacgagagcatacacatattatatcaccatcagaattttccggatagtaagttctctcgttatagtagagttcgttagttcagcaggatggcttgctagatcgcctcagaagtggcttcacagtctgtatcgcagctttgtttatttttgggaatacacactggcttcaacccatcatttatatccacttgcaacttgcttctagctctgcaagtctctgcatcatgtcgaatatgatcacctgacgaccctgttctatcatcctgcctctagtgttaagcaccatcgctcattcccttgtcgctctcgccagtgcctcactcgcctcggctgcgttggatctatcgtgagtctccagaggaatcttcttcaaccatccaccactatagtctctgactcctcgcgacttgcattttcccctttctttccttcgacacgacaccactcttcttcttcgtaggtccagtcataacgtcacgtcactcttcggtgaatggtcgactggatccggaggtgtcggaactggtctcgggttcgcgaaccctttgacgtacacattcaactacccggcaactacaggcgttgccctatccttgtatgtagtttctcttttcttccttttaaaaacagaaactgttcgaatcatcaactatcgaaactgacgtactttgatggtcgcaatggggattaagcacgaatgatggatactatgaggaagcgcagtatcggatcaatgccaatggtacgtaacgttctgttgttgttgtttttcctcatacggatagattttgctcatcatgacacgctgtcttccgctcatgtctatctttgcacatcagcttctcttcctaattgtggtacgtctccttttaaagagagagacagaaaatgtttttgatatctcatgtgttctgacaatttggaacttgaattcttaccgcatcctctttcagccgaagcggtatgtacttttctttccgaactcagtttctcatctcattgccgccgaaacagatcgacctaaacctatttctttcttccttatggaactcaggtcgtcatctttactcatggagtttacgacatgaacgccaacggatctctcattctctcgccgtttagtggagacggtcgaatccaggtccagaacccttgctccgctgtaacaaatgtcatcacgacctacaaccagactgttcgtctactttcccttcttgtttaccgagtgcttgtcaattgacacgcccgttccattatcgttagacgatgtacgccgcctggagtatcaaggtggacacattcaagcataactacgcccttcatctgacccggtttgacggagcatccttaccgccaatgtatctcaaggctcgaccgcccaacatgctgcctaccgtcgcgctgtctggttacggagaggactctgccagtgtctaaaactcttggctttcctctgcttgtctatctactctcacctttatcctcttctctttctgccctctttcataccattaaaggaaatttcttagaatctgctctggccgttgatcccccattcttattttcaacccctcttttcttgcatctcttatctttccccctttctcttcttcttctatcgccactcacgctttttacctttgacatatcccccattttctgctctgatttgtcttctttcttccttttttttcgtgtgtcatctatctctgatgatttctcttttcttttccaacgcgctgcgcgattgttcttctttctcttgtttcgcgctttcccaaggactctccactttttctattactgttcccagacactctctataacatcttctttcctacacacgacgatcaatctcgttgtgttctttcgagcactcgatgctttgttgctctcgaatggaatgaaaagcaagtctgatgggatgatacacagacacgcgagatggactcgaaagagaagaaaaaatcaagttcgcccgatagaacccacactgacatatcgttggtcgtgatagaccaacggtaagcccaaacttgatccgttatgttcggacgctccttctgctgccgatggggaagaggaaggtgacggtactgatgctgatgctggtatcgacgacgaggagagcgccgacagggaaggtgatgaagcagacagaccgtcacaatcctccatcctgatcacctcggccacgtacagctcactcgatgcctccccgcctcccagcttttcgtccagctcgtgctctccttcaggattgatcgatcgagagagactaccgagatcccaacctacttctgataggccggctctcgaaagtttgaccgaaccgagcacacgacaagagatcgcaccgacgcaaccttggaggatagggatcccttcgagggatagcttgtgtttatgaatgttgaacgggttcgggaccatcgggccacctgggctttggccaagttttgacggatccggagggcttggaagagctttggcgaaggaagatgccaaatctgtttgagaggaagatagataatgaaggataatgtttggtttcgtgtttgatagttctattgattctgctactgctgctgctgctgctgctgctgctgttgttgacgacggtgtagtcgagtccggattagaggccgaaggagtaacgatcggatcgagggcagaagccaacctcgaaggtaacctgatcgagaaagccaccaaaggtaatggtgccaatgcgatagatgtcaagctagaaagtgtggctccatgaaagtgaggactgggatgtgataccgagacagtcgctattgagactggctaagaatgagggtaaggaagaggagaggagagtttcagatgaacaagaaaatgagcaaacgacgaaaaagagaaaggaacgagccaagcaaaaaggaaagcctcacttgaggaacacgtctcataagaccttttaaggaagctgcgaggctcattggattgcgcaagatgtctctcggtcaacgaacgaggtgaaaggtgttgatatatgtatgtgtgtgcttaggttgaagttgagtttaaggaaaatattaaagtgttgaaacaattccgtcactactttagatactccttattcccaaattattatcaatccgtccatacgcttgacgctcagcatccgacacacatatacccgactggcggctatgtcgacattcaggacatcatacaatacattcatacccttaaaccgaacatcttcattcaaaaccacttatagacatcttctcagaacggcggctcttcatcaagacgctttcgttgggttggtctattcgtctcgacgatctctttccttctgcttggccttgcagctttcgcgtattcctaagaagcgcggtctgctatagttgacccttggctgagaccagcgtttgttctctatcattgcttcttcatttatgtcagatccttcttcaaaaagaagtggagaatacgattccggtcgtggctcgagagaacggcttcacgtgaggacgatatcgaggctcgactggcaggcgctcgaaaggtatgttcccttcacactctatcttccacttcgctctttctgctcatcccatcatgctcacgctctgataagtatcgtatcttgggcgttaggaacttcgacgactccaaagagctgtatctggtcatccaaggttgtattcctggtccattgacgcggcatacggactttgtgggtctgcccgacatgatgtctctcgcgtaggttcatttatttagttatttctagtttgtctttttcctcgccttaaaggagaatgtgaggatgtaaaaggaagtatttttgatctggtttgcaagtgcatctcacaaacagccctttattgacccaggagtgttaaatccgggtattccctcgagatcaccgttgcctccgccgatagatccttcggatccaagcacagtcgtaccgacatactctccttgtttagtatctattctgacatcgtcgacaaagatcttcagggacaaatcgatcagcccgatgtggttggcttttccaccgacgctgcctgacaacgcgaaacctggcgatcctgaactggccaacaggctgttcttagcaccgataagagaagtcagattgaggagggaacatttcagagaaatcaccgtgggcaagaccagtcgacttccgatcacccggtttccgctcgtcgttcgtgttgtgggtgtgccgccagtgtcagccgcagacggagaaacggaagacggagtggtcgagagagaattaagaaggttgggaatcgaatggtcgttctatagggacggtggtagggaaaaggtattgcattggttagagttgagagcagggaaggatgtcaagcgtggaaaccttgctccgaagaaggaacctatcagatctcttgatttgactcttccaatacctaccgcaccccgccgaccgacaccagcggtatcagcctcgagatcaagctcttcggttggacgtataccagcatcaagatcaaagaagaatcctggcttgccggccgaccaccgactgctataccaagatttactcttcaacctgccaatcttgactgtcgatctctctcggatggattcccctgcgtggttccaaccatcgatttctccatactctaaacgaggagcctatctgttccgtccgacgagcacggatgatatcgggtggcttcgaccggctgaaccgacggcgaagaaggagccacccggcaagctgagtaggacggaggaagagcaggcggagtttatggcgaagaagcaggaatacgtcgattggaaattaaagatgacgccgcaggagagatactggcatgagattgggcagtggatagagagggacaagcagttggaccaggaggaaatcagattggttgcagagtgggaagcagaacaggagcgcacgaagctagagatccaacagagaaaggtagctagggcgttggagagggcgaaattagcttgaaacgaacgagacctgcatctatatctatgttggtctatgttctgatgcgaaacgacttgaaacgaatggacatcgtatatcctgctccatcaatgatcccctctttctggtgcttgacccaaacgtaggaaggtattgaggggagtgaaagagagagtgagagtcacgtggttgtgaccgagcttgaccccaaattgcgcccataaagtgtttacagcctgcccaaatatgggcaacccttactgactaagccaagaacgaccaagaaagcctgtgctcttccagaaggcacgcacacgttcgttggggtgtaagaattgtggcaccgccggcggcggcacagggcatagcggcaaatgctcgagcacagcttttgccccatggcgagtcagtctatcagtcaacgctgtcaacagccctgtcaatttcttcagttctctttcctgtcagctcaagatagcatacacccatcagcatatacccgtccttctgtaccttataggatggaaacacttccacctctaagcataaaacaccatgcgacagtcgaccagatggtggactgcaagaacaacgcgcagaacagagagcaggtagagaacgagaaactccaggcgctgctcagagaagcttttaggccttgtagtgaggaagagcagagttggaatcaggtcagtagctttctatgttgctcttcttttctctcgttctctatctcgttcttcttgttcttcttgagcgtaaatgttggaggatcataggcatgagacgttatctggtacatctacaaccttgtgtgtgtatatacctgcgtgcgtgcgtgtgtgtgtgtgtgtgtccgtcctatctcctgctatccacagctctggtcggttggggttactagcgaacgtttccatgccgtcatcgagtttcgttgccgctcgctatctctatcctattccctgcaaactgtgcctgatatcaatagattccccatccaaagcacaagcactccggatctgatactcatctgatcttcctctactttcttcacagctctcgtcagaactgatctcgccagagacaacgacagctcttcaactaggccaggcgtctgcctacggcgcgcttagatcttatctaatggacgagtacaacctcctcggcggcggctggctgttcattagaccgagaagggggaacggtggtcaggaagtattgaactgttgtgttcggtcagcccaagactcgctgttcaccctgctctctagagcgcggtctatgttgaaggatggtgattactcagctgccaaagagattgccagacgatccattatcagagctcttgtcaggctgggtgacctaccgtacgatcatgccgagcagggcacaagtaccagaaaggtctggctcgctcaagacgaggtaggtctcttctttcttgttcgctactcatgttcattcctttctaaaaacatcaccgacctctttactttgtattctcatctatctcgctcgttttagggctccatactggagttacctcatctggcaccagcgtattcaccccctatgatcgaccaaacatctaaggagctcggtcaaactatcaaccttcctccctcccctcgagcatcgcctttacctttgccccagttatctcctacggccgtcattcgctccgcctcttcctcttcttactcatctgccaatccgaccttccgacaggacccaccacctcataccccattggactctccgttgctccagccggtcgactcggtcatcgggataggaatcggtctcgctggtttaaattcggccgtcggcctcagattcagagatgacgaagggagcagtgatgaagaagaggaagacgttgagggaagtagctcggggagtatcacaccgacgttaatgaacgtcggacttccttctctttgtcactgatatctcaacctatctcctttcctgcttctttctctttcgtttcggtttctttttttgctcctgtctagctttgtccttgatttatcttcagaacgcttctcaactgttgcctgtactctcctcttactccttgtcctgcttcctctcgatcttctttgctcgcctctccttcttttatgaaacctatcttccctcctttaatcggtaccctttcttgcagccgaacgatatgactggtgttttttctggccgcctttctccctcgctcctttcgcttttagatctgtttatgacgttgaactttcctttcttccactccatgccgtccatcctatcatgacttataaacgcaatagatcttagagaaactcccttctttctttttatccccccccccttcgtcccacacgtccccttatctttcctcactcatgtccttttccttcatccataagtctcttttgtttccggctctcttctgttgttgtctccaatcacatccatgtccatcttcttttatccaatgagaatctcgatcgttcaacttggaacgtttccgattgaatagcgcatatcgagcacatgtaggaagatcgagagaaaggccaaacgagggaaagataacaagaaagccataaatagacaaggggaaagataagagatttcctatatccccccc

SEQ ID NO: 1667 - DNA, 23685 bp, Xanthophyllomyces dendrorhous
atccccccctcacccttccctctctcaagaaaaagaaaaagaaaattcgaaaaagaaaatcaaagtaggaatagaacgaaggaggatgccgtatatgcgggtggatggacgcagatagaatatagatataaacgtttatataggatctaatttgaaaaagaagatagaaagctcgagagttctggaagaagaatggtgacgataaaatacaactgagcaggctgaacgagaaagaaaaggagaggattgagtaaagaaaacagagtctacaacattgtgagaaggagcatatacggttccgtacgagtatatacagagaaagaagaaagaaaaaggaaaaaaaaggaaaggaaaaaaacgtatcggaatgaatgagagaaagatcacggtgtatgaattgacgaaagacgccttgcccatagatgaggaagaataagaaagagaaagaaaggacagaagatgaaaacgaaattcatccaagtttcatcccgctaagcccagcttcatcatcctcccatgttccgaaaccagacacactagacctcctaccttccctctccctggccaacaaactcgttcccagcccgggtcctgcgtaacctggcgcgctccctcccagagacctcgctgtccctccaccggcgctcgaagaaagaatttgagaatgcatcggcaagggggaaccgtgcctcgaagatgcggtgtagtatgtcagcgatatcgggatcggttgggtctggctttgagattgagattgagattgaggattcgggtgaaaagccgaaagggatggcaccggagattgttgaaggaaggaaggtgtgttggtgtatgacgaagaagtaggtggaggtagcaatgtggtggatggtgagacggctcgtcgtttgaacgccaacgaagaagcgtatggatcgaatcgcttaaggaagaagagattaataatgtcgtcagtccgacagttacaacaacggcaacaagaccgtgtgagggatagcataagaaaacgaaatgaatcgaggtcttacctcgtcaatggcgactttccgctttttccctccactctccctccaccccatacctgcacttcctggtgtcaccggtcttaccccgaatccagaccctggaatcgagctagacatcgaccctccgccgatacttccagaaccactacagctcccgcttcgtctcctcggacttcccatcacagggctcgacccaacaaccatcatgcctgtgtctccttctccatcgccaattacgtgtgtgtttgttttggaaggggatctgcccgaagggttaatcatcatcggtgtgactgacaatttggcgagccctagctgctggtgttggccggaaggtctgttgtcggacgtgaacgtctgatggggaagcgccggtgactggctagtttgcccgaacgaagaagaaccgccaaacaaacttgccggatcgaccggagagtctgtggtcgagatctcgtcttccatgcaaagatcatcatcctcactcgtatcctcctcgctcaaagggtctcggtcaaacaagtcgccttcgtcctctggaaatcgatttcgaccacccgcaaagaacggtctgaatcgattgccaggcccgactctgtgtcctccaccgccgatggacgagggtccacctgagagtgaggatcgggatcggaacggtgtgggtgaagaggaatgggaagtgagaagtcgttggatctgagcttcagaacgaatctcggaagtagacgggttggattcggtcgagagcaactttgcggtcaatgtgtgggcgatatgcttcggctgtaaggttgatgttatattaatcatatggtccagacaatcccccaatgatgaaaacagcagaaagaggagtgaatgtcagaatctctagtctcagacacacgcaaaagggaagggaagaaacgaacatagagactaccccttctggtgactgctctgatgcttgcttccgtcttgccctcttcagccccgttcgggtttaataccggaatcccaggcgggctattacttcttagtctacctttggtcgaagaaggtgacaacatggctgtcgactcagctgagagaggtcttgagctatcttgagcctgggcccatatcgatggactgtctgttcggtcggatccttctccgtcaggtcccccaactcttgatgagccagggtgagaggccgcggaggttgacgagccaatggattggaaggggagtggatacgaacgcacagacggttggagtgtcccgaatgaagacgccgacggagttggaccaaacgagaaaacacctggctgattgatgataggagaaccttcaccaggggaagatgtcaggagtgatgaaccggccgaggaggggaacctgggtgtcggtcggttttggggtaatcgattgatgatccgaagatgatcatcgtgcgcatggttattgagtgatagtgtggagctctttcttgtatgtttcttgggatgaaacagtggatatccctccagactttcattcatcgccaccgtcgatggaccggtagacgaggaggacgaagaggatggaaaggaaggagacccatgatgggcggaaacagtaggccacgtggataggttcggcttgacggttgagctgtgaatccctgacaacctcactggaggtagtttaaaatctgcaaacgaagaaggaaaccgaacgggtggaggtgacgatgtcgatgaggctggtgttggtatctgaaggggcgaggcatgggtcgtcaacgggctggactctatcgaactggattgagtgggaatgtcgtgcatggcataatcggagggacctagcggggtgtgggtcatccgtcagaacactcttctgctttcttcctatccgtttctgcagtatactttctcttctttattcgacagaggacagcaacgaagtgggctgagcgttcgagggtgctcttgaggaagaaacaagtgaggttgaacgaacgagagcagcttataaatcgatgcaaggtgggtggatgaacaatagaaagaaaaaagataaagggttttttgttgtgtcggcttcattatgaaggttgccagcattccatgacaagagcctcaaatgttctctccatactagcttctggccaacagacatcaagacagacatcgctctgctgcttatagataacagagaacggtatacagtgggaaagaatacatggatcgatatgggttatcaacattccttctttgttaaagcttgccctttgtttcttcgtccttccttagagtcgccagcaaatcatctccgtcgaccaagacacaccaccctccctctccgcgctttccttcaacgcctgggccggtccatctgcctgtccaccactcgtctgacttgaggaggttcatgacaggctcatcgtatgttcccggttgcaagaatactgaatgaatgccgaccgactgggcttccttcaagatggacagcgtcactgctggaggcgtgacaatcgagagagaggtttcttttgggaacgttagttgggagacagaggccaaagtcttgtgtggagaagtcggaaacgtggttttgatctcaggatggggtgagattggggtcaccggcagggatcggctgagataccacacaaatacttggaaccgacgaatgagacaaacagaatccagagatttgagattgtcagcgttggatattatagacatgtatcgggtgaacctttggatataaaagatgtgtgagtacttttgtgtccgaatcgctttggttcagagttagcctgtggcaacgaacgtcaacggaatgtcacagaggagagagaagagtaagcacgcgctctcctcgatggatgggcaacacacagctggtacaggacgtacgccagctacagcatagtattttgcggtgaagaatcttttagcagcaccagtttccatcttgccaagatgattagtttgttcgttctggcagaagtagggggatgacttcaacgatggtgatgatgagcaaaaggaaaggtgaaagtcgagtgaaggtgcgatgaaggtgaaggtgaaggtgataagagcaagatatctaacaagcaaacctacggcctcagatcagtcttttggactataatacatgatgagcctctagcattcgctcgctctcttgaatgccttgagagctgatggtgtatataacattcgatatgtgtacgtcaagaaagagaacgagcgatgtgattccttctttggacaagcaggcaggcaagaaagcatacaccaaagcagccagggaatcggatcaaacccaaccaaaccaaatccacaacaagaccaccgacgaaccaagaacaccacagtcagactaccatctcgttgtgaacccatttatacacacacagagtgcaacccagagctcacaatccaagagctcacaccccaagagtgagtgagaactctggaggaagctcacccgtcggtctagtccgagcgagagtggggagagggttagtaaccgcagtcacgacacgtgacagcatagcttcctgccccacccgtaaccaaaccaacaacggcaagtttcccaaatttacaatgctcttctccaaatccccttctccttcccaccctgaccactcccttccctccggcctctacaaacccctacagcctcaaccgcctaacgatgccagctccatcaaagagacctctctccggagcatcagcccaggcggccaaaaaatctaaaaatagcgccacaaagtcaacagcgtccaagaaggagagcgcggttgaatcaaagcgaaaggtgcctctgactgctccgacaggaaagtccacgctcgaggaggaggaggaagagtttgacgaggaggattgggaggatgatgctatcggtggtttcgaagtcgacggagaggatggagagggtgatgatgatgatgtagatatcgagggtgagaacgatcaggaaggagaaggagaaggagaagggtcagatcaaccgaagcagccaaaggatcttgatggttcgtttcgttctttctcgtgattctccatcgtcctcgctcatagcctttcttacttttctacgtatcaattagccatccgacaggctcgacaagctcagaaagttgatcgacaggctcgacgagctgccaagccgaacgctcaggtgctccaagagtcaaagtcgttgtgggcaaagttgaaccgaaaggaaggagtgtctaagaaggagagggaagagaccctcaaggagctcatgactctccttgaaggtcgactcggcgcggtcgtcggaaagcacgatggagggcgagttgtccaaagtgtatgttttgtttctgtattctctttttccatcaattcttctgatctgatcttggaatcgagaatttctttcttggatcttttctgtctgacttgcgacacagattgtcaagcacggaggaaaggcagatagagaaaaggtggcgttggagcttaaaggaaagtttgtcgaactcgttcaggcaaagtattccaaagtgtgtatcgtctcaactctggctcgccatgaacggtttcttccgtgaaaacattgtctatcatagaatgactcactttggtccatgtttgcatacttcatttgaattcataaagtttcttgtcctcaagttgatccgactctgccctccggctcgaacgatcatcctttcggaacttactcctcatattccccgactgatcgctcatcgagaggcgtccggtttgatcgaagacgcttacgcgctctggtgtaccgcgaaggaacgaacggcaatgatgaaacagttctgggggaaagagaccttgttctcaaaagaggaggaaggcaaaggaatcgatagtttcatcgagaccgagcaggacgaggcgaggagagctagggtggccgatgggttcaagtcgcatctgaacaacgtgtttgataacccggagaagggagcaatccaacactcgattatccatcgattgatcagagactacatgacgttgtgcacttcgttgtcggacaacgagaagcgacgagccgatctattcgagtcgtgagttgagatgttttcctcttttcctttctctctctattcgttcagggagctcggttcactgacctatcaacactccatgatgataaatcaagcttccacgaactcatgccagagatcgtccacaccagggatggcgcgttcgtcgttcgagatttccttgctaccaccggaccgaaagaccgaaagactatcgtcagggtcttccgaccgcatgtccagaagatggctgaagatcctgatgctcagaccgtcttgttcacgatgtttgatgtgatcgagtgagtctcttcttttctgttttaattctccctctatctctctctctctctctcttgtttcttctgctcttgaaatcgaaggatactgatagattcatcactcttttgtgacatcgcagtgataccaagttggttggaaaatcgatcattggtgaatttgactttgccgaactcttcactgccaaactcggtcgtcgaatcccattatatctcttgaaccctcgatcgaaacgacatttcattcctgcaacgaaccaactattggcataccacgatgaagcccgatcaaagacatctaagaaggactcggaagtcagaatcgaagagttaaggaagacggtcagcccgagtttgatcaaggttttggaggatgacacagagggtgaactcttgagagatgcgggtgcttgtttgttgatcgcagaggtcatgctctacgcttccggtggttcgtatcactctgcttctcgttcctgccgttatcttgtaacacccgtgctgacgaatcttgcaccacacgttttgcacgaaaacaaaatcaattcacaaactctcgcgcgcgcacgcacgcacacacacacacacacacacatatacacacacgtacagacaaattaagcgtgatcccctcattactcgctcctctccaaaccccgtacaagccgtctcactcgatggaccctgacccatcaaacccatctgttcacacgatcgacctatcccccgcttcccgtctgtacaaactcctcctccaagccggtcacttcaaccaaacgaccaagcaaatcgatctcgttccttccttcgtccctaccgccaatgagtttgctgtgtccttctggaagacttcggtcgaggccggaacgctggtcgacatcgcgtgtggaggaggcgcgttcgtcgttgcagagttgatcgagcgattgaaggtcaccggtggaaaggaagcaggcgaggtgaagaaggtgtttggaaaggaggtggtgagtaggttggacaagtcgggggcaaagggaagcaaggtcttgatggaaaagatcgccagtgcttaaaggaggagcagtattttcttgtttctaaaaatgacattatcgtcattcttttgcacgcgtgtgtgaatctatttctctctctgacatggaaaacgaagcacatggtagggatacctgatgctaagaaaaggaaaactagagggagaaaggaataaaaggaaaaccaaagaatacatgaatgagagaaagaggaaagaaaaaacaagcgattaaattccttttttttcctctttctactatccttgtgcaccatcagccaggtctgagaatctataaaggaaccattcgatcgtctactacaacaactttcatcaagccaccttgaaaacctgaaaagcaaagagaagagaagaaaccgtcatatagaaacattccaaactgtgaggaaaggaggagaggggcaagaatattccaatttggagacgatgtaatttttgtgggccagatacattaaagcgtgaaatcattaaagggttctagagctaaaggagataagattctcaagccatatcaaggacgactcgggcggcgagagtgaggttggacatcttgtcgaacgtctcggcaagcctgtcgatcggctcgacgacgaagtgagtcttgacagcacctctggcggccatgtcgagagcctcaacagagtcctgtcggtttccgacgtaagaaccaatgatcctgtgctcgttgacgaccgaattgaagatgttggcctggacacaggcgtccttgggaagaccgacggcgacgaggacacctcgtggtcggaggtactcgagagcttggttgtaagcagccgctccactggcgacgcagacggaagcgtgggcaccaccgttggtggtgtcgacaatagacttgacgacatcctccttcatgtagtcaacaaagacctcggcaccgaaagacttgacgagcttcctcttctcctctccagagtcgattccgatgactttgtagcccatggcgtgggcgaactggacggcgaggtgaccaagtcctccaccggcaccggggataaccacgttctctccggggctaccctcgatcatcttgagagccttgtacacggtcacaccggcacagcagatgggagcagccagctcgagagggaggttcctcgggatcggggtaacgtgggcagcgtaagagacggcccactgctggaaggaaccatcaacggtgaaaccgtgaacggcagcccgcttgcagacggactcgtagccctttcggcactcttcacagctcaagcaagagttggcgagccactgtgatagtaagatgagaggatatcagcttaggagatgggcgcaagatgatatggaaagaaaggagaaaaccagtaaaaccaaccttgattccgactgggtcaccgatcttgaggtcggtctgggtgttatcggcgatggcggcgacgtaaccggcaccttcgtgtccaccaacgagtggaagcttgttggcgctcggccagtcacccttccacacgtggagatcagtgtctgtgaaagaaaccgagaaagaagggtcaatcgaggcggatgagagtgagacaaataaggagaaaaggacgtacggcagacaccagagtaggcgattcggacgaggacctgtccaggctggaggtccttgggctgagtgacgggccagtcggttcggagctggagactggattggggttaggaatggattgaattagcttcagttgagagcgaacggaagagagtgaaggatgaacatacgggccgttgttctcctcaaagacccaagccttctgggtcactgtagagagggagagggagaagaagactgtgagcaaaacggacgaaaataggcgaaagcaaagacactaaaactcacaagggatctcgtaggaagattgggaagtaacagtggacattgtggggttcagatgatgtgttgttggttggttggttgaataggatctctgtgagagtaagctaggagtgatgctgaggcttgataggatgggatgtttgtatggtgagggaaagaaaggaaagtgagattgagatcgagacaccacctgctttatatggttcatttcagtctccgttctgtgatgacgatctgccccggacgatacggaagtggaggaagagaaagaacgttggatcctccgtgagcgagcagacggaaaagggaaacattaaataaaccagtcttctgcctatcgctcgaaagaaaggacattgtcaggaatcaatcggattccttcccggacaaatttcccacgggaaacccctggaagaacagaggccgtaaggatcagcacacaagcacctaccacagactggaacaaagattgacagaagatgtcggaaaccggacgtttctgaggagcccctcgatgggaagaaaaacgaggcaatgagagaaagacgaagaagaagatggaacagccggcgaagaaagagttccgtcatcttccacctcgttagtccggatagcagtttcagcggcaccggtaatctatcagcgtcagctcgttagcatcagtcttatcagtctcagctctgatctccagatattactatcactctagagtcaatctcaaaccccaatccccagcccttggtcctcagcctctgacgtgaacagcaagagttgtccatcccaagatgttttctctgccatcgtcgttgttcctctctcttccgaacggcccggaaaaaaacactcggcatccgtttgcgccgggccgaaatgacgtggctgctgcgcgtgaaggctactgcgcgttatcaagctgactaatcgagttcgttgaccctatcactctgtgaatccatagtcatctatctcctcgtctggttgcttcagaatgtcgccttctcttggatcctccgttcttatacggtcgactttcttttctttaccttttctgcgattgcactattgcgatggggtgtttgtgtgtatgatctacctgtaccatgtatctgcccttgtttcttcttcttttctctctctctctctcttttttccacatcggtgaccagtttaccctgttactggtcacatatggttacagaacacaacgcaaggcggatgaaaggatgtggtgagagagagaaaagagagagaagaggttgaatgtgtgctctataccggcctgaagtctgtggacgagcccacagcaccagcgcttgcaatcattctatcgtcttgatctggaaagatacacgactggctttgggacgttgcgctggaccagcatccaaaggattacgtaatgtctcaatcaccctggcaaccgcctcttgaaatttctgattccatccgagccaactctgcacacacacatcgttcaagagtccacaccttcttcctcttgacggattctcccttctagtactcaacacagaggttcccatacgtgtcgaaaagggtctccggtcatggcttcatcttctacgtaagtgttcttgatcgatactttcattctcctgctcagagctcacctcggtcaccatcgtttttcctattcacctgccgtgcccttgctctatatacatacgcacacacacacatgaatacatacagagcacagtactacgttgtcaacggagcaccaggccagtcatccattccggcttggctgacccaacggtcaaagaacaagaagggcgcaaaaaggacaaaagtccaaaggacactcggccatgttgaattgatccaacatttcgaattcccagaggcttccctcaagatcaggaccacaccagacggtcatcacgccatggccacaggggtgtacaaaccccaggtgagggtgtatgatctggaccagctgaccatgaagtttgagagacatacagatcaggagaacgtagactttcaggtcggtctctgttcttttctacgttgctttcatacggttcccagaatctgaacttgtctctatgccccctctctctccatatcttatttctcaatataaacctcttttatccactcgctcatactcggtctcttctccagatcctctctcaagattggacaaagtcaattcatcttcagagcgatcgacatatcgatcttcatacccaaggtggtcttcaccaccgaacgcgaattccccacttcggtcgagcgctcgcctaccacgcctcgacatgtgacgccttggtaggcgcaaccggtcggtcggtctaccgattgaacctcgaaaaaggttcgttcctcaacccactcgagatgcaacccggcacagatggtgtcaacgcggtcgacatcaaccctcggcatggtctctgggcgttcggaacagaacgaggagcagagggtggttgcgtcgagttctttgatccgagggcgagagagcgaatcgggatcctcagcttgccgtcccaacaactccgaccactttcttccatcggcggtcaaatagtctcagagtttgacttcactccactcgctgtcacctcgctcgcctcaaagtctgacggtttgaaccttgcagtcggcacgtctaccggtcacaccctactctacgatcttagatcacctactgcttatgccatcaaagatcaaggttacggcttgcctgtgaagaaggttcagtggttggaaggcggtaatcgagtcgtcaaggatggcctaatcgctagtgcagacgcaaagattctcaaaatctgggacagacaagatgtcggttatctttcttctttaccttccaagtggttgcgcctatcctggataaaaaaaaactcacctttgttgatctgtttcctctttccttttctctttctcttctctttcttcacctcttcctcctccctctcagccggcaacgaacttcgcatcgctccaaccaccgacgaatttgaacgatttccatcacctgcctggctcgggtatgatcatggtcgccaacgagggtgtccacatgacgacgtactatgtgcctcaactaggtcctgctccgaaatggtgcagcttcttggacaacgttacggaagaaatggaagaccaccaaggtggtggactgtcaaactatcaggatttcaagtttatcgaaagatcagagctggctacgttggtcctttttctcttcctcctcttccaccttaaccgacttttcgcttactcaaacttctttcctcttgggacagtctcggattggaccacctcgtcggcacaccaacactcaaaccatacatgcatggatactttgtctctctcaaattatacgacgccgcccgtcttatcgccaatccatttgcctatgccgaacaccgagagaaagtcatccgggagaagctcgaaaagaagtcggagtccaggatcagagcgcgaagggaggcggtcgatgtcaaagtcaacaaggaactggccgagaaaatcaagagggacgaagagactcgtcggtcaaaggcgaagaatggggaacagcaggacgaaggattggaaggaccaggagagagcgttctcacagatcctaggtttgccgccgtttggtcaaatccagagttccaggtcgatatgggtagtagagagtacatgcttaagaatccagtggccgctcctgtcgttcgtttcttgtcttttaccgatctgttttcaccctcaagcctttactaaaatccttccccccctccttcttgctttgtgatttttcaatttttcaatctcatctcaacagaaagcaaagacagctgtggaagaagaagaggatgaatcagatcgtcggtcatccgatcctgacgatgagtctgatgaggactcgagtgaagaagattctgacgctgaaggcggtaagtccctctgtccttccattcttctcttctcttttcctacatcagggacaatcctaaactcatcttgcaatgcctcctctacaaacttttctctcttccgaataaaatcaacctcatagccctctcgacgttcgatcctcgaacccaaccgaaacacgaaaaccccatgtacagaccatctcttaggacccaagccggtcccaaagcccgacttgttacactctcctcttccacctctgccgatccctccccgtcctcttcgagaaacaaatcgaccacgttcggccaacggatcaaagctcaagcccagtccggttcgacatccacgtcaaagggctcgacagagaaagctcttccggaaggagtactttcccatcgaacactcagcggtggaggcatggaaatgtccttcattccttcttcttcctcgtcctccggtcctagcaagaacggaaagaaggcggcagaggggatcatcgatgacgatttcgttgatcccggcaaggccgctcgagaggccgcccgtgagaagaagagaagagggatcgaagagtttggtgctggtatggagaaaggaggaaggtctgacgaagtcgcgctcaaggaagaagaaagacatggtagacagaagagaaggacgggtgggagaaacgctagtggaaatgttttccgtgggctgtggtaagactgtgcatgcatgctttgttcgagagttctttttcttctccttttcttttccctttgtcgtattagtctttcgccatagaaagacgaggcaaaacataaaaattgtattttaaaataagggggtaaaatatacccagagacacctaacaagattgtgctcggaacaatggccaagagaaacgaaaaggacgaagtagaagtagagaacaaggatcaaaagaaggcatcgagcctagtcaattgctggtatacctcctgactcatcctgtacctcaacattccagcaaacatcatcagcgatctcgctttcttcctgtattccgccattttctgtattttcccaagtacaagaataaaaaataagatacaccaacaccgtgcggcgaaaagattggtcgagtcagtaaagagggaccactcgcgggaacgaatccccaacaaccatcaaagagaaaaaataagatatgaactgacactttgtctggcttctcctccatacgaactctccttcaagagctggtgtaacttgaacagacagttcatcgtgaccaccagtacatctgagaagttgtgggcgatcgattcatcaagatccttgaactcgtctgcccgacggttgatcgctgtgatatcggatgtaagcgggaggagtcctatagattctatcgtctgtttttgtttgcagatttggtcgttcgaaaagcaaacaaaacacaagatagactttgacgtaagatgctattcttgatggtaatcaaggggaagtagaagaaggaaaaaggaactcgcctcgagggtcttgtctaggatattttgttcgtacagaccaaaagcgtccttcaacctcaagagaaccttgcaggtctctctgtttcgctcttcgacttttccccattttgtaagatcactctggtagtgatccaagattcctctcgccaagccaccgatgtcttccgctccagccccgaaaccgatacttctcgaaccagcttgaccacccaacgctggatttgtgctctttgaagacgaaggttgggacagcgaagaaccgagcgccttgttcaacacggcaatcaccgtgtcgtagtcctccgccaggttgtacaggatgatcgcgtcggataatcgttgttgagcagaagatctagcggcggcggcttggacgataccgagtaggtacgtccgttcgtctggaatatgcgcaagtttcatatctcgctcgatcactcccggctatcacaaccggatccacaagtggtgatgtttccatcggaatcttaagttcagaaggaatctcgggaaggaaaacagaaacaaaacacgaaggaaggaaaaaggaaaccatccgaaactcaccaccttggttccatcggttctgatgtcccccagaagttcggcgtatcttccactctccaaaacgagttctctgatcatctcatgcgcgagctgaacttgttcttgcccgatcgggctgggcgcatcggctgagagacaaacaaggtagatgtattgtaacgcgccaagaaggtcgttctttgcgaaaggcttgatgtatcgttgaatgagcctagcaaagtttagagccgagggctcgtacgtggacgaatggccgttttgagtcttggtggacactgagagaaaagaatcaccgattcatgtcagcgaagggaatatctactctcgagagaagagaacagcgatagaggaggatgtaagagaaaactcacagagttgagcatcagatgactgcgactttgagggcactcgaaggagaccatagtaagccaggcagatcgcaaactggacggcgtcgacctgatgttgagctttcgagtagaggaacgcgatggcctggatggatgccatagagccggatgtcagtctttgatcctagctcgctcgctctatttgtttgaacgaactgattcatcaaagaaaagggacaaacgaaccttctcgaactctccggtgaacaacaagacctggaaccaaaacaccggtcggtcgcctctcggatcgaaatggccttctccaaactttccgaccaatctggccatctctctgagcccaaagttttccgatccagccatactctcctccgcgaggtcctccctgacaaacgacagttggaaccaaagccagtcctccgtcgtccttgccacagggatgtttttcttgacttcgacccgaccgatgagccggtagagcgcgtgtttgaacggatcggtaggtgaggcatgtctaattcgcacgttgtattctgtgatgaacctttcttgatggatttgtgacagtctatacgttctcgatcgtaaagtcagctcatgggcgggtcgcaaacgaaaaaaagccggcccctatccatcagagaaacgaaaaagagaacaaacacacaccttcgatcgggactatccaaccatcctttgaagaaccctacaaagtacttttcagtcctattgatcccctcttcgttctccaaagccaacctgtaggcttcttgtagatgaccggatcggatgaggtagtagagttgagcccagagcggttgagagtttacgatctgtaaccaagagaagccgaatgcaagaggggtcaaggaagacaagtcgcgagcgaatgtgatcagtcataaatccggacgagttccacaaaagatagacggattctcacctcgatgttatccttccatcgaccttctttgtaatgcatcactctgacgaaccctctgatcgtgtttgccacggaagggacaccgcccaatcctgcctggaccgggtttgatgctactcttttatcgacgtgagcttggaacctggatgcccatcaacaaggagaacaaggccgatcagcccttggaacgtttaccctcctggttctgctcagaacctagctagaggacagaaggaacaaaacgggagaaaaaaaagagaaaaaaaagagaatggagaaactaactgttcttccaagaaccgttttccaccctgaacgatatccttcctaacctgtcttcctaactctccgttctctcctgcgccaaggtaaccaggagcgtacctcctctcacccgcaccaggttcaccctccttaacaatcgatccgatgagtgagaaagcctgggcgagtaaggttgcagtctgatttgatccaccactggtagtaaggctggtgttgacggatgtggcggacgagagggaagaagcatagactttcgccagcgggaaacttgatggagatgttgctgatcgagcgacgtttagctgtctgacaatcgcatcatatttaagcgatcgatgatgggtagccaacgtttgaccgggtgggaggacgttgctgctgccgccgccgcctccggcttgactggcaccaagtaggttaccggaagaagctgacgcagcactactctcgcccagacgacctctcatactcctctcgaacgcgttcccaacaccagacgcattcaactgaccaccaccaaccccgccggcgggggtagaagcaaagagggaggaatcacctgcaccgacttcttcgagaactttttgctttgagaaagaccaagacgaataaagcctttcgtcggccgtccggtgacaggtcgattgaagttgcgcttgagattcagataatgcggttaagatgagttgttctcgagtgtggcggagatatccctgtagtttgtgttcgtgttgatatttccaatcgccaaaggcaaaaaatgaaacaggaagaagatcagccatttctgccccgagacagctttgtcgaccagtcgagcaaggatgaaagaaggagggtagagagagatatatacacgaaacaaacaaacatacatcaacatctccatcaccaagagggatcaatggttcgaacgtcctgcttagtgcagcactcgccgtcgctttctctaccctgtaggtcaggtctgccaggtttagacctgctgtagccagaacatgagctctaaagcacgagcatagaaagacaaagagatagagagagagagagagatgagttagctaaacgtaaagtttcatcttgacaaggggtcttctctccgagaacctcgcaagagacggaatgacctcggaggaaaaaaagaatgagatgattctatcccttgaccaacggaaaacgagaggacgatgaaggaggaagccctccctgagaaggagagaacgacctagatcaaacaagaggagattgagaactcacgccctgccttcttcccagtcatctcgatcagtcaaccgttcgcctctctttcccttcgagaccagccgtctgctttgttcttcgacttgatctagccccaggtacaactgtggtagttcttgattgtccagatgagacgttaatgctcgcgattgagccaacagagaagctaacgttgagctcgaactcattgttacttcttcttgttcttgctttgaagggtggtcgtccgagatgaaggatcagaggttgatgttgagagaaggtgaacggtgggctggaaagaatgagggcgagagattgaactgggttgaagggttgaaggttacgcatgtagatgtaaccagaatgtaaccggcttgctcgtagagacccatcgaaaagaagctctggatacaccatgtttccgcaacataaggaggagagaaagaaggaggaaagaagaagaaaagaggatgatcctacaaccgtttgaagaagggatacgatagagttgaaagaagaagggcagggtagagagggaagggagagaaaggaagagaagaaaagagggcaggaaggtataaactacatgggcagctaacgatgtatatccgtccgtccaaagctgaccggtttcaagatgaaacctagacaagacaaatgaaagaaaaccagagaaaaagattaaaagaacagatataagaaaggggagaagagacaacgacaacgacgtaaaatcacgaaaccaagaatcaaacgttcaacccctcccctgacccagttccttcggccgagcctgtgcctatacccgcccccactgccgctgtatcagtcggaccgattgcaccttgtccggatattgatttctttttgggagctggtgccggagctgtgcccgaagcttgttgtttctttgcgtaccgtagtccacaggcgttgcataacgttttcggaccgagtgggccctacgcacagtggtcatgataagaaaatgaacagggacacgatagaacagaggaaaagggaaagagatgagcaaacatcgagcaaggcaaagataaagttgcaaagagctaggccatacctttctccattcgggagaatccgttcgtccacaggtcacacacacataattatgttcttcctttgactttttgacttttttcggtttcttgagtgaatcttgctgtgccatcgacggttgctgctgttgttgctgttgttgaacagaggggtgttgtgaagaggtgggttgagttgaggtttgaagtgggtgcatcgacgacaggttggactgagattgagaaaccgcctgggatttgttatgagacccatattgttcttgtggctgctgctgctgctgctgggacaaaccggaaggaccgggcccggaagacaaagctgatgtgggtaaacctgagatggagagtcctaacccggcggcgttcttgatagacccgggaccagagctgactgttgatctggctgaatctccaacaggagccatgaacaaatttctaccgagtgcgcttccgccgggtcgttcgacatcagaatcgttatcgtcataggcaccaccgccaataccggaatcatcatagatggacgaatacgatgtcgtgtggttcaattggggttgtcgatggaaggcggcggcggcagcgacggctgcttgaccggggaaggatgttctgccgtatgatgaattgtcagaatctggcaccggaggtgcgctgaattggagaaggatattcggatttggcgaagcttgctggccggatagttcctacaggcaaggcgtggagaacgaggtatgaaggacaaggcgtaagaggaccttcgaggtagagaggactagacaacaaggaaattccacaagagagaaaggctggaggatgaagaaggacctaccaagacttctgctcgtaggcgttcgttgatcatcttctcttctagaaacgagtttaacatctctccgttcttgctcagccattttttgatcatgagaaagaagcacatgcaccggccgtctgtcccggtgctcgacgtgttggacgctgcctgacctggaggtagcgtctgagtgatggatagcggaagctgttggtagagcgacgaaaaggaagaggcgagtgtgagaggaagcgctaggcaacggagtgaatgcagacaaaacgtaccggctctctttcttcctcctctccccagtagccatgtcctctgacttcgagaaggacggtcttcttggtctttctccttctggacatcctcgaccgactgttcgttccgtcggcgctatccggggtgtcttgggcaaagccgagggaaagagagtctgaggaagactctgtagagctggatgactcggctgacgagtttgagccggtggaggacaggtggacgggtgggggtggccgtttgacgaggaatcggtggtagctcgcgaggtctgttctggtgaggattgattgatggagataattgagcagagcggcctggtcttcgtctggaaggggcatgggaatgggtgtatgtgtgaaaaggtcatgtcagtgcggtatccagaggttggctagatcaatcgagagagagagagaccaaccatagacaaagtctgttaacgaccgatccaggatttctgatgcgttgtagcccaagagatcttttacactaggcgaggcaaacaaaatctgttgggaaaaggcaatcgagtaggtaagtataacgatagggagaccaagacgtccggatgttcagctcaaagaaagaagagaaaaagaaagaggatgtggaacgtgcctttgccgatccgtttgagagaggcatgacgacgaggatggtggtatctgtcatttcgttgaccaacaaatttggccatcgtttcctctttgtgaactgggtaggcgagggaagtgaaaggagcacaaagaatagatagagcgagcgagaaggagcgggcaagacgaggtgagcgagagcgacgacaaggacactgggtaagagatgaaatgacttgcctcaaagatagcgttgtcggtggatgaagtacttgtgcttccgaacgaggtcggatgggaggacacagctgtctgaccgttttgaccgttcggaggtctagcgactgatggattcccgatggttgtcgagcttggttgtaattgtggttgatggtgttgttcctgttgttgaagagtgaactgttgttgctgcagactattggcactgcctgcctggacattatacgactgatcggactgatccattcccagtatacgattagaaggtgtgggtgaaggtatgagcaaaggtgtatgctcaacagagaacacagagaatccctagcagattacacggccgtttccgatgggcagggtgagttcgatgagttgccgcttgcttacgtcatgctcgtaaccacgaggctcggaggatatccacgtgtcgtccgcagttcgagcacgtgattttatctttgagaggggggatgcatgtgatgcgcatcatatcgccttcggtctgtactgcgctggaaggagagggtgtgggttggaagctgagcggtagtgttgctgaaggaaagcaggtgtttcattctcagagggagtatatgtttttccagaggagagaaggagagaaggagagaagaaagacagaggacagaagagagcctgtactggtcgaggcagaggaagaggcagagacaaagacaatacaaaacagcactagacaaattcacaggctgactacggaaaaagtctaatgatgacgatcgcacgtgatttggctatacacgtggttacgccatccccagttttctgtccccggcctgtttcttccaaagattcccctgcctcttactatcttccatcctttccatccctttgccagctctgctcgatctcctcagatcgacactcaagcacgaaagagagagagataggcacatacacatagagagagctctagtgagtgtgtgtgagtgtacagctagtgagcgtgtcagaggtgagtgtgtgttggcaatatagggtttggatggatggtccatccatcttgttgaggattcgctaatcggtgcttgcctctcgttctcttatcctcgttctcgctcgctctcgctttctctgcacgtcgtgtacagaaacgaacacagacagtcatcgagtagtcgatcttgtgttctatcctcccttgcgttctctctccttcccttttcggagattttcccacataacgaacaaaagacaagaaaaaaaaaggaatgccaaacacgctctcaccttcgtccaggcaacaaggccaagggattcatacatcccatccctcatccatctcttcatcctctgcatcttcggccaatagcaatcaggcgttcaacattcttgcacccatcgcaagcagacattcagtctatcctaaccagaacgagaccctgctgcctctgccgccgataagtgagaaacagagagcgtcttcggcctcacctccgcctcatcttccatcgcttatccttcagagaccgggaaataatcagtcaacggatctgcctcctatcgcaccactcagatcgctagagttcggacctttcggaaatggcggtggtggcggtggtggcagcagcagcagcaatatcaacaatggaataggcagcaatcacaacggaaactaccctcggcatacctatgctcctagcagcagagattctaccgatggtggctctcagaacggttgttctccgagatcagaatgtaagcttcttatcctctcggaacgcaatcctctttatgcgtgtcttcctttctctccctctctcttttcctttcctttccttgtccatctctcttcctgcctcccttcatctcttccgcttcgtccgttgcccttcccgacgtatcgcgacggccgttcaagctaacggacctatcgctttcctttccctttcctctccttcttttcctttcgctttccttctcttctttcgccaatgccagcccggaagatatacggaccgaacgatcgacagtttccttcccacctcacccattttgatttttcgcaaagacgtcactcgattgccaacggaaaccttcccagacacggccaacttcgcacccagggcggagagtacaacacccagccctccgttccgtctcacccagtccctcactcgcatacaggctcccccttccctccaccctcgccggtcagttggtcccagaaacggaaaatgtcgtacgaccgttcggtcgccgataattcccttccctttggatcccagtccccacacagctttggtggtcatcacgcccatggctatccccaaggccatcatcaggatccggccgaaggtggtcccagcaaacggagaggttccgcgttcgacacaaagatgaacattctctccctgaccgacagaccggaccaacagggcgcgtacgaccaaagcagatcgtatatgcccccaccgtcgaccatcgggactggtggctatcgtcgagactcggccgtctcccagtggtcgctcgccagtcaggtcgagatcgcaggaggagtagacggtgacagtccaaacagacaagctggctatcagaacgggagaggagggggaggaggaggaggaggagg

SEQ ID NO: 1668 - DNA, 7818 bp, Xanthophyllomyces dendrorhous
gaggaggaggaggttcaaacgccaacatggagaacgggaagggatcaggatcccagcctccctctgtctatgcctggactggatttccaccgggattcacgccgacatacgaaaaccagtcgtacggtcccccaactggcactcactcatatgctcctccgactggcaaccaccctttctattcccataccacccctggcaactacccagccaggtccactccagccggcacactgtccagaccaggctcgcctctcgactcggtcggcccgctcggaaagcaggaatcacctagcgaatcctcctccagaatgtctatctcgcctagagggagagatcggtcgacgccgacgccgcctaggacaagagacggacagacgccgacgccttcgtcctcatcgtccgccgtgccgaaatcgtcgatcccacctggtcatccttctttttctcgctcttcttccgtcaaggcctcccggtcgagacagtcatccagatcgacagtcaaggagacagtctctgaccaggcacatccgtcgtcactcgccccgcctgatggaaacagaggtagcgggaacgaaggagatgcaccgtattcgagatctccagaactccgggtgagccacaagcttgccgagagaaaacgtcggaaggagatgaaagagtacgtgtttcttttcttgttcttctgtcctggcgccgtctttgttgttctcgaactatctctctgcatgatgccaccgatctctcacgcacacgtgtgcttctcctctgcacaacaggctaatggaagaactgagggaccagttaccggccgacaagagcgcaaagtcgagcaagtgggaaatcctgagcaaggccgtcgagtatatctctctactcgagcacaccaatgccgacaaagaccaagagatccagacactcagaagagaactggatggctatcggcccgccaactagactttgctcttcaggatccttttctcatctttctttctttcctagtgtaaattatccctttttgggggagagggagggagagacgcagcgtatgatgctccctgcggttttccatactttccttactctcactccaaagtatggtccctctcggatttgattttgtttttgtttttttcttttgggattttcaaggagaagaagaagaataaaaagagaagaacaatgatcctctgcctggctcacttgagtctgcatccatctggccgaaaccctcaggtgtgattctttcattcggttttgctctttctatataatctctctcttttcctctgttcttttctgttctgccatctgttcaaagtctcttgatcctgtttatccagggacatgttctttagtccattttccttccgttctcgttgcctctcttcgccggttccgttcgtttttttcctagctccattgttttcgtttcctcatctctttttgagatccttctagctgctcttgttgtttctacctctcccttaattaatatcattcagaatgtacacattgtattccgcatcttcagaccgaaacatgatctcgagagagacagagagagatgagaacaaagcaagcgcgcgcgcacgccagccaatccctcctgggggttttataagccggagtctccggatcgatccgtcgtcaccgtcacctcccaccttgatctatacctccatccatcccgtcccatcccacaaacattctatcggaattcaagactaggccttgaaagagaataatatgatccgatctatcctccgaccatcgttccttccacccctccggcccgtcctctccgtccgacacatccgctcgacccctccatccggggcagcccccggccatattccctttgacaacatgaccatcccttcatcgtcccagggagtgagcgtcgcggggctcgtccgctctgggatcgaactctcggacggcatggtcgtcggagggagcatgatccttctcggtggcaagacatttctgtggggtgtcgaccggttgagacattcgccctctcagtcgacaacagccgccatcggcgggttggatgggcaaacacagggagagtgggattggaggtgggttggatggaacgaggagatgttcaaggtgctggaagtatgtggccctcgacctggtcagtctctttctttccttctccttgcccgcttgcttgacgttgcgtgatggctcaagtcggactgatttgtttctctcttcctttctcttcttcccctcggctcacccagagatgctgatatttggtacaggaaagacagtccttccggctcctcctttccttcgaaactatctgaacggattaggaattcaacttgacatcatgaacactgttcgtccatctctctttctctattcctctcctatcttccatcttctatctttctttggtcaacctcaggtcgagtgcgctgacagatcgagtttgcccccttcttctttccgtcttgtcacacatcaacaatctttgcacgccaaacagagggacgcatgctcgacatacaacatgttggccgaagagggcagattggtagcagccgctcttctctctgttaaccctcccccggcctcgaccaggtcggctgccgatgagttctccgttctcgccggcgctttccggtccggtagtggcgaaggtggaagacgaccggtggacgtctgatcgagttgagatctgaatccaaaaccaagactgtgactaaagcacaggataggcccaacgagggaggtttccttatagttgtacgaacggaccggaagtttcttttcttttcttgttttgtttactgtaaatcgtctttgttatatgtatatatgcccatccttgtatagatcatatcgtgttggatcgtagaagaatgtacataaggaagaaccaaccttggaggtgtttcctcgtaaaggtgagctacaggataaaggaggcatgttcttccttgatgcaaactttgtctcccccagtcgacaggtggcccgacgtgatccgagattcagaagacaagagagtctgggaaggaagagagacgagaatgtatcaagatcttgaggcccaaagatcatacaactcgggatgttcgattgggtcaaacgtcgtggtcaacgaaggatccgttcggaggacctgcatcaacacaatatccagacatggacgagtttccgtcagccatgtgtcagaccggtcaaaggtctgggaaatcgcgcagacaaagaagaaaagacacggacaggagacggggaagatgcattgaatgatctgtacaactgagagctagccgatagatctgtgagggcccaaagggtgcagaatcgtaagtcagcatctcgagttccctcagagaaggagcagcagcaagaaacatgggcaaacggggaacagactcgtctgaggaggaagaggaaacttccgaatctctttgttcgatccagattgagatgagctcgatggcgtaggagatcctggaggttgcgaggaccgaagttctcgagtaggcagtctaggagtggaggacatcttgatggtcgatggtcgttggtggaggaaggcaagagtgacgttatgggtttacaggattcctccttgtgtgggcttaccgggtcggaaagttcccctctcacgaagaagcctcaactgtgtcttttccatgtattcttgtccctatgggtagcgcgcacaagctggttctcaacagacgaagcaagaacatcgaaagctgaacgagagcgagagaacaagccggccggacggattcttcatcggctcttcgcccacacgacaagtgggtttcgtttcgttcgctcacttccatcaatcctcaagcagaatcctcgtagtttgcacctttccagatgccgatccgtcagagaacatcgggttccacaccaaagaagtcgacagggaatgacaagccaaatggggatggcaagaaaaagacacaggctcccttgtcggtcaagctgttccctcaagatgatcattcattcaaagtagccggtgtcggtcctagcactccatgggaacaagccgttcgtccactgtttctcttcttgtctttatatggtctggcagctagcttaatcctcgtttgagactttatatgtgcccgtcattcgtttgattagaacatcccagaatccctgtttcaatcgttggatgtccccaaaaagaaacccctgtcgttcattcgttcgacaaagacgttgttcccactaggacttgtcctaggagccctgctcgcctactttctcatctcaccactcgataccgatagctttgaagcatactcccataggttaagcacgtttctggatgagtttccggtaccagatcttcccaacttcagtggtttcccgggagagatgtctagcttctttaaagactttggaggtgagaacggagcgatgggttggatgaagaacagggacttccaggtaggatcgaaactggcagacgaagggttgcaggccaaacactctgtcatcctgatccctgtgagttcgtttatccctgaccttccctgtccggccggatgaatggtcgacgttctgacgcgttctttctctgatacggcctgggtcatgatctgaaacccggtagggaatcatctcgacgtaagaccggattgtcgtatattgttcttcatccattgatcgctcactcatctctgtcgatctaattctttggcgtacacagaaacctggaatcgtaggtcgtctgctcgccgactgcttcctgaactcgttccatcactgaccgctcgctcgtcgtacctgctcatatacgcgtctgcagatggtcgaccgctcctgctgctcgctcattcttccggaaacgactctggggatcggccagtatgatccgagccgtgtacgcgtctttctctctatctttatctcgtccttggctgacatggatatcactaacggacgaactcgatgtctctcgctcgacgcgtcttcgatccagactgtccgataaggaaacttggatgcaggctctagctttggatcccgtcacaggtttggacccggtcggacacaaagtcagagcttcccaaggattcgacgctgcttctcaattcatccaggtatcattcccttttcttaccaaagcatcgagacccagtcaagcctgaggataaggactaagtgaatctcttccgtctgccgaacgctgtagggctactggatttggtacgcgtcttgttccgctacttttggatgtatgttttcatctagaaaatgatcaatactgactgaatagggtccgtcttggaaccttgtagggcaaagatcatcgaagtaggttccttctgtgcgcttgtctgtttgaaatgatgatagcgctatagctaatatccttcaaatcttccttcctctccttctccttctctgtctctctctctctctctaaagaatttggcccctctgaactatgattctaataacttggagctagccgcctacgactggtacgctcttctaataccctttcgtcagataatcaacagttgagacaccctttctcacatgctattctttcggactcctttggcaggcggctgagttatcacaatctcgaactccgagacgcgtacttttcccagctgaaatctagagtagagttcttcaaacacacatcgggtcagaaagtcgtactcgtaggacacaggttggtctctttccatgatcttaagaaacaatctgattgcgtaaagggaaagtctaaacgcgtgcgcgcatcggtttgggttcctcgtgtgaagtatgggaggaactatcattcttgtgagtgtctacttatcctttcatggggtgaaatcgaatcctgtctgattatgttattccgacaaactctttgtatgtattttgtgattctcatccatccgatcatagtacttgtcagtttcctcccattatttcctatctctatttctacttttccggcacttatcaaagttcctccattcttcctttgctgtggtgtctgcgatctgtgatgtcaaccagcttgaaatgggtggaagctgaaggtccatcgttcggaaacggagggccagattgggtcgagaaccatatcgagtcattcgtcaacatcgccggaccgatgctaggtccgttcttctcttatattcttttacgaagatagtaaagcaagatcatctggatactcatttctcttctgacctatggtctctttctactcacaggagtcgccaagtgagtctctgatcgaattcttgtttgattcttctgcaaccgctaattcatgctcaacctcacaccgaaatctgaacagagcaatggcagctttgctctctggtgagatgaaagatacggtagaagttaaccctgcggccgctttcttgcttgagaaaatgttttcaagaaaagaacgagcagacttattcagaagctgggcagggtccgcttcaatgtggctcaaggtttgtcttgtgctattctcaagttgtaaaggaagaagcaaaattgagaccgattatcattcttcattctcccggtgcctgctgtagggaggaaacacgatttggggcaatgaggattcagcccctgacgatcctctggatgccactcattctcgttggtcacctttctcttcattcgtatctatctgagattcgatcaagatctgattttatggtactcaattcattttgactcgggattttacacggcctcaacagatgggacgttcctctcattcagacattcagacgcaccgaccgcggaaaaggaattgacggcagaacacgtgtcgcctaatctaacggtgactgaatcgaatgcgttcatgcttcaacacacgcctatgcccttccaggtgatctattccctctcctcaagtccctgtgactttgtctgcttctgcgatgccatctcttgctcgactcactgacttgtcgctcggaatcgattgcattcgtttgggttttggtcggcgtgcatcagaaaatgtacggtacaaactattcatcgggaatcgaggctgatatcgatcaactcaggaagaacaatcaagaccatacaaaatggacgaacccactagagatccgttagtttctcttgttctgtccgttccgatttcagaagagcgcgtaaaagactgggttgtctcaaatgctttaaatctcaaccgggttctctatgagcaattagaactgccaaatgcgccctctttgaagatattctgcatgtatggacacggaaaagaaacagaggttagcctatactgtatagtccattgaaagcgtttcttctcatccgattgattgcccttctgtttgttccgttttgcggttcacagagatcgtattggtaagtttgaacatgttatcaaagcactaagcatgctctcatgattgcgcctgttcgaccaatcgatctgttctgattctgcttcaacgatcatctctatcaggtatatgaaaggtaaatatgaacaagatgaaggaaatggtgaaggaaacgctatgcctgtacgtagcctcgttttctttcacttatcgcacgagttttcttctctctcctgtaccacgctggctcattctttatcccaaaaaaaaaagtgtgtcgacgggtgtaattcgaacggaacgagcgatccgaaccctttgaatttccctctaggaagagatatgtggatcgattcggacgtgtctacgccaaattcggtgcctaccgttcgaaacggagtcaagttcggcgaaggtctgttctctccacttcaccttttttttttaattgaagtttttcttttcttttaatatataatta

SEQ ID NO: 1669 - DNA, 11066 bp, Xanthophyllomyces dendrorhous
ggctatttattgtgatgttttcttatatcttcaactacaggcgacggaacggttcctctgctctctttgggtgctatgtgtgtcgaaggttggaaacgaaaggaatggaatccaggttcgtgtcattcgtcttctcacgcgtcacgatcagaaactgaatatcgtttcatgtacacgacattgctcttgttctcgaatttctcttttactgaaaacttgattctgtcttccagctggaatcaaagtcgtcaccagagaacaggctcatttacccgaagcattagatcttagaggaggagcaacgaccggtaggctcaaggacctttcttttctgcccatatccctaggcattcacgacgggctgaccttgtaattgcggtcttgtctggctttgatctaaaaggtgaacatgtagatattttgggctcagagatggtcaatgaagctgttggtcgaatcggtaagtatcctatcgcttttttttgccggggatcaattctgactgctcgatcaacttatttggtaccaaattaagccgccggaagaggacacgaattagaagatctctttgtttcgaacatcagagaatacgcagcgaagatcaattggccttcggattcttcagaggattcaaagaaaaacaaaggattttggggttgaaactccctttcgaatacaacagatacatgatgctctacttgctctaggttttcctccaacattgataatcgggcaaggcggtcatttaattgatagaggaagcacatgatacccttataaaacataaatacgatacaacactttcttatcaattctcctcgaaccacctaatcgagaggtagaggggaagcttcctggcagctcgctgtcgttataaaaacttgaaatgtaaagacctcctaattatcctgttgtgctaaacgttgttgaagtagccggaattgtctaatttgatcctccgagtccgagatcatctgttcattcaacgaagatgtctctcttgcattcagcatagccttcgttgaacgaaagtagatggaggcaaatagaaataaaatcttacagcttgagcctgttcgtagacatctgaccctggctcgttaaacaacgtagcattggcaaacatcagaaatacgtctctctcaaattcatcgaggctcatgattatgccatctctaactctattcttgattgtcttgaggtccatcggtctataaacaatctcatgatagtctggtacatcgactgatcggatgggggactgaaagatcgatgaggaccgatgttgagcgatctgttggtacagtaagtcgatcgtcttcttgaatgaccgagggttggacatcgcggtagggacagaggtcgacgtcagagtaggggtttgtgaagattgtcgggtagaaggttgttgagctgatgaaggtggtacagctgttcgtcgcaggcaatagaacgaaaaagagcataagcaactgtttagcaggcatcaaagatttggatgagatgaatgtacaatcttcaggagtggcagatatatctcctctccgccgtttgacgataggctccccgtcattgctagtcgaatccgcttgggcagcaggtaagtctcgcttccgtttcctttctcttgctgttatcggccacacagtattcacccaacagatcaagatcagtattcagccagagaggaagtgacagaacaatcgaggagggaatacatactggctgcctgctcggcttgtttggttaccttcgctgctctttctcgttctcttctagcccgatctctcacccttctctctgccttcttctgctcatgagcctccatcgcctgctcagctgtcaactctgcttgctccgccttggtcaacttcttattcgagcctgcgccacctgtagtgttagcagcggatcctgtgctgctaatggattttcgtttggatcgcttgagggccaaagttccttcctctccttcgtcttcctcctcattatcatcatcatcgtcgtcattctcatcgtcatcctcgaggtcgtcatcgtcgtcctcatcaatgtcgtcgacatcgtcttcatcgtcgttctcgtccccgttggtagcattgtccttgacatctttctcggcctcggcctcgtctttatcgaccaatcccttaatctcctccttgacctcttgcctctcacccatatccccctgacccagagacttcttcaagtcgtcatctgtttctgttctttcctccttgacgacgacttttccccttttggatcttctctctcttggctctccttcctcctcatccgccgtttgctcttcctggacaccctccatttcctcgccttctccctccttctcttgatcatcaccaccatcatcatcatcggtctcatcaggttcactctcgctttcccgttttccctcgccttttaactcccgaacgcgttttgttcgggccacatctgccttggcctttctgtctttgaccgctctacgcggtctcgatagttcatctacctgttgagagttcgcgcctaaattcagagctgtttgccgagtgatcgttgatgagcctttgagagattctctgtccagtgtggaagaagtgagtactgttgagtcgtcggtggtgttgctggcaggatcagagggtggacgtgagacctttgaggaagacttggaaagggataggtcggatcgaagtcgagtcaaaggagctcgaataggcgaactgattggctctcgttttgatcgtgcctttgatctggatgactccttctcctttccttttcctttctctctctcgtcctcgtttccatcccctccgtcctcctcttctgtatgtcttgactttcggtcagagctgggtgcgtcaggctttcctctcttgatccgtcgtctttccagatccgatctatccctctcttcatcctcttctccatctcccaaatcggaggaaaactcgctactagccgaagggcttgccagtcgcttcttgaagaccgcgctcggctttggtccgggtctttcggccgacggagggtccggtaagatggatgaggacgaagctagagaagatcgagtcgaggcgcgtttaggtttcgaaccatcgttactcgtcgttaccgtcgtttttgatggtgtggtcaacttcttctcggcttcgtctttgtcttcctcaatagttttttcggctgaatcttcttggttttcctgctcgagaacttttttctcctttgtttgttcagcaccagcggcttctgtaagggtgctaagtctcgtctttataggcgagggagttgccggaacgatagattcctgggaagggactggttcccctgtcgtcgataacacacccaatgaatctgagtctttctctgatgagtccgtcttcttgatgtttctgaccgaccttcctgtggccggtagagaggaatcttttttggcagaaacagatgactgaacatcgacttcagagttattcgtctcgccatcaagaacgatgatcgatgagttggcagatatcggggcggattcgatttcttcatcattagcaacaagttttgaacggcgatcagatggtgagggtatcaaagatggtgactttttcggtttgtcttcctcgacctcggtctcagccttgactcgggatggagagactgatggaggtgggcttgattgtagggatttcgttgcaggagagtttcgagtcggttcttgttcggggtctgaatgagttttattacggagaaagaagcaagtcaagtaagagtccaagatttctgatctcgaaaaacacaatcaagtatgacaaaacgcgtctagacacgtcgggtcaagtaaggaaaaagggaaggacacaccgagttcggtgctctctacagtctcgatctcctttatcgaactcgtcgacagacgatctgcttctccatgctgtccatcgtgttcatcttcagaatctgttttgtgttcctcatcaggaaattctctcgaaatctcttccacctcgcccatcatttctgctacctcggcctcctcctgctgttgaacctcgactcctcccgtcactgcatcttctgtatcgtcagtcgtcttctctggttctgtctctggctcagatgatccactcgccagaaatgagttggcagctatctctgctcgctgactagcgagtcgttcgagaagtttagactgaagatctgggttttgaagtagataaagtgagaattgggatcggagagtttgaggtgaaggcgggtttgtcttgagagtagcgagttcgttgttgatcgagctaagggaccacatcaatatgcagcataaagaaagatctcatgagcaaacggcagctccctagaaggagaaagaggaaggtatgagaaccgacttgaaagtttcctcctgtttggtcagaatctgtttgatttgagtaatcctatccctcacttcttcttgggaaggttggactgaaaagggcacgtgtcagtgaaagttgctctctacatatacagactcaaacagctattatggtctcacctgcatctggccctctcaggatagatgatatcgtcggtcctagtgccatgggtgtatgtatactcgatggatggacggatggatggatggagagagaagggcagagaacgaaaagacgtgaatcctttggattagaaatttcgtgaaattcttctaatacccgaatagaaaagtttcctaatcataatttatctaatctctaaggcaactccatcccatcgagccttcccatcaagcgttctcgttcaaccatcgaccatcgcattcaccctcgactctattctcctgctgttggtataagaagcctaagatggtcattgaagaggacagtcagacagatggacatatagaccgatcagaaaactcgaggccatcttcggccctcgttgattcacatcctctcgccccttcctcttcctcgcctgaagcttcttccgaatctctatctgacttggattcctcgctcgtcggaaaccaacaagtcaaccaactctccggtggatcgtctaaagctttcaatggactttcaagctttgaacttgatggtgtcgtccttgcagtcctgctagtcaactttcatcatctggtagcgtctctgtcttcttggctttctccttcattcaacaaataaacaagcaagcaagcaatcaatcacgctgactctcgtcactttctcggctatactctattcattcttctgttctgagaacttaccactagcttggaccagttgtcgagttctcgtacccgtcgaatatcctctcatctccctccttggacccagaaatcccaaagattttgcctttcttggcgcttccggatggagcccatttgtcagacgaagactactcgtactttcatcttgtctcacccacacaaccagatcatcctccaggctctgaggaagacgaaccgtttcctatcgataagacggtctttggaatatcgtcagtcatcttttctctatagcccattcggtgctatcgccgagttcagacagtgcacgcagatgctcaaaacgttcttcgtaattcggccgatgatgagaatagatgcaaccgacaactcgcagcgtcagatttaatcaaacggcctgacgatgttactcgaagtacggttcagatggctgttgttgtcctcgcgagagcacctctcttcgtatgtctccgtccactctcggcggtctgattgatgaggtccagataggttgtggctgactatttcttccggtgtgcactcctttcaatagggtcctataaggtgggcatccgctgtaatagttcattctgaacccgctcaatgatgtctgactcgtcatactcatttgaatgctcggacatgtagggacaaactaggagttgtcacgcgcgcgttcttcgcccagagagactttacctcaacagacattctagtggactttcatcattctttacaaggcagtttgcgtggtactgtctcagagacaacgatgcacatgggtaggtgcatagctgtcttctgtacaaattactcgaggcttatccgtatatttatcactttgctcttcctaggtacgagtctgagagagctcatccacaaatttcggcataagacactggtcttgcttaaactcatgctacttcagaagaaggtaagcttttccataagctaaatcgctttcttcttgaaaaagatgggacaaacggaagattgctcctttcgtgtatgctgtaattgaaaggaagactgccttggttgtagatcatgttctttgggtatcctgtcgaacgtttgggaacttttcaatatactctcgtgagtcgtttctctccatttctgtgtttttactctatatgatattgactgttctctatcttttgtcgtcatcatcataggtttctctcataccaggtatgactgttcatcgaattttatgtatagagtggacctccgatcttgacttacatcttttttttttcaaccacaggcctgttgatgaacttggccgactgtggatcgcccgcacttgacacctgcgcatcgaaggcaaagcgagcgagctcgttgaggacgagtgaccgagcaagtatgcttcggttctttggtttcccactcgacttgtttggaaaggtaggcctttcctgtcttgacactctgtctccgactaggatgaaatctaatctgaagactttctgggtataatcttgacatgtgttcctatcaacaggatgcgttcttccagccatatctccctcttcagcagatcgatatgtgtaaagcctcaagctggctagtaggaacgacaaatagcatcatgatccagcagcgagatgcctcgtttgattgtttggtcaatgtacgttcttcttttctcttgccgatgtttcctatagtcgtgctgaaaagatcttatttttgggttttgaaacacaactagatcgagcacactacctttgaatttcctgattccaagttagaaaggctcgttgcgctgactcccgctgtaagcggtcctttcattcgtcgcgtgacactactcgactctgtttccagtgacttgccctcggtctgatagctatgcttcttcctttttctgatcctgtgttcaaactacaggaccggagatggatggatgatatcaaccggacggtcgaagagacatggaatccggaagacccgactcgacccgtaggtatggtatttaaaggaagtgatgactttttgagagcgaagtttgaagagtatctgtgttctgttctgggtgaggatccttctttattctttttttccttgctgatgacgctaaatattttgcttgattggctgttgacgatctgaacgatgatcagcttccatgaagcacgcagactatctggccaaatcaaacaagtccgataacttgatcacctctggaaatggtttgttcaagatgtcattctattatcatctgtgcatcgtcaactatgtctgctcgttctcgacaagacacggacttatcaaccccaccaaattggattgcaaaatttagcaaactcgcaatcgaatttttctctaccgtggataagagagcttcggttgacccctgcttttcacctatgggataggtctactgatccggtacttttcgatatctgggatcccaaacatccttgtacgttcttgtctttcttcaggtagttgcatgccctataaaaacgactgatcgagtttctttgcatatgactattctttaaaccccttgaaaaggcgaaggcagagtcaaccctgtgtctgatattggtcttcgactagccgaagggatccatgatctcaatattgagcaaaacctggctcctacaagagaggctctttcctccgctctttctgccggctcaacgacattctttcgagccttcgagggtgtcaaggccgggctatcaaatcagctagcagcgcttcctctgggctccccatcaggaggagaatcaatatctggatctgcttcaacctcgacgtcagggttgggttctggtccgaagagatcttcggggttgtcaagcgctactgcatcttcgtttttgagtttcatccgtcctaccgaatcatccccttcttcctccccggcaacagggcctgccgtcccatcctcaacgtcttcgccttcgacgtctgctttctctctgtcttcgcctttgtcgccatcagtttcaggctctgcttctgctacctcgtcttcttctttctcgttgccatcaacagctataccaggaagcttcgtagagcatggtagcagccaaaacgcaggaacgtcagtctcagagggaaaccctctgaaagctgccgtagcaggatttggaagtttctggggatcgaccttctcttccaactctaactccagctccctagggtcagggtcagggtcagggtcaggatcaggatcagggttgagatcgatggcggatgtagggttggagacgggaatgacgacaggaaagttaggattgggaaggttcggaattatgccgaggcgaaagtcagtgcagaccgatgtcgctgaggtgggaaccggcgctggtgggctgagtggagtattgagagggaaacagagagagtcagaaaccgccgacggcagtgggttcgaggattgggctcctgttgatttagatgcgaagcgaaagatgtgatcctttttcttctctcgactctcctttcgcttgcttcttcgaaagtctttccgtctcttttcctttttcttttttcttttcttttccttgatctcagattggttttatgtccacattgatctgaataatttgtttcgtcctccgagatcatcagttcgccttgtacatatagaagtctccgcttttttgtccatcatttcttgatctctatacatcttcttcagccctttgtgccacgcgctcgatctcgaagagaaggatgaagagatatacacatgcatatttgaaaaagaatcaaacgagaagcaagaagaaacaatcgagaaccatggattataactatagatagaggattgtgcgcataacgcgaaagaacaaagttgagcgaagactaaacatgtatactatatatgaatgagaaaaacgaagaagggaaaaaagtatttgattgttgatgtgcatgggcaacgtaaacatggacatgggcatggacagcaatgtatattatacgttagcaggtgagtagaagaagagggtgattaatctccgaggtcgaaaacaatgaactctctttggttgcccaatcgacggcaaacgaatgtcagatcatcgatgttcttgggagaatatataggggaaagagaattaaaacctacgcgtccttctctccgatattctcgaaatccatagtctgaccaggtaagcccccaaccacgaacgctccgtcgccctctccaagctcaagatcatcgttcactctaatccgtgttcctgcactgaatgatgagcccgtattgaaacctgatgtctggacctgattcgttatgataaggatccgaaggagaagaagattacgaggttgattagttcagaacgacggggcacggaaggaggttatttatttatttatttatttattcatctttcttgataaaaatgatagaaaggacatacgacgtgtacgtaggcctttcgagcgctagacactttctgatctggatctcgttgaagagagggctggaacttgtgggttacgacgtgtctaggcggaaggacggtggcgtataagtgaaggtcggcgtgtaccttcaagggagaggagatcaatccacgaaagttatgataagcgacacagttcaagtgaaaaggaagaaattaagatgaacgaacaggagcaggtccagaagcttctcgctgagaagatacttcggtggatccaaatggggcgaccaccttgacgaggccttgcttcttttcctcatccgtgacgtttctagtataatacgccggcttgagtctgcgctcatttgaaagtgcccagatctgaaggaaatggacctgtttgtaagtgttcttgttgtattccgaatgtcggacacccgtgcctgcggaagtcatttgaagatcaccccgtttcataatttcgacgtttccgatactgtcccggtgctcgagctctcctttgacaatctacaagatcaagattgtttgatgttaggagtatgaacagagttggacttgcgctcatgcagtagaaaaagacatcatcggaacgaacatatgaaaaaatctcgaattcctgatgcggatgagtgccaaatccctgattggcttcaactctgtcctcattgatcactcggagaggcccaaatgatccgaaatcttatggttcattccataattatcgccatggtgcagaacccgagtaaacatggtcggttactcagatgcacatagcccatcgtcagatgatacagttagaaggtactaaccaggatcatagtagctagcaaaattaaatgtatggaatgtcttcaaccagccgtgattggctatgcctcgctgctcagaaggcctcattgtgagtcggagagcggctaccaaaggttaaaccgggcgataacaagatcaggaatcgtgtaagaacactaaaggagagaacaacaaaaagacaggatcatgctcacgattcttgtttacagcagtagaagctataggagctgatttacagagtacggtagccatattcattgagttgtctgaggagtgccgatgagttgtctggaaggttagtaaaaaatagtaggccccggcgacaacgattggtatgacagaaaacagcatggttagtttgctcacggtgaacagcgattactattcctagaagatctgatgaatacgtgtgcgcgaaacagatgaatattcgtgttagtgatagaaagaaaagagacaagactgatccagcacctcaactctcatcatcctttataccactcttggccgccggtcaagagaatcattatacaatcagtgatgcaggtgtaatgggaagaatgagctaatagtgttaggaaagtcacgtgtcccatgttgacgtcaacacgtgacttgct

SEQ ID NO: 1670 - DNA, 4272 bp, Xanthophyllomyces dendrorhous
caacacgtgacttgcttatgtaatgataatcatcattgtagccaccttcgtagccaagtatgtaaccctcaggtcacaccgctgtcatcactcaccttccttcttccttttgctttcagccaaacctccagcatacacccacatcttcagccttctctccgtcgcctctcgatctccagctctctgtgatctctcgatgctcccatctatccgtaggggaactcgaacagctttgtgcctaccaaagagatctcttctagcgtcctctgccgtcagactactcctgatccagagaacgatggcatctattcctacctccaccacctccacgcccacttctgctactactcttcttcctcgatcgacgcctttgatttctcagtcaaacaataagatcgtatcgccatgctccagtagatcgtacgccactccgtcgtcgcctatactcactccatcacttacgttcaactcgtcgtgggaaccgacgacgcttccggaactgggcgagagcctaccgtttgatacgttcactggtaaactcgaacagtccccggcggacgacaggcagtatcgatacatcagactacccaacggacttgaggccatgctcatcagggatgaaaagactgacaagagctccgccgcgatggacgtgaaagttggccacctgatggatccgcccgatcttaaagggtttgtcgtttcactctatcttgtgtttccttctccttccatttcttcacgatctatcttgattggcatcgtaactgatcgctttttatgtgcgccttcgattggtaaccaaacgtgtcttcttttctggtagatgcgctcatttctgtgaacacctgctattcttgggaaccgaaaagtttcctaaagagaacgagtatgccgagtatctggctcaggctggaggatacagtaacgctgtgagatattttcctcgtgttccttctctccttcaaatagctatcttagttcttacattttctccttcctcctctctcatcgttcatcctacagtacactggaatggatcaaacgaactactacttttccgtctcgccgtcttctctctctggggcactcgagcggttcgctcagttcttcacctctccattgttcgacgcgtcatgcaccgagagagagcttcgtgctgtcgactctgagcactccaagaaccttcaatcagatatgtggaggctgttccaactggagaagtctctttcccgaccggaccacccttactccaagttcggaaccggcaattggcagacgctctgggaggatgtcaaggctcgtggtggagaacccagagaggaactccttcgatggtggaaatccatgtattcggcaaatcgaatgaagcttgtcgtgcttggaaaggaaccgcttgacgagctgacaaagtgggcggtggaattgttttcggccgtgcccgacaaaggtctagatccggtcgttacgtttgaagcgaatccgttcggaccggagatcgaaggatcgacaaccttcatgaagaccgttaaggaccttcattccctagagctttgctgggttgttcccgatcagtctgcgctcttcaagaccaaggtccgtaaacatcttcctctctctttcgctttctttgccttttccttgctgatttccttgtatgtggatcttctcagccggctagtttcatcgcccactacttgggtcacgaaggacctggatctgtgctcagttacctcaaaaagaagggttgggtcaatggacttggcgctggaaactctgacgctgctaccggattttctttcttccgtgtcaactgcgatctgacgcctgaaggatatggtacgttcgaatacgactttttctcgcggttcgagacattatcatgcttacgtattttggtcttactttctgtgtctctacagagaactacgaccaggttgctctcgccatcttcacctatctggatcttctctacagatctggtcctcagcccggagcttataccgaagtatcctctctcgccgcgctttccttccagttcgtcgaaaagtcctcttcaccctctgatgacgcttcagagctcgccgtccagctttcggcgccttatccgaaggaatgggtactctctcaaccctacttgatgagagcgttcgacgagactttggttcgagagaccttagatgtcctggtggacgttggaaagtgcaagatggtgttggccggaaagaagctgccggctgaagtcgagaagaaggtaggcacttgggatcgaaaagaagctatctacggcacagagtttagagtcgataagtttggagaggagtttgttcgcgcggtgagtttctcttcctggcaacatttctgtctcgatgtgcacaagagacacttactcccgatacatcttctctctttcttcaatgtcctggtggattattgaaccggactaggcatctcggcctgctccgatctctgacttacacctcccggtgcctaatgagtttattcctgaagatctgaacgttgataagatcgagaacatcactgtttgtccccaagaattttggactctttttcctagatgtttcagtcaacctgatatatctgttttgatgtttactacaaaccgtagccgaaagacgttcctgctcttttgaaagagactgagctttctcagctttggtacaagaaggacgatcgattctgggttcccagagctaatgtatgtgcctgacgttcatgcatctcgtgcgttgtggactatcctgatctatcgatactcatctggttgtctacatattataatttgatagttctgggttggacttcagaggtcagtaattttctccttctccactgtgtagatcacagtgttgattgattctttattacatccgtttgaatcattcaaaataaaacaatattagtcctaaactggatgcttctcccatagcggctgcctccgctcggtcagttcacactctacctctcttcttgtgatgtataactcattctcaaccattttattaattcgatcagactcttcaccgagctcttccgggatcatatgaccgaggctctctatcctgtacgtcccctccccctctccacgacgctagtatatacttttctgactcgaattaaacttcctcgatcttccttgcctctcgtatcttatatggtatctaccaggccgacctcgctggattgaaagcatcgtgcatgtactctggaggaactattgttctgtcctgtatgggatataacgaccgattacctgttctcatgaagactgttttggaagagcttaaggcgttcaaggtggaccccaagcgatttgagcttctcaaagacgatgtgagttctataatctataaggcgtgaaatgaagaatctcgaaatgctgaaataggtccttgtttttattcaatctttttagctcaaacgagattggagcaaccatgaattaggtgaaccgtatgggctctcccactactttggatactatctgattgaagacaagatgtactcgcccaaggagaagattgccatctttgatcgtgcgtttcatttttttttttaaattgcctgttcttcatggatacatgattatctaactttcattgctctttcacttttttgtagagatcacggtggagtcagtggagaagttcatcgccgaggccttgagtcgtgtacatgtccagacccttgtccatggtaacttatctaaggaggtacgcgctttctcagctctgtcttgctcgaagcctccaccgtttgcgacatgatagactgatctattttggtcttttggttgtgaatagtctgctatcgaacttcaagaagtgcttgagaccatcttgaagcctactccgttaacggctgaagagaagattaacgacgctgccttcatcctgcctgagtcgtcctcccacgtttggcagctcgatcttcctaacaaggagaacccaaactctggtgtagattactaccttcagattggctcaacaagagagacgagactccgagcgattgcttctctcttttctcagattgctagagagccgtgcttcgatacactccgaacgaaggagcagctgggatatttggtctcttctggtggtcgaaaccagtctggcacgatcgggtggcacattttggttcaatctcagaacgatagcgtttatctagagaatcggatcgaagccttcctttcttccttggcatcccatctggagagccttccagcggaagatttcgaacgacagaaaa

SEQ ID NO: 1671 - DNA, 6464 bp, Xanthophyllomyces dendrorhous
ttcatctctgtgttggttttcttcaaacaggcgagaaggatgtggccgagttgaagacggttactcaggcagagttgctcgatttctaccagacatacatcaaccctgcctcacaaacccgacgaaaggcatctgttcatttaagaacccaaattcctgcttctgaagtgatcaccgcgcctgccgaggccgaaacaccatttgtcgctgagaaggaggccgtagagaagaaggagatcggcgtgttagatgaaaggaacgtattgatcgaggacgttcatgtgtggaagaagtctttgaagaagagcgagccggctagacctgtccaacctctggagacgtttaaagatcagttgtagtttgtatgtctatctttctatctcctccttttagatactcctatctcgttttagttcccttttgtgatgtagcatccgctgggaccatctagaagctctctttaactatgtagcaactctctgttccctccctcgcctttctcttctctcattttccctccactgatacagttagaccaaaaagaagatcagtgataagccactgtgtataatcaatgaattctctgatctcagacgggcttgcgatagaaaggttactaaccatacatcgtcatacatcgagatgatgctttgatcaaacgctcggaaagacgaagttctttctctctatcagttatggtgaatctgtctccctatcagcagcagcaccagtcaacagatcaagcgtcaagccgtggtcagtcgaacgcggagtttctcagagtcgagattgatcggtggtctgctcgacttcgagagatcagtctctctatacacggtccgttgaatgttatatgtcaaaatgagaaccgaaggtcaaccccgattcaatccgctcatactctactgtctcttctttgagaacgaatttggtttcagatcaccctgagctggcttatcacgagacacacgctcatgatgtattaactacgttccttatagaagaaggatttaacgttacaacctcctattttcttcacaccgcgtttcgagcagagtggtccctgtcatcggccgaacgtttggttgaagaggaagaggagaaggtggtgatgtttcaatcagagtatgatgctctgccaaagatcggacatgcatgcggtgtacgcgtatcttttataactctgtttgtattcaacgtctaggctgaagaacattctttgtgttacaagcataatttgatagccatctctggcgtcgctgccttactgtttctgcgatcactcatgatccgatcaaaccacccaggaaagattgtgctgttaggtacaccggctgaagaaggtggcggtggtaaaatccagctgatagagaaaggggcttatgaaggggttgatgtctgtgttatgtgtcaccctgggcctggaaaactggggatgggaacatttattggaagtttggccatacaggtacaagtgtctcgatggtattgttcctatttcttccaagagagaaagaagtactgacttgacttatgtcatccgggaggaagaccatcaatgccagttatcacacagaatcgtaagtatgcatggctgtgtgtggctctgtaatatgaatttacctggctgaaaagttgtatatcacgtcactgaacttctatatagatccgacggaaacgcactagatgctgctgttctagcttactcaaacatctctgattctagacagtaagctctgatagttctcttctatccctcgatatagaatcgattgttgcgctgatcgtgatcaccgtgcgctatgactttctctcctctcttccacagacagatgagaccagacgatagggttcatggaattattatcaatgggtacgtataatcactttcttcttcttcttccttccgccttgtgtattctatcaagacgtgtatggtttatcttttaaactttatcttcctcgccgtgttactacaactaccagcggtcaagacctcaacagtcagcatcatccctctttcctccgaagacttctctccatccttcttcccgttcaccggtcatgaaatgttgacacttggcgaatataccccttctgaatttgaaggtcctgtttcgcttgcctctctcaagtacttcatcagatcacccacatctgatcatctttccgctctcagggatcgagtttctggttgtttccagttacgttccgtttctgttcatctttcttagcctgaggagaagacttattaacatatatttccggcgtatgaaattctgacaacgaaatagaggagccgctctatccacagccactcgtctagaaatcaacttttcaaccccccacttggatcaaaggaataaccctgtgctctgttcagtttatggagagatcgcaagagaaggttggggctacgaagcaatcgtcgaagatggtgtaggtgctttcagtacagattttggaaacgtcacccacggtccgttttctttcttttctttttacctctcctccccataagatctacaggatccaagatttgttcattgttcttatgatatcttgatgctttgcgcgcgcatgtacacagtggttccgtcggttgcaataagttatgccatcccaactttgcctaatggaggaaaccacacgcccttgttcactcgctcagctcgatcgatcagagcacacgaagagactttgaagacagctgcttgtttggcagaattagggtttaaggtgttggttaattccgatgggttgaggagtaagatcagaaaagcgttcgagagtgggaggggatagtgagagtatatgtgtctgatggaacacacgtggacaagaattggtggattagatatatatatgtgtacacgaacttccctttcaaggaccagaccccttcactcgtcattccctcttccgttcctttcgctttggaaaacagatgattcgatccatgttgtctaattcccacgtcaggcacagtttctcaccaacattctaacggttcctataagatgggcgaccaactggtcgtaacagttgttctcttctctagcgtgagcagctgcttcttctagtaattgaggagcgtctaggatctcgacttctagttcgtgatgacgcttttcctcattctttcgtagagttaggtcgggttagatcgaggtgaggtagccacaggaagaacggagcacatgatcagttggatttatctataacggaagcaaagactagaatgttaaaagtagatggaagaagagagtgaagcgaaacagacctgagtggtcacttgggtaagatcaacccggacggcctgatgagaatatgacagtctatccttctttctgatgaagacgtcttgaccttctgtcggcacggtcggaactattgtttttttccaaagtggaagatcgagcaaaggaaaaggcaaccgagtgggtttagatgacacgatcaggatcaggaatgaagaaaagatcaagacgtacttggtttttccgtactgatgctcaatcgccaatcaaattttctcaacggactatacacattcaagtctcctagcctgaccttctctaccacctcgaccacgccacccgtttttttatccgtcctgatccggacctgccgaccatctggtaactttcgggtcgtatcagtttccagcagatgagcgtatgaaatcggaacaggagcgtgtctcgtggttgaagtctgatggtttaataattggttgtagtgcttgtgatgtgactatttaaatccaaattgttatgtgcgttatcatgaagaggaagagggagaaaaaagagaaagagaagagagaacgggtatatgcgttagtttttctttttttttgggaggtatgggacgcgtatattatatgaacatgagaaataatcacggacggaagacatgttgctgtcgaagaagtagctcaagccggttgggttcgaacgcacatctgccgaaggaaggaggactagatggagggatgacgcgcataaagtcgatccaaaggtatcagccctaacaggtctcaattacaatgagaaagagagacgcgatctatctatctttcctcctttcttaagcgaagaaggacgcgttaaatcgtgagaaaagagagaaggttcactgactagtctcggtctcaatgggtagagagatccgttgcctggtctgatgagatctgatggttccaatctttgcttcaatcttatttatacagaacacatggggaggggccaaaaggaaagatgatagtcaaaaatcagaaatcaagagacatcgatgttttgatcaaaatttcgttcggcttctgcagcatttactaccacaccatcccactttcacacacacacacacacacacacacatacgtgaaagagcaaagcttacttcgacatgttgcgccgtcctggctagagcccaaatccagtcgccgatccgcctgacgaactcatcttccggttcgagctcgaagaatgttggtgtgagcccatttggaacggaaatgtccatcatctgcggcccttgggcatgggatggatgtgagcttgatggcgtatatgcttgcgagattggatatgatgatccagcagaaggaggattgttggatgatctacgttctgtatggccttgagaggcctgaggggtggatgatgagcttgacggtgcggctgaagaacgttcctcctggtcggatggcctggctctttttcgaggagagccttctccatgtccatttggatttggtaattttgatgacatcctttgactggttagagatggcgtggtgcaatggggtgtagtggaaataaaatattgagaaagggtgttgtaggacggttgatgtggatgaaggtatgtggttagggttgtatgattttgagctgttttcatcagatttcgccatattccatgaattttgcaagatttcaaccttcaaaagatgttgaaaatcaaaatgaatatttatcaagaacaggcttgtcccactgttagtaaaacgattagatcacaaagattggccgagcagactctgctgagatcacagaccaagaggagagtcaggaatcaaggacaactcgaaaagaatctctttgtccgtgtactctcttctgtgcttcttcttctccaattgttgctctcttctgtagactccaactgtgctacacctatggtccgttttgagacctcaaagtctttcggtgttgtcttttttcttgtctttctttcctcctttttttccctctgttgctacagattctagttcatcacgatcataaatctcatttttcccgtcgacgtcgttctcctttactcatgatcgagattacgtcaaagagccatctttatacggcgtttatggttgtttgtctacctcgtcgaccagggaaaagggatgtctctgttctagaaacttgttgtttgttccatcattcgtcatgcctcttgccttacgtttcgcatgttcatcagcaaactacgttgctgcccttgagagtaaagggagaaagcttggctgacgttgatggacgtcatggttgccttttgcttccggtcgtttaaaaagcgggcagatcttatacgttcattctcatgaacgagagagcgtggagggaggcgcatgctgaagatgtagatgtcgttcaaagtccgtgtggcatatattaacagcgtcggcgtttgaaatcgaaatgcagaaggaatcaaacaaaagagagcacagctagcttctcggaccagaattggactgcaccaaagttcaagcccaacagcgttcaccccagattgtcagccgcgcagcagattatcgttcccgaagcttgatcggactaaacgtaatagataccgaaaggttcatgggtgatgtcagccacactaccgcggattgctgcgtgacgatttcattaacaaatgaacgctagtctcacgtcggtcactccacaagtccaccatagggggttcgggtgcagagcacaaaggttcaactatcaggcggcagatggcgagcgaataagactgtttcctttccgagaagttttctcttctcattcactttctctcttcagtcgcctggccatgccctgaggagagtgaaaaagagtaacgatcaacacgggcatgaaaaattccttcgctctctctcacactgctttgcagtcgccgtagagaatcgttaggaatatctaatcatatgttctatagttttttcattcggatgatcttgtaatacttacagtttttctctcttttttccctttctgccctttgtggtggtttgtgcggaagctgatctcattttcgtgaataccttaatcctccactaacatccatcccacccacatcgatccgatccttctcttttttctccccacttcttcaataccatccagcgaagaaagacaaaaagacacaatcgacaagttgatacatagagaactactgttatagcc

SEQ ID NO: 1672 - DNA, 7543 bp, Xanthophyllomyces dendrorhous
ccttctccccctccccttcccttcttcccgcctccaaacatggccaacgcccaaagcaaccgttcccttgactttggtgcctatttggttcaaactccttccgccgccgctccccattccatttcttctgtcagtcagacccaccactcggatcgatccactggccctcccacaggtcaccaaaattccgatcccgccgcacactacaactacactcatcaaactactcaacctggtcatcggtcgtccgccgatcttactctcgtgccgaccatgtccgactcaagttctccttcatcaaaccaacaaccgttagccaactcgccgcctagaggcctacccaatcaaccgatcggcccacaatcctccaactcaaattccaacgacgttaacggagccctaggatgggatcccaacttgttttctactagtgacctttccttccagctcccttcgttccttggcccttcatcccttgccgctccaggtggtggcgttgaagcatttcccacccgatcggtcgatgactggaattcttcctcctttacacccaatggagagatgcagttcaccgaagatggcactattctttctggaacgggttctctcgcttctggtatgggcaatcacgactggggagacagttcaatgtggaggttggttgaatccgccatctgctgtctttttttttgtcttattccttctttccgtccaacccgtccattattttcagctttagattctaacaatacttttttttctcatttcttcgctagtcaaacacccgatacctctcgtccggtaaaccagaagtcaacgcctccggccgtccaaacgtccgattccgagtttcagtctgcattccataaccatttggataatggacaaccatctagtacattatcctcttcggctcgtccgaccactgtaaacaatagcagcagtgcctatcccagcaactctgcacacatgttcccgctctcaccacaaaaatcagccgtcctacctagtcagccggaggatcgtcctgcctatccgaatcctacttctcatcttttgccatcaggtccgacggacacatccattcctcagatcgggaagaacatgcctgggctatactctagctctggatttgacgtccttggtgttttgtctaaggtggtgagccgaccaaatcccagaaccgttctggggccggtcgactttagctgtagtttcttggttgtcgtaagtgttcctatcaggcaccgagatacgaagtgtcatcttgagtggtatctctgaccgtccatctgctggttccacggcacttcttttctctatcaggacgtactaaagtacgattgcccgatcgtgtactcgtcgcccacgtttgctgccttgacaggatacgagaacaaggaaattgttggacggaactgtcgtttcttgcagggtttgttcccttctgtcgctaaatatcttgttggggtttgactgatagagttgagcttcttttcgtttaaccatccttattagctccggatggagctgtcgagagaggctctcgtcgaaaatacaccgacaacgttgcggtttctcacctaaagagaaatctggcgtccggcaaggaatgccaagctagcttgatcaactatcgaaggggtggtgttccattcatcaatctggtcacggtagttcccatcccatgggacacgaacgagattcgattccatgtcggcttccaagtcagttttatttatttatttagaatcgagagcttctttccaattaccatgtttattgatatcctacctttttatttttctgatctcgtaggtcgatttggtagagtcgccaaatgcaattttgcgaaacttgagagacggcacttatcaagtcaactatgccgtcctcaacaaccctcagctaccacttgcacctgctggtcagttagagtatcaaccccgacggatccacggcctttcgccagagcttcttgacgttatcagggtcagccgacctaaagcgttggaggaagctcaggcccaaggcagcgaggaggcgacgatggctgagtggtacaagacactgtttgatcactctgatggttagtgatcagtctttgctacacgctctcctcactgcacatactgatgatgcgtgtctcgccctctttccagactttattcacgtcctgtcgctcaaggggcagttccagtactgttctccgtcggtgaccaggatactggagtacgatccatcggagctcgtcaacaagtttatcggcgatatctgtcatccatccgatctcgtgccggtgatgagagagctcaaggactcgacccacacaccgtcttccggtcagaccgctcgactcgttaacttttcgtttagagtgcagaggaagacgagtggtatggtttggatggagtgtaccggtcagctgcacgtcgagcctggtaagggtcgtaaggccgtcatcctttgcggtcgtgagcgggttgttcccacgcttcagtgggcttccgttcgtctggctggtggagttggcgcagaagattcttggtgcatgctcagttttgagggcttgatcctctatgcctctaacaagatgaaggaaacctttagctccaccgacgacgaactgataggatccagtttgctcgactatattccgaaccgggcgtcgtcttcaccaaaaggcgtcagtgaacctccccaccaacggattcgagccgctctcaagctttcttctcgaagtttaccagagactggaaagtcgacgacgatccggcatgcgttggcacttccgtccggaacgtccgataaggatggcatagtcatcgctgacactgtattttatgcggtcgacaagcccgagtcccagtacgactggtcgcccatgcaaggcgttcacaacggtccactcggcggggcggccagccctgcagagtccgatcagacggactcattccctgtagatcccagaacgggtccttcccaacgaaagatgcgggcaaccgtgatcgtgtgtcagatcaagattgtcgattcgtcaggttcttcctcggcccgacatgccgttcgggcctcgtcagtcgacgtatttgaggagctcaacccgactaggagtaccggttggcactatgagcttcatcagctgaagaacgacaacaggcgattgagggatcaggttgagtcgatgagagtcgctcggtcaagagctacacagatgtcaaatcagcccggcagctcaaacttggctagtaccagcaaacctggtggtatcaatggtggacagacgaaaaagtcgagtatagtatcagcgagtggaacatcggcaggcgcgtctgcgggactttcaaagaggaaacgaatgccgcctgccacgacggcttcgtcctctggtagctcgccggttggcgacaagggtcattcgtcttcttccgctaacacgtcttcggctccaactcctgtgccaacaacggcgtctgtacaggctcctcatcctcaggtgttgcctgctcagcaggcttcgatgggctggacgagttccaacctgaacgaatcgttctacgatgggtattctgcctcgacggcctcttcgaattattcgacctcaccttcagactactcgacttcgtattctgccaaaaaccagcaacaacaacagcagcaggctcaggactcatcgtcgtcgacatcaaacatacagccgactactttcaatccccgagcgcactatgctcagcagcagcaacaccaccatctaagtaattacccggccgggacatctcagatacctcagcttcaaaggccctatggttcaccatcatattcgtccactcagcagccgacctatggtcaatttcagaagtagttttctttttttaggagtattttcgggcccctttcttttcttttctcttacttcacatcatagttcctcaatctctctgccactggtccttttataaacaactcagattccgggtttcttattcttttcatctcttttcgttctttccagttgtagcatacctgcccctctcctccctcattcttcgggtcgcctgactatgtttttgctctttttcttacctctcttccctatagttccgcgattcttatcctcgccttctggtcttttcctcgccttctatctttgtagcatatcacagtgcttcgttctctatcattctattttacccgtatagcttccctcttctttcactctaattttgacaatgatgtatcgctctaaaaaccgatgatgtctcgatctcaactatgactgttattcatctcttcttcgtttgcaaccgttcctttgttacttatatatccttttgtctcgttttcttttgtccttgtcctcgttccttttttttctcttctttttcgcctgtcgaatatatgctgttgatctcgcgaccattgtcatcgaacgtaagaaaggatggaaagaggcaacaggccatgcgaatgaaagaagatgtttctgacggatacagccaagtttgatgattgtttgagtgagtggggtgtcgactcgacttgttcgatcatctctttttcccattgttccattgttcctttgtttctttatcttcctctcatacaatgttactatgtttgttcataccaagctgacactcctctacaaaaactttcaggggctctcccagcagagcaatcggtttgatagattaggcctgtcgacaatctgaggagaactaaccttgactccgacctgacagttaaaccacatcgggacactgacaagctttcctccgcctttgcttgatcgctctcgtttgctccgctccagcgctctctcaggaacacataagggagatggttcctggagacgcacaggccttctcatttgcgtgttccctctttgtcccttcgacctctccttcctggcattgtccatcttctgtcgttctctctctcctctctatcgtctatacatttttaatactggatccgtcacctgaaatggaactcaatgatgtgagtctatttgctcctcttcctctggtaggatagcttttggctgatgtctgtctccgcaaaaatccgtttttttcctggccgttcccaaaacagctcgtatcgtctcttgacaaatcttctccgtttaggaagactttcttttgtgaacacgcaggatgctccaaggcattcgctcgaagaagtgatctcatagtaggctaacgttctatctatttgctcctgaaataatctcgtgtcaatgacgattgagggttggctgaaactgcgggttggatcggacctttctagcgccatgagaagatccatacgaactgtagaccgtttagttgtgaattcgaagggtgcgacaaaacgttcatccaacggtctgcgctgacggttcatgtcagagtccagtttgtccccttcctcttgtttgttgaggattcgttttcggctgcgccaggcagaatgtcctctctttctctttcttgcaaactggtacctgacttgatgccattgcaattgccattgtcttgcaaattgacgatactagtacgggagagaagccgcatgcatgccctcagttcgtctttagtcttcttctctgcgtattaacgaaaatatcttgaccacgtgcatattctatgttgggtctatcttaaacagatgccataaagcattctcggactcttcgtctctagctcggcaccgtaagtcgtggcttttgtttagatgcagaatattttcaatccggtaaaggcgcttgatacctgatttgtgacgatcttatgccaggtcgggtccactctgggaagcgaccatatgagtgcttggttgtacgtaccgctctagatcctgacacgtgtttaggtagtgtcatgactctgatgttcttctcgctctttgtagcctggttgttttaaaacgtaaggaatttctgtgatcgtctcctggcgtgcgccgtgtccctgtctctctgatacgacgatgctggattacatatgtagattctgtcggaaaacgacgcttgtcaaacacgtcgatcgagttcatacgggctccctcgacttgagcacgacgaccgagagatgccccaaaaagatcaagatccgcgctgttggccaaacccaacggaaagcgcctgttgcccacttgattgaaccaatggaaccattatcgtcgtcatcacccaatcgagctgttgcttctcacaacagtctctgtcacccttaccctccagccagttcgttgctcagcgttccatctgatatgcgtgttactcaaaatctgatcttactatttctggtctgttcttagttcacagctctttccgaggtttaattcgaaccgtcaaaggtaccgaaggtgctatgagtcccgtgcctgaatcagaggctgatgaggaaaccttgttaaaagttgaaagccaagatgaaagcttcgatctctcagtgcatcgaagtggagggggtcacacatttcaaggatcttttgagcagtccactgtggatgaagcttccatgaaagaacaatggttagcaaacatcgcctccaagtctcccaacggcttcgagcactgcagagctggtcgaagcgtgcattcagagccggcgtctccgatccatcctcactctcatgagctggcatgtgtgggcactcctcctcagcaatctggatctaccggtcttgatccgatttactcgttcgcacagccaccgtcgcatcccatctatctgattcaccatagtgaagcatatacatatacccgtcttgttcggtcagactcttccaatcatacggactctcgaactgccgcgcaacattcatatgtcctttcatccaactaccctcagcgaatcctacgcctcgagcatagatcccaaaccagaactatacccaatcgagagcggtcaaacagctctcatacgtgctcttctggctcattgtctccaccatctattcggtcactcgaagatggagaagaagcctattcagggctcacggactctgtaagatctcacgagagtgacggatctgtgttcctggcgaattcatatcgatcgaagacggatcatgcagggaaactcaatatttccgagcctcataccgtcctctctccggaaagtcgtgccccattccaacgatctcacgacctcaccagtccgactttcaccaacagccagtcgactacgtctttacagacacctgcaccgaaaaatctttttgatattgagctaactagtggagagaatcaaccgcagaccgtttcgtcccttcacagcaactctcttgcacgcaagtcgactgctccctcccatcatgcatctatagctcccttgatggctccggtcaacgaatctcaaacgaggttgattcattcgtctgataggtcggcgactgggcgggatcatgcttactccgactaagagacttcgcccgagtcagttgtaacaggttggcatgtgaagctcgatgaacagtcccgaaacctgtattgtataatgcgagtacacatcttgcgtctgtactctctttgcgctgtgtgtgtgtgtgtgtg

SEQ ID NO: 1673 - DNA, 28341 bp, Xanthophyllomyces dendrorhous
tgtgtgtgtgtgtgtgtagcgtcctttctctctttctgtctggtcggcagcgtccatttgtagttgtatgtttcccctcttcacgtatctcgttatgaccaaccgtaacacacctttcggttctttctgctgtcttggaccaagctacctttgttccatctagagacccttttcttcttctgattaatgcgaaacgttctcctcataaactactcttaacgatctgtactctcaatctcgtcatacctgtatccttcttcttaaccttcccgcctgtctcaacgttcgctggagtgtatgtgcgcgttctctgttgtctatcttgtgtatatatcaccgtttattttggaaaagaaagaaaatgatatcaattctgcaagagtttgttcttttcttgtcctgtctcgtccatgtcattattacttgagatgtggtagagacggctgaactcgaggttatcaaattattgtggaaacaaacataatttcttcttaacagaatacatgcctctcagaccaggaagaagacgaagaaaggggaaggggaattgatgaatcagagttgagcggtagaaaatcaggtggtttactctgattgaggattctcgaatgctttgaaaatctttacttcttgaagaggtctaccaggtttccagaaacaaatcacgccagcacagagtgatataaaggatcgaaaggattagtggagctcaataggaacgaaccgagtagaagaaaacaaagaggatagctgatagaaactataagactgacttatcatgcgcgtctgtacgtacaactcctagcctatgctccatgaacgcaccaccataggacataagttgagacaagatgagacaaagtaaagattagccggccaaaacacaggttagcgaacgaggcgggcgcttcggaagaggattttgcaaaacgatagagaggagggtccagaacagaggacgaacctttgaacgactttcataccggagctgactcggccaaagatagtatgcttcccgtccaaaaatggtgtcggcgcgagtgtcaagaagaactgagaacctagattggataaagcagtgaaaggacgatgacaacaagagaaggggtacccattgagcggatcattcgcctgagaagacagtgagcagagaaagacgtaacataccgttagaattgggaccagaattagccattgcgagaatacccgcaccgacgaatctcaaatgagggtggatctcgtctgcaaacttttcgccataaatcgatgttcctcctcttcctgtgccagttggatctcctccttgaatcataaagtcctgaacaagacacgcatagtcggagagaacgattcagtttacgtttttttcttcaattaatcgactgactattgcgtcgatgtcgaaatgaggtatggaaaccaacgaaagagacaacaaaagaatccataccgatattattcgatggaagatctggttgttataatatcctcgtttggagagttccagaaagtttttacacgtctgtttgtatgttttgttggatcggaggcagggaagaagttgtcagttaagtgagcaaggattcattcacctctcgatcctctctcggccagagaacccaaacaagaacagaactatctgactcaccttgggagcatgttctgtgtagagctctaggacaatgtcccccatagaggtttgtagagtgacgtactgagcagccattccaaaagacgaaaaggagagagagatggttagcaacgaaagtagaacaggcaagttttgagattatctaatattcactctgtttctattgaccgttatatcatcatctacctactccctcgtctttcatctcatcgcacccgatctctcttcgttcggcttacagacagtgtgtccttcttgatattgtcaggtggagtgtactaagctgaagaaagttttgtcctttgtgtgctcgtcgaccctcgttctctgatggtatcagcctacaccgtccagtccgtttcaacccagttctagcgtgttgagtcccagcctatgggttccattcagcagctcatggatatggtgcgcacatcccttctctatctccgcacaaagtctattgatctgacagtctcgatttctctctgacacttccaaactctatttccatcggatggcctttgaatcagggtgcttcccgagcagcagcggccgccgcgttgactagagccaaaggagacgtcatggaggccgcggtatgctctcaccatcgcaccttctgtgatagccaatagagaacatcgcactaacaagaaaatcgggatactttgactttgtcttcctcctttgtctctcaggagctagtcttctcgggagaattcgatcatctttcagaaggacgaaacgaggatgtacatgtgaggacggttggcttcaaaggatatgatcaaactctagctaggttggctatacttatcctagtcttccggctcgttttccgaaataggatccggctaaagctgaaccgaccgccgagatgtcaggcagtgatatggaagagagcgaggatgatggcgatgaggaactgagcggtattgaagatgtcgattcatacgacgacgataactctatagacgagctcggcacagaggacgactatgacggttcgtcccctttgattgtattcttctcctgcgcgcacaaaagttagccgactcatcgaattcatatgccctatgtttcttatcacgacagaggaaacgtttgacgacactgccgagccgaaaacgagtaaagacccctacgccggtatatttttctcaaaagatcggcaggaaaaggtgattgaggtagatgaggaaccggaagaatttatcttagatgttggtggtactagattcaagggagagttgtgtacatttggagaatggatgagtggctgcccggaaagaggggaacaggagtatctgtttaacctctggagagacgtagccgaacatcctttggtctgtcggtgtggtcgctcatggaagcggacgaagaaagactttgtaagttcttttccttttaaatatatatatatatcaaagaatcgtccataatgtatcaacgtcgttgatcagtgtgtctttgcctttcggtttgtttatgatcattctggaagtagcttcccattcttgtgagtatctttgtctcattcgtcattgatcattgtctttaatagcgttcaccaaacagttcctcttttcgaacacatttgaagccaacgtatcctatctacctgcagcatatctcttctcttataaacaaatcatgtccaaactgttcctcagtcttgtgcatggcctgtggggagctggtagaaggccatctcgggaaggatgtttcccagccatcagaatcaaaggcaaaggtaacagaatctgaaccaaaggatctgttccattgcgcgaatctgcagggagtcttgatgcagataggttcgtccatcatctctaccttttctatccttccttataggcacatcaaaccagctaaaaccaaacgactgatctcacgcgctcaaaacattcgttctctgttcaatcacttaggcttgatcatgctcactcgcctgttctcccaaacttacaacaccttagagtattccaattcccgtcaaatacctgctacatcaccttcttgttcttccccagtgaacaaaaagtcgagacttatgagcgacatgggtccgagaaacacttacgcagggggaaccggctattcagggagcagttctgaagacgtatgtgctaggcttctcttatctcatccgcaatactttcatgatatagtcaacgaaccgaactcatagaagaacttgcttttgtaattatgtttgggatcggatacgaatgagcatacagcgatccggtctgaaggctgcacatgctgagcaaaaacgacaagataagctgctatctacattattatctcaagtccgagtgtatttacccaacctaagacgagacggtggttcgacaacttcggattacttggttcatcctactacgttgacggggatccgaaggaggttcaacatgattctaagtcgactgctgaggaatgactgtatgttctcttagtgttttttatggttcaaatgggagcattgcgcatctgataatattttgtgttacaacagctttaacagatatggctgctagatcgtctttgtattctgaactctttaaatggcttgaagtatgcgcttccttccctcaaaccgaatgcgttgtgatcatattatattttgctaaccgatccttcttcgcatgttattctttcattctgtgtgtctattaattctatcagatagtttccaaccatgaggcactctcggctgcactatccatgccacaaatgattcgagtcggctctaacgttcacaagacgacatcctcggactccagtaagattgtagaaagggaagtcacatatgaaggctcttccggtgagtctgttcgtgccatctcacatacatcaacacattggctgaatggaaagaaagctatactctaaaaggacctcgagagcttttggaaaacatagttatacaagctttagcagctatgaaaggatttcagatggtctgtcgttctactttcatgatcttatcgctatgagacctgatcgaaatctaaccgactgttgcgttctttcacgtgccatcaaacaagactgaagctcgagatttcgatgtaggtttgaccgaaccaagtagttctatcgttgttgcacaacaggatgacgggtcgcttggtttgaatgaaaaactgaaactacaagaattttggtgcgttagattctctaatccgagttctgcataacactttaatcagaaatgaataactaacgttttatcaattcttagccaacgaattatctctacggctaactctattgatcgagccttacttgatcaaaagggttctcagttcatggcccgtctacaatcttctttatcacgccgacacggattatcaatacctacctcagttgatacgaccaccgatgtggactacgaagatatgagaaagatcagagcgaactacgaggcgtgggcgaaggaagtccggtttgaatattgtgatttgtcgatcgagtcgaaagagggtgggtatgatgtagttacttatcgacagtaggttatattcgtttcagttatgaaaataacaacgacaggctcctcactaatgttgatatcgtattctcttctcctctacaaaacatgaccctgtacagcgcatactcaaaagaagcagcgctactccgaggagcgaatagtaggttcttatgtatttgacccatttgatacacacattctgatcacagcgtcggttggtagttcctaagcgatcgctcgcaattgcaaaaggtaagaaatctctcaatcacttcaaggcgtcttgtttttttcctgatagattcgactggctgaccgactgtgaacgtgcgcatctccatgaggcagagctggccgtcttatcaactaacctaccagtagccttcgatggcagtatctttcttcgggttgatgaggtaggtaaaaaattacctacgatacatagatcacgtctcgtgctgattggatcaatctttgatatttgaagactcgagtggacttggtaaaggcactcatcatcgtaagtaatgtcaattctgaaacatcctacgtctcgtaaatctccatcactgaaatgtcatgcggattatagggtcctgcagatactccgtatgcgaatggttgttttctatttgacatctttctacctatgaggtttgtcgctaatttcctccggttgtgttcatcggaatctccttcttcgtttgtctcgtgttctacaatgcatctgcttattgtttcatcttgaatagctacaaccaatcaccaccaatcgtccggacaatgacgactaatggaggacgttatcgtttaggacccaacttgtatggctcaaaacgcttgtttgaattctctcaaggatataatcgctaacaggcatctaatcacgaatgtagatacgcagaaggaaaggtctgcttgagcttactcggcacatattcggggccagtaagatctttctccgtcttcatctctcacgctcgggatggttttgaattctgaatattccatatctcgtcttgtttgatcgcaacagggatgggttccaggcctgagcactctacgtccgtcgatatattcacgaccttgtacatatgagagctcagactgactcttattcgctttcgactttgttcagttcaagtacttatttctatacaggcaatgatcttgaatgacgaaccatacttgaatgaacctggatggcaaaactctggaggttcaaccgcttcgaagcagtacagcgccaatatccgtaggatggtgtatgtatctctacttatattcctctcgagaagatgagtgctgtggtcgttctaacttcagatgattgttttgctgatggttaatgacgtcttgtagagctcatgattctatgcttcataacatcataaatccaccctatccctgtagctccagtttcgatttatctgtaatctaaggaaaacactcgtgctgatctatatgttgtctcggctcttccacttggtttagtcgctgatgtgattcgcactcactttcgcctgaaatcgcgggagatctctgcccaactggatcgatggttcgaggaggatgatggccgtatgtaattgaacaacgttttactttactgtacatgtgctgacaacatgccacttgggaattggttgactcattgtccgttcaagataaaacgaacggcgaaaacacagggaccactgtaccgggaggaaacctcatgagtaagtcacactcgtgctttctcttgtggttctgcccactcgtggcttgtctcttgttgttctgaatgaggtgcttaccattgtacaattatggcgactctttattttatagaagaacatgttcaagagatcaagagacttttcggcaagttggagcgtaacgaacccatcaaggaaagcggccttgcatgaaatcgaacctgctttcatgctctatcggttcgacaatggacttgtattattctaaccactcatgatgtacttttatacaactacgcagtgatctgttgatctgctctacggatgaaagaatgaaggcaatagagagcaaagaagagagacacagagagaggttgagataagagaagatactgagcaagacttctcccaatgttcggatttggccgggaaggccagggtcaatgtcatccatatgatctctcctcgtccttcatttcaccatctccttccacctatatacataaacaaatttggttgaagctatctcgaatggaaaaacaacatctcacaaatcaacctcttcgctcaagtttcagtgagggatcatctcatcgagcacccacaagtttcaattatcccatcaaacgaacgtcatccactccatcagcacctctggtggttggttcagatgtacatactcaaccaaccgtccttcatcaagctacacaaggcaatctaaaatctgttcagacaactggttcgattctaacccggtttgtttcggcgagaacatcttccgatggcgatgatcctcagcatcaacatcactctcaacgaatgtcatttcatataccctcagcttcgatattagaagcgataccagcttccaggtgagtcaaatccctctgcttttgatctttctctctcgcgttgacagcatctccttatctcgaaacgtttctacgccaaagatctggcgggactttgggtagtgtagtgtcggcagacgagcgaaaactagcaaagatccatcgatttcccatgaatgcggatgatgaaacgcataacggtgcacccttgattgactctctttcaccaagcagacggagaactctagatgattgtctggacgtaaggacgaccaactcatcttttgcgatcccatgattcttcacaagggcgtttcgctgacgttggtttctgtgtatactcgaaattgccggatggacacgaacaagctcttctctgggagagcgtccaaaacgatcttggaacggtcatggacatcagatgcaatatttgaagatccttccatcgagtaagattttgttctgcctgatggtcaggagtggacttcttctttctcatcggtttactgaatcagtatactattcatcgggatggcagatgccatggctatcacgagtactcggcgcattggtcctcggtcgtacgttctatcgcatatctacctgatatcaacctgcttgtcaccagccgatcgaatattcaaagctgataggaggaattgcatcggaacatcatgtttgagaaaatcatcagccggaatcgaggataattcgcttatggatacttccctcgcgaacaccctcagaactccgatgggagcagattcaagaacgtcattcacggattctcaagaccgagaaagtaagtgaactctctcttgaacgatcctgccgtttctctttgttctattttctttgggatttacagacgggttcatatccttgtacgggctcggcagatcgttcattcgatcgtggtcgtcgaattggacggtgaagatcgaattatcaaaatgcaagacttgtgggatgggaaagagctatcgtctgggctacgagcagtgagtttctgggtatctttttcatgtcaatagatgtagactaacagatgggcttctgaacggatctcgtttcggtctctttttcccttctcttgcctctaacaaaagattccccggaaggtgaacgccaaaataacgtctgaattctcgggcaaaccgtccaacgattgatctaatccaacacgatgtaacataaaccaagtaatgtgcaaatcaaacgaaagtagtcagcttgatcaatctgtatgcgaaacaatatgttgtcttagggttctgcgtgtatccatgtcatgttttgttcagtatcgctttgaagacaggagtgataaacccagtcttggctgataatacatactcgtacgctcacactcccacttctctctttgttcgttttgcacgagagaaagatggatgtagatacaaaagttcaaagaaagagagagagaggaatgcggatccaggtccgcaatcatatgcgtcggctgttggacgacggtttggaggggtaggccagaacgcctggctgagggttattccaacggtctgtatcgtcgtctttgtcgttctacctggaagaaggtgatggtttctacgaatcagctcgatatactgtttcactggttggtcgtgaagacgaggacaagaatgtttcgaggcatgtatggcgacgggcctgtcgcgctcgcccgttctcatagttaatcgacattctctcaaaggtttgtcagtcttggtttccttctttccgttctcagaatttgcacatatatataatacggttaagcagacgacgctttggtagtcggatccctcaccatacagggccacttgacagctcctacctcggtcccgtccttcccggggagagaagaccatgttacgactctaaagcctgtggttgtgaggagcaatcaagcgtcaggaagacgagcctttcatggtatatatgatctggaagtgagtcacataccgttcttttcataaacaggtcggccctgtcattgaatatcgcgatcaaaattaaaaaacattcgatgaagaacttcatcagacaggtggaacgaagaatcgagtctgactacagccctcaagtctgaaagaatcgatacgtactggctcagtagcttcgagatatatgggaactccttgagattctgcttggtcgattccccactgaaggagcgcttttccaacaccttggccttgatggtcactgtgaacgtagatgagttcctgttcagtcaaagagtgggaaaaacatgaaagtaaaaagatgtaatgaaagaaggggtcagaacatcggagatacaatggcccatagaggaaggaaagctacttaccagaaaccagtgaggtttgcctaggaagtaatcccttcgtttctcaaagatatcttttttgaaagcatcgatgaacgacatgtcgaacccatctccatcctcgaaatcaagtttactcgatttagacctttccagcttttctgctctctccagtttcgcagctttctcttcgggaagaagctctccgccagtcgatgttctgtcgacaggagaccagtagaaggcggaaccgacaattttggatggatcggaggacagggtggctttaacaaatcggtagtacggaggatcgaacggcgcttctctcgttcgaaggttgactcctcttgctatgtgtatgagagcatatccgttgatgtctcagttaaaatttccttttctttctacccggagagtaagacacacaaagaatcacgaagaatatgatgactgaccgatccgaatatctagcgcaggttgcttctctactggttccattcttcgaacgataggttcatgtttgaaagcattgatcctagttgcctctatctgaggccagtctgccaatgtagcaggctcaatgatcacttggggtttgtgcatcttgatgttcaaccaagtgtcgcaacggtcgagattcttttttcttcttttggtcgagaaaaaaaaacggcttcgcttcgcacgcgcgcgggggatcacccgcatattaagcggtatgacgctcatcaaccggccaagtgttcttcatcataggtgaaggttaaaacggaatggataggaggagctaaccacgtttttattttaattcgacttgggcagcctcgtccatagtgtctgatggttatatcgtcatagaaaggcagcgcctggcgggttcgtcatggccgtgatcatctgctttgttagacattgtccatcagtcacctcaatgacagtttcccgacgccatcactaagacacaaacgtatccagcacgccatgtccatcactgaagaaggtagggtctcgtcgagccagtgcaaccagagttacagatgaacatcaggccttgatcagacccgacttatgaatatggccgttattgtacacttcttggtgctcctcgagctgctctttcgtgtttttcactttctttccggatcaaacgagactgctcgtgtatctatctgtgcttgccatatgagcatcccatgcctctgctcaaatgatgctggagctacgatccatcagagacgacacaaaacggggttgtatgaactctacatttcctaatgttattggaattttctgtaatgcgttcttcatctttctctaatgcttttttgtagtccgtcttttcaaccttgccagcgtttcgcgtgtcttctttctcctttgacggtcatcactttcttctctcttctcgttctttcttccgtccttccttctctctcttcgtctgaacatcagcatcatcatgggcatatcagattacctcgttctgggtcagttctgtcttttgtttgattcttatcttcttgccggcggtcgcctgtcttgggtatatcatcagcaatgagaaacatgatgttccccccgcgtcaatcactgaccttttggtcctctacttctttcctgtcgaattgatcctgattgatacgtgtgccggctgcttaacagctttcacgcatcctgtaggtgttttatcgtatgcttcatgttgatgtttagtcacgcggactgacctggccggttgattttctgtatgatcgcttgtgctaccgtctttcttggaaatccttcccatcaggccgatctgcgagctttaatgcagtacgcgatctggcatgagcctcgaaggaatatcactgcacaggaggaacatgcaacatccggttgggaccgagaaactatgaaggaatgttggaagtatttggatctgacttcaagaagtttcgcagctgtcatcaaagagttggacggagatcttacccgagtcgtacgtgttttcatcttctctctcctttgagatctggtcgcctccgcattttcttgttgcagaagggtcagaagctgacaacaccatctctactgttcgggacacggctagatctgtttattctatctcgctcttcgaggactggataccattgaggatgacatgagtctatctaatgatgtgaagcttcccctgcttcggacattctgggaaaagcttgactcccctgggtggacctttactggatccggtccaaatgagaaggatagagagcttcttgttcacttcgatgtggccatcgccgagtttgccaacttggacgtcaagtgagtttccctttatggttggatcatccgctcgacagactcgaaacgctcatcactttggtctgcttgatgaacagctctcggaacgtcattcgagacatcactcgcaagatgggtaacggtatggccgactttgcttctctctctacgccctccaagcctgtggccgaggtccagtcgaccgaagatttcaacctatactgtcattacgtcgctggactcgtcggcgagggactctcccgactctttgtcgcgaccgagaaggaacgaccattcttggccaaccagatggtactttcaaactcgttcggactccttctccaaaagacaaacatccttcgagatattcgggaggacgccgacgaaggtcgtggcttctggccaagagagatctgggccaacccgatctatactgcgcatgcaccgggcacaaggtttaactcgttgactgacctggtcaagaaagaaaacatcgacaaaggatcaatgtgggtgttgagtgcgatgacactcgacgcgatcacccatactaccgacgcactggactacctctcacttctaaagaaccagagtgttttcaacttttgtgctatcccggctgtcatgtcgattgcaacgttggagctatgcttcatgaacccagcggtgttccaacgaaacataaaaatcagaaagggagaagccgtcgaggtgcgttcgcgcgttctgtttctacctttcataacattggaggttcttgactcttaagcgtcttccaatctgatgcctccaattatcatcatttttgtcttttttgctttcctcttgtttcttttcggcgtgattcaatccagctcattatgaagtgcaacaaccctcgggaggtggcatacatgtttagagattatgctcgaaagattcatgccaaggctattcctacagatcctaacttcatcaagttgagcgttgcgtgtggtcgagtgagttgatcgatcgatccatcttttgttttgatcatcgcgagacttgactgatcgattactcaaaacatcatcgcttctccttcttgctctctagatcgaacaatgggctgagcactgtatgttcctccgcccctccttcaagtttcctctcgcttcatctttgttgagaagagggatctgatgtatctttctttgttcggatcagactacccctcatttatgatgattcggccttcgaatgaccctcaaaaccccgcaccctcaacggcgcttgaccctttctcaggagacgctcgtttaaggatagcctctaagaaggctgagatcaccgccgctgctcttgtcaggaagaaagcccgggatcacgctaagtggagagagtccaagggattgcctccgagcgatccgaacaagccggacaactcggaggatgttaattgggtattgatcggcggtatgatcgttggattgttgctcgtgatgggcgtgctcggtttggctatcgcttgggttgttcttcaggtgcgttcttccaaagagcctttctctcatgaacacgcacataggttgatctaattctatcttactctgtcatacagtttgagcaataatctcaagattctagtccatcctttcgctcaacgatctgcttcttctccttctccttctccgtcttctctggtttcttttcttactttctgggatcttccttcttgaatcctccgatccaatgtaatctgcataccctcgctttagtagaaaccgatccttcattcgatcttggcgaaaatctaagcaaagagaatcacttttgtctaataaaatttcctttaaagagtcggctttttcttgtggcgaagcttcatcccgtcttcctctggaccatctcttctcaatattctttgtgctactatatgatcaagttctttgaaatcaaagaagaacatgtatttgattttgaggttccaagaatacaaccggcccaagtcgttcttcgcagttttcatcagacagcacatatctctcctcctctctatagaagccgtatggggccaatcgactctcatgggtagaccgtgcccttttgacacggggagaaagagaacgaaaggacacttgaccgattcgttaataaagccgtccccaccttttctttaatggcaattcaagaagagaaaaacaacccctgcgcgcactcgagtagtcgatcagaccttccgaacgacagatatcatttgctgaaatcgaccggattttaaagctgctgccaggtcggtgaatccccctaggtgatctccttgtacaaagatgttgggcacggacttttcgacccggatgagaacgtcgtgaagagtttgaaaaagattatcaacataatgtgtctttttttcttttttctttcgtaactctctagagaacgaggagacgtacggtctgatttgttatcgaacgcaaataatccaggatttcttccccatcatctagttcgtctagtctggtacggcatatacacacaccccatggagaaagacgaacggcattaagagctgacttcccaccgatttatgattctatgcgtagaggaaaggctgactcgtagactttgacggattgaccgacgggaagatcaacgttctccaacactctgtgtgcttgcttacagtatctgttgtatacaatatcaatcgatcgtcgtccgttcagaaggtgtggacgaacagagtggagtagagaagagagaaacgaagaagtcgatatctggacgaacgggcaccatgtctttgagaacacggcaataaagtcttctttgagtgctttatcaactaaagcttttggagagagttttgatgagggataggagccctgtgaagcattcaagaggatagactacaagtcagaatagacagcatcggaaagagagaaatcagcggaccgaaaatgcgaacccagagagagaactgcctggctgaagagatcggacgagcaggaatccttcttgagccggatagaaacaaggtctttgctagtgcacgggtcgacatatgagagcgagaatgatgagagacgagaacgagaacgatggtgacgatgatgataggatgtgagtgagagagacgacggaaggtagaacagggaggtgaaggtgtttttcgattgcacggccgacaaccatcatccatcccatccgacatccatcagtcattcatccatgccgtcgataacaaagacaaacaaaccaacgagctctgctgtgaagaagccattcgttcaacgaggtcctcatccagctgacgtcaagttgccgtaccttcacaagcgattgcacactcagatccaggacggccatctcttcaacgcggtcaagacgtgtgacaacagttcgtccttcctttctctccttttctttgtgtccacatcgttctgctccctctcctttggtcgtgtgaggctaagatgatcgtcttatgaacacaaatatagtcctcgctctttcgcctggttcctcactcgctctgctcacaaagctctccctcctccttcatatcgaccaatacacctctgcgcttactctgctcgactccatcgccaaggatggaacggtagccccttcaacaggcttcgagcgagcttactgcctctatcgactaggaagagaaaaagaggcaagcgaggtcctaggatctttagagggtgatcaatttgaaggagatgggaaagagtttttggaggcccagctggttcgtttaactttttccatcctagtacgagaagccctttctcctccgctcggagtttgcttcccttgttctcaggatttttcaatcctattcggctttatcaagaaaagctttttctgacgtgaaaagcatgtttgtctccttggaacaggcctaccgagcaaacgattatgctaccgcgtccgacatctacaactctcttctgactcgatactctgatgtgagtatcaccaccgtctgcctctcgttctagaagttgattactctggcaaattggctgatacatcttatcaaaaacgttcatccggttgatcgtaggatcacccggctcacgcagatatcctagcaaaccaaacgctcgctagttcccttgctgatttcctcacaaccggctacctcaatcctctacgtgaagctgaggatgaactcgacggcgatcttgacacgctagaagaatctatccctactttacctcccaagtccggccaaaacgtgaatgtcggagatatcgaggaaacgtttgatagtcagcaggtgaagaaaaagaaaaggagacatcgattaccaaaaggtgtgatcgaaagctcgaatcaacctttcgaggaagacgtaagttcgggatcctattttctttctcttcctcacattaccttacacgtctgatcttctgacattttgtgaacctctttcttctggatttgttttccgttattgattcgttttcgtcttgtcagcccgaacgatggattccacttcgatctagggtgaaccaaccgtcagccttgactcagatgagcaatcgacgttcagctccttctaaaggagctgttggcaagaagaaagaaggaatgggaactggaatgacacagggatcgtacggacctgcacctgggacaccctcggcggctagtggcggaggagggaagaaaaagaagggccgaaagtaaaggatgagaaatggaagcaggggcgttttgaactaaaacagggaagtacggagcgaggtgttttgatgtaagttccgtaggatcataaataacgattaattaaatagaagaagtgaagaagggaagcagagcccctaatctagtgggatcagccatcatctatgggccaaagaagaaattcttgctagtttcttcttttctaaaggatcagatagagagaagagttatctagattgtctacaagatggcggaaagttttatggaaatgggaactaagttgggatacagacaaagagatacgaaagaaaaatgaaagaacaaagcaagaaacaataataggtgatgaactgtggggaagagtggcaggaaagaagcggtttgctttattaccacgagttaacagtgttgaggggagtgccttcgttgatccagactcttgcgttattgatttgttcaatctcaacgacctgatgtttacacaaaatcaataacatggaaaattcagtctttgtatcgtctgatcaaaatgtagagaaagatgtacctcaagcattccgttaacgttgcaagcgaaatgaggagtgagctgacgcagtacacaagacggatgttaggtaagcatttgacatttagaccaagacagaagaagaaaggaagtgaaggaggcaaaacacgaactgtgacatcgtcagagttcatcaagtaaggatcgatctctgagctacattcgttgtcgaatacatccagacctgcacctgcgatatgacctgacttcaaagcttcgaccagtgcagacgtgtcgatgactgtttgaaccgttccaattgattccacgacgtgtcgaatctctcaataagcgatgatcatacagaggaagaggaagcgaaggaaagagatatagacaaaccttgtccacgagcagtgttgatgatgtaacttcctctgggcatggaagagatctccttctcacccaccatcccttccgtcgatgggttcaacggcacatggatcgagagcacgtcgatgttttcgaagaacttatgagcaagcacagaaacacgctcggaagagttagcagttgaggtacatgatagttgattttcattcgacaaagaaaccgaaccaacctcttctttggaagcgatataagttgcaccagcggcctggctatctggaagctgtcgtctgttgtggtagcagatggtcattcccatagaagttaaatatcgagcgacgtgctattaattaaaataaatgacgagtgaggaaggaagaaatgcagtcaggatagatatcttgtccaacgagagatgaagccaaaggggaataacttacacgcccgatgctgcccatacctaagagttgagagccaaagaaggacatcagaagagattatcatccagttcgcgaacgagatgtccaaagaaagaatacgcacccaagatcccgactcgaagaccaagctgagatcgacccattgccttgttggcaatagatgttcctccgacctcccattcacctctacggaccgaccgctcggcagccgtcgtctttcggagggtcgtcaacgtcaagataacctataaccaagaaaagagacaccggtagtgtgagtgatgttagatttgttgttgtgtgtttttaacctcgatgactacttacggcatgcagcgctgtaggctcagcgaccgcctcaggagtattgctataccaaactttgtgttcgctcaaaaatttgactggcaccttgtcgaatccctacggttggcaagcgtaggagcaagagaaatgcaaagacaaacgaagttgagctcgaaaatagttcactggagtatttccaaaagacaaaagataacagaatcggaaaacataccgctccaggaccacagataagcttgagagttccctccgggacaaaaggcggcaagaacgggatccagagcgtctcgtctgtgggaagaagctgatagactcgattgatccagaagacttcagaggagaaaggtatagaacaaacaaaagaagattaggttttgaaggacagaaagctgtgctgcctctaaggaaagagaataccaaaagactatgaatcatacgcacgaacacaatggaatcctccattctgaatggccgaagactttacccagtccaaaatggcagaccttccgatgacttcatctgggatgtaccagacctctgtttgaagatggagaagtaggaaaagcaagaaaaaggggaccagcaggagatatgaaggccatcacgataacgatagaaaaaacaaacaagcaaacaaaagaaaagttgttctagagtgtgagattctgcgatctctctgcatcacgaatcagaaaaaacaggtacggaccaactttgccagatttctggagctcattcagctctttctgggctttttcagattcggggcgtcctgtcggagagaaggaggcaaagatacggaagaggaagataacgagtaagaaagatgttgacggctatcgtgagatcaagagaaatacatgaagccttgactgaccgacagagaagatgttgatcatgttccgagaagggattggtataggaatgagtgcaattgagtgactagataagaaagactgaaagaaagatgtatcacttcatgaaccaaaaaaaaaagtcgtaggagtaaaaagaacgcccactggtaaattcttggggatttaggcgttcgccgaggggagatcactcggcactcggcgttgggctcggcccggtctctgacgccgacgactgcggttggccggcacaggcagctttgcacagccttgaggtcacctgatcatgcgtaaccatccgtgccactttgccttcaactggtccgtcttccggtctctgtgtcgattctctttttttgaccagactcgctcagacaaagtacaacaagagttgtggtacgcctcgctatgtgtacctagattctctttgaatagtactgactatctttgtgctgccacgtcatctatctagccaagcatcttcacgttacatatatactctcattagctatggctagaggaaaccagcgagataaagctcgtgaaaagaacgagaaggcaaagtgagctagcttccttgcgttgtgtgtctattcacacacatacagagatcattattcgcggtcttccccaattcggtctctttgggaggacagggaaaacacgactaacaagtgtcttcgaacattttctatcctggtttgatctgacaatagggcggccgagaagggaaagttgaccggtaaccctcaggctcgaagggaagcgtgagttcaaaccgtctgcaacctctcactatcttgatcggcatagacatcacttgcttggttccgagctgacataccgcttgtggctttgtttcgatctggtttcattcaatcaaatttcattcctcgggctttcacttgatggacgcgaatctcgatcatagggacgcggccgctcttcaagccaagattgctgtacgtatcctttttcgccttccactccaacgtcctagctgaccatagactcatgcgctcactccccctcccttcgtttgaaactcggaaaatctcacaggctaagcaaaaggctgctgctgggatagtagacgataagccggcgggacctaaatcgttcattaaaccgaaataaattctgcccctcccccttcccatataatcatttcattctgaggagaatcaatccacaagtcgaccacgcgtcgagctatctttttgttcttttcttttttgatctggagataattcagacctaaacactgaaccaacaagtattgaacataacgaagaaaagacaaggagagaagctgaagaatcggagagaagatcagagaaggatataaaagatctaattggggttgaaattctaagagtcttggagagctgaaacccaagcctgatctactcatctaaagataaagggagaaagagaagcttacaccaaaaaagacttaggaaaaaattacggagacatgggcgaaggagaggtggttgtatgcgtgcgagtttttgagggtgtacaaatgtgattcgacctagagggatggacgatcaaaggaaagaaaggaagagaaaagaaagaggttgagtggcacaagaatctccttgttgttccctctaagcggaagtaacagaagcactctgtgtggacccatgaggagccctctggacgtccttcagagagtccacatgcgacgggatcacaaccggatcatcctttttatcgtcttctggattagatgtttggccttcagactcattctcggatggatcgacgagcagttgggccgacatgagctggtagaattttgaacttgaatcgacagactgcatatcccacattgaaacaacggtcagcccatgattcacatcgaaccgcgcccaaagagaacccaaggaggacaaaccaattcatcaaacttgccgtcctccacaacctctccgccttcaatgacaaccactctgtcagcttgtgcgatactcgataatctgtgggccaccaggatgactgttgacgttctgttttcaaggatttttgatatcgctttgttgacctgtatgtgtccaagacaaaaggttaccccgtcagtgaatccaggaaacttgaatgagatgagggaagctttgactaacaagttgctcagatgctgtgtccagagccgacgtctaagacacatcaagaaaacgggccatcagctttcttttctcttgtaactatgatatcacgtaccagaagacagatcagtttaagagttcaacttacggcttcatctaagagtaagattctaggttttctgatcaacgccctcgcgatcgacaatctttgtttctggccctataaatttgcagacatacatgccagttcagcaaaatatgaatgttctagcagtaaatgagatcccaagccaaaaagaacatagagggagaagaacaaaccccggagagagaactcttggaaacaagagtatcgaatccgttatccaactgggagataaaatcctcgcagcctgcttcccttgcggcttcttcgacctctgctcttgtcgcgattccccctggctttccataagcgatgctaaagatttgaagagtacgaacagagcgtggccatcaggatttgtaggaaacaaaaagagaaagaaagagacaacgagagtagtgcacagagggacaaacttatcaaagatcgtgccggtaaagacaatgctctcctgtgatacaagtcccatagcatttctccaagaagacatggtgaagtttgtgatgtctagttgatatccaattttagttccaaaagcgcgcaggtgaaaaaaaagggtagatgagtgtatgttttaccgagccaagctcggaagatagacaggattaccttcgccgtcataagagatggttccggaggtaggttcatagaaccctgttttcagaatcccaacaaacaccacaatttgattaataacgatacctgaatctgaacatatagaaaaaaaagtgatagaagaaaagtggaagaaaccccggcaacttactcaagatcaagttttgaatcgagctctttccacttccactcccaccgacgatagccacgctttctcccttcttgacttccaggttgatctttttcaggatcgtcgcttcaggtctcgatgggtaagaaaacgcgatatccttcaagacgatcgatcctgtccgagtgggtgagagcttggttccctgagtaggtgagacttgaggttttcgatcaatcagttcaaacactcgttctcctgctccgagtcctttgtttaggccagcccagaaaccgatcagaccacccatagcggcatcaaccatgtactgttgttgttgttgttggtttcatccgttttccattcatccgtcagttctcacatagaaacacagaacaaggagagaaatacgaaagaacaaacctggtagatcaacaaagacgtgagactgcccaattcgaggttaccctggtgaaccatatatccacctatcccggttgtaaagagcgcaaatgcgatcaaaagataattagaatttggatacatgaaaatggttaaatgaaccaaagggaagagggagagagcttaccgaacaaaacgatagccatctcactggcgtgatctgagattcgaccgtataagttttcgaacaacccatagatccaaatctctctaatgaacgattagacatcgaaagaaaatcacatgtcagcaatcaaagctagctaaaactccagtacgcgtacaagacggcatcgagaactagacgaaccgacgagcgatctggaagatggtgtctactttcttccctaacatatttgtctctaattcttgtgccgagtaagcggcgattattctagccgcgcccaacttttcttctgcgacctgtcagagatgttccaagggaagaaaaggcggaaagccatcagaaaccagagttgtttcaaagatgaataaaaaaaggacaggagtaaccttcgtcatctctcccacagcctcttgagtcatttttccaacatttcgctggtactctccgtatttcttcgaaagaacgaatgtggcaggcgccgcgatcatcgctacaaatgttaccggtacgctgatgtaaagctgttcagaaaagtcaaaggtaagtaaacatcaagaagacaggtcttggggaatctatagaagataccgctgttgaagaagaaagaacggaacggaccatgactccaaaacctatacttcccatcaaaaggttctgtgcgcctagaggcaccggagtaaatatacagaccgattgtcagtttttggtctataaacaatgatagaaagagtatcagacaagaaaagggaatggcgaattattaccctgagaaaggttcgaactgatactctcgcctaggatggccgagtcattggataatctagaaacaatgtttcctgctctagaatctgtgaactcaatctcttgatgcaacacggacgcgtaggcctgtttacgaagtctagcaacgatccgttcaccgccttgaggcagaagagaagataaaaggaaaatgaaagcttagttgttggtggtgatggtcaaaaagaagagctgtagagagcgcactcattccaatgagagtcgatcgaccgagagcagccagagcgccaacgacgatgattccacccagagtggttcctgtccagaacaagctgagccccatgaaggtcgtctgtcgagatacagttttgatagtgagctgtctggtcagcagagaaagaacagaagaatagaacgaacctcgggtggaatctcttgaccgaaatagttcattaactcgcccacacaataaggcagtatgtttccgcacacactcgcaatcaccaaacactatcatcggaagaaagtagcgagtagtgataagaattaaatcgacgagagctcagtcagttcttccgtcgcgtttatagagagaaagaggaaaggacgtacgatcaaacccaaagtcaaaggtttcttctccgtctttgcgagctcaaagagtttcttgagactggtcttttgctcttctcccaagattggtgctccgcctttaccgccatagttgaggtcctttttgaactgtgcgagttggaagaactgtctgattcgagagtaggaagacgatatagccggtgccgctgctgttgttgttgccgttgtcggcatggacgagacagtagacgacgcagcatctttggacgtaggaggaagggaggcaaaatatttttggtttatgatggggaacggaagccaggtagattgaggatttgtccagatgaacgactgggtcggcaatggaagtttcggcctgcgttggggttgaacatttgagaacatccggacgaagcagccgggaggaaacatttttgctctcaacgccatctgaggaagatggccgacatggctgaccgatcgtccggccaacatgatggctttgaagagaaaaaagagagagaaaggaaagggagaaacgtatccgaagaaaagaatagctggacttgatcgaggtcggatgtggacgagtcaagcggtgagcagagtgtttccgacgtgtgtagtctgattgtaacgacctgtattctttttttgtagtcttgctgtagtctggctgtagttcagctctagtcatgctgcagtctcatagtcctcttttagcctccatctctctagtcagccttgacatcgaatgtcctgctctctctccagagtcccttcatgtttcctctcgtcctcgcagctgactgtctgtacagctacgtattctgatccgacatctagtggatgtttgctggtgtgtcttgcctcgttcccatctgtctatactagcatccctccggccgccacggacgccgtaaccatgacggtatcgtaaccgagatgtaaccatgagtggtgccgatggccgatcgtcatcaatcttcccctccgtcaaggcaacatactttgttctttatagtcatcgaccatttccttcattcttttcgtacatctatctcttttagaattctcatctgtctcaccatgtttgctcgtaaagctctgagttccgcccggcctgtagccaccaggttgttttcgtctaaagcgtccgcacctttgtcgtccggacgagcgttcggatacgctgccgcatccgctcttggtcttaccgtcggttacaactacgtcaactctggatcgaccagtcctgcgttgggtaggttgggtaacgtcgtccacctcgatgggccgacctcgaatacccctccaaagtctggtaagtcatcttcgggttttgtttctactttatatttgtgatccgagcagaggtcgcgtgtgtgtgtgtgtgtgtgtgtgtgtgcaaacgggaaggaaaagtcaacgtatagctgacaaatcgattcgatccgatccaatccgctccgctccgatcgcacctttcaactcaatcagctcacccggatagtaaggcaaacccaaacgtttctcgagatacgaaaccgtccaccgggattgagcccgcagaggcttcgtctttggcctcgacgaaatctcgagctggaggtggggaagagccaacggctgatataaccgaaatccctcagcacaagaagaaagtttcagaaaagacccggtcggcaaaaccatcgaccgggatcgagcctgtcgaagtttcctcgaaagcttcgacgatgtctagggttggaggtggagaggaggacgggccggtccggaaggagaagaagccagagggaaagaagagcgaaaagattgatgggaaggacgagcccggggtatcccccgaggaaaagacgagcggggcaaccgagaagggtgctgatgaagaggacaagtctcagcaggccgcctacaatgaagaaactggcgagatcaactgggattgtcctgtgcgtagaagttttcgtttcttctccttctccttctcgtctttcatttcttttctcttttcttgcgcatctagctgagacaatccacattcaatgctctctatagtgcctaggaggaatggcccacggaccttgcggtccggaattcaaagaggctttctcgtgctttgttcactctgaccaagaacccaagggagtggaatgtgtagagaagttcaaggacatgcaaaactgtttccgagctcatcctgacgtctatggtgaaggttcgtttgaaattcttctttttgatctttttttttgtttacttttacctccattctcttttgaagatgagaaacgtttctggcttgtttttgacaatgcaaacacatgctttctctttctgttgccactcttgtagagatcacggacgatgaggagagctcggacgttaaagaccaacaggccgaccagatgggacacttggaggaggaggctaaatcccaagacgcactttcctccgccgacaagaaggaggatgctgctgctaccgaaaagactgagaagaaggagaagaaggagaagaaggagaagaaggagaagaaggagaagaaggaacaaaagtagatggaagaagtccaagaggaacggtttcactgtattcaaaccaaaacccaaagtccaagacttaaaagacggaagacaagagatgaaagatggcaaaaattaacatgtcagacacgtgcaaggcgacgaaggagtacaggacacatgcaataacggaagagaagagactgaaaaacgaattgagattaatagactcttgaacttgctaaaaacattcaacatcgctctgtccaaaacttttctgggggaagaccagtcaagtcacaccatgatcgacgtcttccgtccgaccgtcccttcatttatctgcctctgaaattcatcgatgtgttgtcacccggtgttgatatcatcgttctttcaaaataagctcgttctgattcgtcgtctggaccttggaaaacatttcctctttaaagttccagtgcttctgtgctcaagcttagagatccgtgttcgagatgaagacagaataacgatgtagacgaacgttgggtacccttctctctctatttttgcttgattacttacttttttgatggatcaggggcggtgctcatctcatccctcatcgtgctcagttcggtttcatcggaacaacattctgttccgcttttttctttccttttcgttttccttttctctttttgagttcagatctgatcaggaaaacaataacgagaacatgaacgttggatgataaggaataagagtgagaagggtatactgaagcatgatacacaacttggaattcggatatagcaatcgacggggaaagagaaagagagcgcgcgcgaggtagagatggatgtaagggagatgaattgggcataagacagtgaaagagataacgaacggggattggccgatggtcatttatgtgtatatgtacagatagatgtgtttccatctacgtctagacatgaagatacacagacacgggattagaacaaaatacaattaacgagcccagaccgcggcgtacgcacgagtcaaggagaaaagaaagatgggataccggcggttgtagcgtcaatgtagagaggaatcaatgtcggtgcgagcaggggttaaacaataataaaaaaagggctatttagccgagagtctcgacacgggcgagcgtaggaggcgtgttttgatgtgagcaaggtttttgagtgatgactcgtttgtatgactacactttctgctccgtccttcttcttcttcttcttcttcctccaaactacctttcccttccggacttgccatccatatcctcatctgtctcttttccacacacacacacacacacacacacacac

SEQ ID NO: 1674 - DNA, 1978 bp, Xanthophyllomyces dendrorhous; identical to SEQ ID NO: 353

SEQ ID NO: 1675 - DNA, 336 bp, Xanthophyllomyces dendrorhous
ctgaacccggaccctgacagttagggttagttgaacgctatggaagcatgtgcgtgaggaaaccaaagaggagagaaagaaataaccgacgataaaaagcgataacctggcgcgaatggcgtgagaacagaggtgaatgatttgcaacgaccgaagaacgccaccatgagctcgatcagggcgatcgtgaggggcacacgggcgccacttgctcagagagctcattaccaatgtcgtcataagatccatagtagctcggacatctgggctttggccgagtgcagtgggacgcagcggatacaaatgaccgatgcgcagtcaggtatactttacaac

SEQ ID NO: 1676 - DNA, 14212 bp, Xanthophyllomyces dendrorhous
tgcgtctgatccaacctgtctgttgtgcctgtcgtgccttttgatgccctcgcaggcttatcggttcctgaccgccccctgagccgcccgccctgatgggtgccctccgagctcccaatgctctgtccctctgaggatttcgaatgtttcctcattccccccggctttttctttctatttcaacccataatctttcccttttgtgccgaccttgtcgccttccagttctagcgacactcaaagcttaaagacaaagagaaagacgacatcaacaacaactttagcgaccaggacagtgtcgacaaagaggaagaagggaaaagttaaaacggagagtacatccatccgatatcgatatcgatagagtagacgacttctcttcttcccacagccttctctcctttttcgtattccttccgatcaggatcttttcttatctttcccgcacacagtatcttccaacccttcacgtccattctttcttctccgtccatcccttcgttctctttgtgtgtgaataaaatttcatctctctctactcctttatcccctttgctgcctagtcctctatgtcggcccgccctgctgcctcatcgacggcggaccaacatccaggcgcaggttacgcccgtctggccttatctagcccaccagatgtcaccgatgcggtaccgaccccaccgttgaccccaccgggccatcggccgatgggttcctctacctgggcaggactcgactggaagtcgatatgcgaccagctctgtcaggaaccttatcaccatgtcgtctcgccagatagactcttgccggacggtttgggagactataccgtcgtgcctggagggctccttgggaagggaaagtttagcgtcgtctatcgggccgagaaagcaggaaagcaggtgagcaagctctctctttctctctcttcttcttcttcttcttcttcttcttcttcttgcttcttcaatccttcttggtcgtcccgttctgaccgttgagatttcttccgtatagtacgccatcaagcacactccgctccatccgcatcatccgttgatcgcgaccaggttactccgggaaccgacgttgctcgcccagctgccgccccatccgaatctcatcagagtgttcgaaacgatcaagaccgatggtcacttctatctcgtcggttcgtctcgctctccttcgtcgtaacccccggtcgcttcgagcttccctctcttcttgctttctctatcgttcgcaagagctttcgaagaattcatccgaacctcgggacccatcttcgtcctttctcaacaatgtgtctaacctcgtttgcttccctccttgaactacctcagaggaatacttgccgtcccatgtctctctagacgcactatgcgcaacatacccttccgatagattacctaccgagctttgctggaagatcttcgagcagctcatcagcgtcgtcagagagggtatgcatgctcatcatgtctgccaccgagatatcaagccaggtgcgctccgttcatgttccttaagcctcgttcacatcgatctgcctgctgattcgttctcttctccttgtcgtctttgcctcttctgaagaaaacgtcctgatcgatccgagtaccggtctgatcaccctgattgacctcggtctagccacccacttttcaacatcgtctcctaagttgaccacctgttgtggatcccccgcttttcactccccagagatcgtcctcgccctctcccgtccaccgggcgaagtcacctactggggtccagaactcgacatatggtgtgtcgctctgacggtcctcagatgttggacaggtaggcgttatccactcggaaccggtcacaagaacctaacgaccatgcacggcagagcacaagatctctttggatggatcagatcagcgctcatgacacccgcccagccagatggcacgctgggcaaaaggtcggaagagagaaaattgagagactggctctcttccttcttggacattgattctcatcgcagacaggccgcctttaatgggttcgaattcggctcagagatgaaagctcgtctggatgggttccaacgagagagaggctgtgagtctcttgtttctttagtctttctgacctgatgtctttttctgtctcttcatcatttctcgttcaaacatgatgtctgatatcatcctccctgcctttatagtcaaacaatgcatctttcatcattgccctgtcaaacacactcttcctctcacgctcatcccggacggaccgagccattctgaacacagcccgatcccaccaaaatccaatagacctcctagaagctcaacgctcgttatcagacatcctcccgatcaatcatccgccaagacgatctcttacttcaaggtatgtggttccttcactctcatcttctttccgttttcttcgtacacagggatattccaagctgatcatccatcacctctcttgctattccatcgctcttcactagtacgctttgagatgctctagtatcttgtaccatagtcggtcggtttcttcccgaacacttctctcatcccctcttcctcctacccagacttcctcttctccttcctcactaaacccggtctcatcgattgagaacctcgccggatcgactgaaccagacctcgacatacttcagtgtgtggctgtcttgccggcagaagctggttccgaaccccagcagagacccgagccggagattaccaagtttggagtcaaacgtccatttctcccttcactctttagatcaaactcatccagacagcccagcacggctcttgccagatcatcatccacccctgtcacctctcgagagccaatccgggatccaaagaaggacgcctcaaagacgacgaactcaccacagtacctcgtgtttctcatggcgttcagtttctcggatccagaactgacagacatctcgagctcgtccggagtggcgaggaagagaagaaagcagagccggagcagaacgacgggcggaggaagtaaaactcggagtgagagtcgaggtacgaccggtgaatggccgagtcgacaaaacagcgtcacgcctgatggatcgagaacgaggacaagaacaagaacgagaacaaggtcggggagcgaagacaagaacctttcgacgtcagcctcggcagaactagagttcggattacccagacaggaccatccttcctggtggagacgtcattcagccatcactcatacttcccctggttcaggatcgatgccttcaactcctgatccgacccctccgctctcacccgcagtagaaggtacatccacatccttctttcctgtcgtcaacgctaaaggccaaagctcacagaggaaacttgccaatgcccactcccgagcgtcttcgagagtaaggtctaccagacagagcacgctgtcaagccgggaatcatccgttagcagatctcgacaacgggcgcctccggatttcatcccctctgccgttcatacccaagctcagatccgagctcattcccgttctccattcaaacttcagatcccacctgttagacccccgtcacctccgttaaggtcatcaaccggatcatacgtgacgatctacgtctctgatccccgagcgattccgttgatcaaatcggcgatcaaattcgagatagcccctcccggtagtccagatagagcgcctctggggtcagccgatcattctactcaggcgactctctctacatcatccagttcatcaacttcgtcctcgttggataactttgctaggaagagataccaaccaagatcccgttccaatggtacactcggcaagacccgacctaccgtcgatctcgaccgccaccgtcacaacggcgacgataatgagaccgatagcggcgacgacgaaagagagctagatgatgagggggatgatgactatccacgcggtcggtcggaagcgagaaattatgattcttatccatctaccgatgagcaacccgtcgatatatctcctcgaacaaagacagggacgaggacaaggacgaagacgaagaagtatgcgtcgacagagacgacacctcgtggggaccgaacacccgtcaatggttcaaccgaggccaccaccgacaatgatttggtccccaagatcgaccgaagggtttcctcagccccgtcgaccgcgacgatggccactaccactactgctacgacttcatcggacgattacgatgacctgctgccttcgcccgatattcctgctcaaggccaacctctgtttcccttcaacttcagagtcggagcaactatcggtgggagacacaggggaaacgcacgacgagaagcaagcagttcaacctcgtcctctggtccggattcaacttctgtttcggccagtggggacacgcaatctggacaaggaagtagtggtttcggcggtttgttcgagaccatgagtctcgggttgaaaggcttgggagaggccgctgccgctgctgccgtcgtttctgtccgagccgtcggcggcggaggtggtcgagacgttgagggaggaggaggaggaggaaaaggcgggaagaagactgaagagagtaagctgacgaggggcaacccgttcgaacggtccagaagtctaggaccttactatgaccgttaagaggccatttctaccatttttcctcatacacattattttcgccatctctttcttatcttcaacatctccaacacgctttgttcaaccaaaaccgaaaaaaatcatttatttagatctctactcaacactctttcaacttcttttcaaatttcctctcgcttttcgcatctcacccaattcatctgcctattcatccacgccactgtatataataatcttgatgcttgttttccttgtttctgtctctgctctgttcttttttgattttttttgattttttttttttttttaccgtatctcttgccggtttcgtttctctgtaaaagctgatcttggatgtaatcctcgttgtataccttgcttctcttttcttcaggttgcttctattttcctatcaatcacgtgcttggtcagtgtagagattcatggctgttcctttttcttctcgttctcccatgtgcaagctcaggactcagaacttgaaaggatggggcaagtatacgttcacatatttgtcagcccgtccccgtccctatcttcttaacttgactcaatgtttctcgaccctcacctgatcaaacaacggtatatacagatatatatatatatatttatatgggacatgagccgtaaagaaagagaagtggcaaagtggaaaatcacatatccatattagccaaccgagcttcctcttcgtcttcccgaccatcgtaaaactcgccgggaccgggactgggaccgggatcatctcggcctgcattctcgtattctatatccatatccatgtctatctctccttctccgtttgggtttgggtttggatacgtgcttgtgggatggggccgagaattcatcgttggtggttcgattactgcctgttcagcctccctctgataaggttttccccccccaccgaaaaaaagacaagtgacgaaataaggaatagctcgataagttagtccataaatggacagagatatgggaagagccactgatcggtctgatagaggagtaggaaaatagccaagaagagagaggagagtgagcaagacaaaccttttcagccgcctgtttcgccaagacctgttcatacgtccagaccgagatccccgtttgtgagtgatcgaacggctgagaaatatttcttatgaattgtctggagagcgcgatggccatgtctgttgatagcttagagtgggattcggtgatatattgattgatccatttaggaagtcttgctcgcttgtccgcccgggcgaatcgctttgatagagccagaattcatcccgcgagagaagccgatcagaaaagtcagcgagaacagaacagaacagagacaaacaagaacagaacagaagaaaaaaaaggtctacctgatccgcaaacaccatcaaaccccaatcagtctttccacgtaacactcgacctacacactgagcagcatgacgcattgcgtcgaacgtcaggtagtctgattccttgattcgatgggcatcccgcaagaactcgagtcgagcctggttaacaagacagtcggatttagctcgtataaccctccaattaaaggatcttattagcaaagcataaaatacgaaacatacttttaatattcgactctctgtgtattgatatgggatcccgaacatgatcacagctcggccataattgctagtttagtattttaaattaaaggcgaaaatacgtaaatgagtagataaaagacaaacgtgatttcgtcagtaggaggtcatcgcggggtcagacacacacactatgaaacggcactcactgatcaaaatcaataccctccgaaacctttcctctggctacagacagcaagacggctcccctaccattatcgcaggccttattcacaaggggaatgcatgatcagacattgaacagactatgagacaagttcaagtctcaatcatgacttacctttcgatagttctccaatgctatacttgtctcggcagcatcaggggtttccacaaagattaatttattcttccatacttcattcaggataccctatttcaaaccgtatgaaagaaaacccaagctgagtcgactcgttcaacgagtctattgagatgaaatcatgaagaactgaccatatcgttccaggcggccacgatcgactccatgtaaagataacttgggaagaaagcaacgatcccatccggcacacatttgctgtactcgatcaagattgatccaaagttccgaaccacggaaggatcgtttcggacctcgaatctggaagagatagctacttgatcagagcctcgagtgatcacctaagccgtcaaaacaactctaaatcaggatcacatcgcaaaaagagacgttggaattgagaatcagcccagcccgacataccagaggcaagaaagagtttcggccgagtgtcataggataactctcgatcactaccggttggaaatctaacattttgggatctagaacaaagtaaaataacaccttggtcaacaggcaatctcagaggaaataggtccaacaacataggtctatcaacatacacatatccaacggagaaatcgttcccgaggtgatgaccacactgctaaacttttcgaatacgggtgccatggctaaagcgggatccatacaactgccagttcacgtctcaaatctgtcaatccatgtacgacgtaatgaaacaagacagaagcgcaaacacagtatgctcacgtgaaatggaagacagggttggcgacagttgcatgatccgtttcgtaaggctctagaattagaaggaagcctgttacagatgagggtgaaatagatgtgtgttttgattgataagaggactttctcctcaaggagatggatgcacaagaagaccacccatacctttttcatatgtagccaccagtgttgcaaacccggctacagtctgcaacccagagtattcgtccaaattcgtcaagcccaatgtcttcaccaaggacgatagacgctctgcacatgctctacaagtagaaatcccaaaggtatgcacagtcaatattcaagtaatatatgaagtgtaatggaggacaaaaagaatgtctagttcatacttgagtggtcgtttctcgatgaacgtgatatcttttagatgctgtaagaacgatactggagtttctgcaacgacatggagcactctcatccttgtctgaagtcaaattgcaagattgcagaattgtaagattacagaataacaacatcagtacatacgacaaggggccgagccatagacgacctaagaacgaaccttgagatattcaataaaccgcttcatgaaagccacgaagtgttcggcctttctgatattgcctgggatggcttcttggatcatatcgtctggcaaaactgcatgaaaattaagagaggaggacgtaagcggtcaagagataaagctcggcaacaacgcaaaaggaaagtcagatgaaatgaaggagtgagcgtactagggtttgataacatatcgtcttcctctcccccatcaggagcgccaagaccttgaaccaatcgggtatattcatcctgaagtttttgaatgtcattctctttcattctgattgaacaaaatagaacgtctaactgatgagtcgattttcaacagaagatagcttttgaaacaggaggagatgcacatactctgcgatcttttcttctaatcgatttgcgcttctggacgcgccctctaagattggccttgtcaagtccacagatagggattctatacacacgttatctactcagccgaagtcaagagatcagattactacttcgtctgagattgtggaagaggttgagtacgtgaatagttgagataaatgaataactaaccgatgttatgcgcttcatcgaacactacgatggcttcgccatctagttcagcggagacttgctccgcgatcttagggtccagcaagtagtggaatgaataaatgatgacatctacaaaaggcatctgtgttcaaatatgtgtgagtaaaaacagagagaagttcaagacaaagcgatgcgctgaaacagagcagagagatcaacgacgaaccatcctacggagagcaaaatacggacatatgccctgctctctagagtactccttcatatcgtccaaagtgaaaaccccctcaggaaataggtcctcaggctctcgttttcctaactcctgttcgtcacgaagacagaaaggtggtatcagtttattattgcagtcaaaagctaatcgcctagtaagttagatcaaacagaacacatacttcatgaaaatcacataacggaacactccccggatccgctcttccctgttcgcaagcagcagctgacgtcaagtctctacaacgagcgtctacggttttgcccttcttttctctcgccacctgaggaagaaaaattgagcgcgcacatattagagctcagatcacaagcttcctcaacatcactcttgatggaagaagctcttcaaaatgactgaactaacctccggatggatacacaagttctttcgactactcaacccaatgccccggaaacccgtatcatcacatcccatctgcttcctatactccatcagtcgtttgagctccgccaaagccttctcgatctcgggtaccgttctcgagcaatatatgagctttcgatgggaaggatagaactgtgagcgacaaccgttgtgaggaatgagcctgtcagaatagctttagcgagtaaacaaacccaggaagactcaaacctgttgataggatataatcagagataagagcgagaccgttttacccgtcccggaaggcatttctgagtgaatccaacagtcaagatcagcccgacagttcgtttccaccgtcgtatcactcagtccagaagtaccagcgacactcttacctaggatacaatgaccctgatcgagagaacatatcaaggataacaacagaaagacagtcagtattccgtactgaatgagaatctaggcttgatcggttggttggatatcgatcccacaaacttacattggcatccaaggctctcttcaagtcacacatataattatactgttccggatatactagatcgtacgggaatctggatcgcgtgcaaaggaaataggccatgtctatgagcatctatatcgacaaagatctagcctgtcctctctatatatcatcagatagaaacgcctgcgaaacataagcaagctccgcttttcctcagactgaaaggatcgaggtggccagagaaggtatgaagatacgagcaacatacatcaccggaagatctccaatataaaacttcatcttggaatcaatttgcgaggtctggattttttttagatctcaatcaagcttcccaacgtataccacgactgttgcagagagcgtccgaccaatgtggtgggagactcgatgtgacgagcgtgggtgttgagcgtggacgagtagttgtcctaagagacgatgctgattgactggttgggatgagcggcagacatgcacgtgtcccgatagctgtacagcaatgacgaaaccttcctttccagagcacatctgacgttggaacatatgtataaacctgactctaacacacatacttctgaagctatagatgagaggaagaagagaaggagatggggtagcagatctagaggagtagatattttggagcactcgtatgaaacggagatggtcaacacgcggtactcttcttagactctttccgcgatccacgcataccaagactcgagtgttttttgacggggctgatcatcttctcgatcataaccaacctgaaagagatacaagaaaggtcaaagaattagcgcaggaagcttatgaaaaaggtcttttacatcagtgagagaatctttttttcctggtgcccacttactttcatcatcacatgctgtttgttgtcaaattggatgcggacagagagtcagagctgctaaacgattgaagtcgtgagaatcgaccaacctcatatcctggccatatctcaaattctaggtcttgacttgaaaccctctcaaagaaatcttttgaaccctccgggctagtgatccgatcggccgatccgtgaatgactttgatcggcagtcgaatctctttcgctcgaggagccaggtcatcgatcccctgcgcaatcgcgaggccagtaccaatccttagaggaccatggtatggctgagggttgagcaagaacgagatttccgcccgtgctgagtgtagacaacaaaggagcgagatcacacgaaatcatcagctctgaggtctccaatggccgtctataagacaggtaaagacgagatgaactaacggtcccagtgaccttttccacgctgagcggaagcgaagggaactcttcctgcgaacgtacgcagagctcgagcaatgagctccagtagatatgacggccgagatgctgcggccacctgaatgagtgggcacattaagaatgcccccgagatagaagtaaacacagcgtcggcaggaggataagcgaggagatattctaatctacaagcgtccatgtatgtcaagagatttaagtgtcttgccgagggaacatcaagatcagggcagtaacgaggccacctacataacaaatgcacccaaagaagcaccagcgataaatcttttcgtgaaagaaaccctctgacgggcctgatcttgttcgtccacgtcttcgagaacaagtttgacagaagaaacgaggaggtcgtttgtagggacgtagcaatgaatccctgtcgagcggccatgctatcagaacagcgaagcgcaaacagacagacacagaatatcagtcggagcatatcgaggtgtcgatagagtcgacacttacagcggggagatcaggagcgatgattctgaagccgttctgaatgaattttgccacgtgaacactacagcagaaggcgtgagttgcaacgcaaacgttgaggccgcgcaaatgagtataaatgactcaccaccaccgagccccgtactctccaatgcctgttcacaagaatagacagaagacaagatcagctgcatcttaaagcgattcatggtcccagtgtggtagcatatgatccgtaccatggacacaaacgatatctatcccatctccgatctttcctcttctttccggagcttcccacgtctgatagtatatccagtctctacctttagctctatccaactcggcctgcacaaccttgacgttttctgcccctccggtggcatctgtgaaaatcctcctccgggttgtgacgacatacggcgattctagaaaggtgttttcttcgggcagcgcaggaattaaatatctcgaatatgtcgggtcgggtggtgtatatagctagtatcgttaccaacgaggagtgtgtcagtatatgcctttactggggatctttccacgacaccaagcgttcttttggtgagaaatgcacatacgcctagcgagatcaacactggttctgcaatcagccacaggttactgggtacaggaggttcatagggagagaggccacgaaatgatgaactaaggctcgagtcttgagggggaactcgataatagatcgtctctactaatgaaggggtatgatttaggagcaatgatctatatcaatacaaatctctaccgttttggattcgaaaaaaactcttacagacaatggcctcttgagatgctgttgcagtatctccttccatcctgaatctttcctcgagagtgatagacttgtgggcgagtgtgatgattgatgatgggtagaacgctgacgagcgagatgcgatgggtttatatcgaatttgaaaatattcaaaaaacgtataagcgagaatagcaaaaagttcaaaataaagtgaacttctactttccacccatccattcgacccacactcttgctcgcttccaattcgatttccaacaccaattgttctcagaatgtccgctgagcttactcctggtccctccaagacgaccgcgtccttctttccgtcctacgcaccggtggtctcgtcttccgaggaccgggcatcagagttgacgtccaccttgaactcacccaacaatgcgactttgacggtacgaatcatcaagagtttcccctataggagtatgaaagcgttggtcctcaagggagtcgacttggagaagccaaatggagtagacgagctgatgaacaggtgcaagaagggttcgtcttgtgtatcaaacatccatattctctcttgttgttcttcataggcgcgcttgggttggaaatatcaatactctgtttctatactgatatccctttgaggttttcaaaacagagatcccgataaccttgggtttcaagccgttcaagacttctattgacagtaagtctttatctatcagaagatattgactacattctgtctctgtggtattggtctcatcgtattatttctgcgttgaatttgactatgtagaactcgacaccataaagctgtacacgaaggcccacggacacaagactatgaacttgatcatcaatttcgaggatgatgagactgacatcctttcacctggaactgaggctacattggcctcgtacggaattggtttgtcctgttttgtgttgtggacgtctgaacgatcactgcttctgtagtcatccgatatttacgtattctttctttctggaaacttgcagagaacgagacggaactttcattcttcaaccgagaagaatacgaggcattcaagctcaatcctgaagtacgtttcatgttctgcattatccctctagttttcgtcctgttaacgtttatccttattaccttcttcgacgtcttatcagctcaaatgggcttgagcaatcatctcttctttcaggacacacaggcatagaaagggaacggaacaatacaacagtcatagaaagacttactcaaggatcttctctgggcatgtcttctgaaaggcggcctaaaaaaaagataccctcctcacaaattggtatgtcatttttgtttctcctctacaagttcgtgatatcctttgttctttccctctcttttccctccccctcttccccgtggtctgagtagaacggtaaaacgacaaggggtgagtgatcccccctttctcgttaatcctgatgatctctttcctgtgtggtttcctcttctttccattgttcttctctttacgtgttacactcacttcatccttatgtcccagagtagtgtacccaatgctgatatttctacgcaaacattcttactcttattgccgttctattcccctctcggcatgttcctgtccactcatatcagatatagacagcttctgggttagcactttcaagaacgatttgactagacatatatcagataaatggcataagggtcaaaacacatgggcgtatttgaatgaatacaccgacggatagctcttaacgcaaccatcaagtcgatagcgcacattcacatatctctctcttctctaaaggtccattgtttttgagtttgaaggctgcaagtgccggtgtgaggtgagcagtacaaagtgaaagggggggggggg

SEQ ID NO: 1677 - DNA, 14832 bp, Xanthophyllomyces dendrorhous
ggggggggggggcgtcgaaagcttcacaaaagaccctctatgtacagaccaagtgtgagattaagtacctgagactgaaatcacacccaaacccgcattgttcactccgtccctctttcgcttggtcatcgcccaaccgaaattctctatgaggtcctgttctgacctaccccatttgaagtcaaagatgagaccgatgtcgttgaatctggcgtccaaccgttttcgctccggatcccacctcggattggcgagatctcgtttgaatggatctgtgacgaccgagcgagagtcaggatttgaatcggtcgatgtcgatgtgttgtccgtcgaccgggacactgatgttggaggcgagaaccatgaccgaggtaggggtgctcgggcgatgttggcaatgagccgttcgacaatgactgacgtccatctagcgatgatagtctgagaagcaatgagctctgctctggcagcttcctctttctcggccctctctttctgagcgacttccaactctgtctgtcgcttcttggccagtctttgttccactgcttgggtagagtcgagtagtctcgattgatatttgtaccctaggaggaccggactggcgagatgacctccgttgaggtcggcccatgatctgtatggatctggctgattggttgaataagtaggctcgacaagacgagatatgttcgcgtcgaatgacattggatatacgaggagcgtgagagtggatgtctcgttcgtttcctggagtgcctgcagaccggtgctcgtgatggtgacggctgcgttcgatgaatgggtataacatgtcgatgtgaacaggacagagaccaggatagtgcagtacacgctggatttaagggccaaacggttgagatcatcagcttacagtcggtgttcagaagggcaggcatatatgcatagtgactcaccatggttgtaccgagagaaagaacgacaccaggtagacgactgtgaatagaggggcggctatcgtcgataggaatgcaggtttagccctttgtttctggtacgatggcaagaagaaagaaatctgaaacaagcttgagagacacatacctgaagggtaggggagcaagatcaatggcagaaagtgtttgacgcctgggatgaaatgaaggaaacatcaagaacaagatgagcacgtcagattcagggctttttgtttttgtttttctgtatccctttcctcccgaccgaaccgaacgagagatgcagatacttacaaaacaccatggctgaacaaaccctggatataagggtgtgagaggatgggatggttgacgaaatcaggagcgtcgatgattgaaggctgattcattttggcttgcgatgacacttgttgtaaccaggtgtgtaaccacatgtgcaaccatcttcctgaactgaacgcgactctcaattagaaggaggatgatgatggtgatggtgatggtgatggtgatgatgaggagaaggaggaggagatagaaggatcgatcaagtcaagctgctgctgctgctatagttgaaccaccagtgagaactgctccagtgcaattcgagacagatgtctactgatgggtctcaccgaactaagactgccacaagcgacagaagtgaactgcaaccgcccaaatgaccattgtggactatatgaatgccatacgattgaggcttggctgagcagaagtgttcatcagggagagcgatacatgctgagtaggaaaaggaatgatgtctcgacgagggaacatcacagtcgttttgactacaagatgctaagaagaagactatacagggatagtgagatagatatatacacaaggtgattagaagtacacgagatgatatggaaacatgactacaactacaactacaaatacaactgtaactacaactataactacaaggaaaaagaaaaaaaaagaaaaaaagaaaaagaaatcaaccttttggtaacgccgcgcgtaggcaagaaaagatcaactttcgcccaatcttgtttggatcctcaccactcccacccccccaaaaaaaagcactactacttcttctctctcctttcttctccttccctccctccgctttctcaaagagcttagaatgtacgtgcttatgtgctccgtcagggagtgtttgtatttttgcagaaagaaggaatcaaaagagtgatcaccagtggctcacatctcgatttttttttcctctctgccctttttgttttctttcacaacactcggacccttcaccaaactcgtccaacctatcctctcaacatctcccatctcttgtcgtctcatcggtttacctgcgtggtcttgtttggttcgatagaaatatgcgtgaagtcatttccatccacgtgtacgtccctcgtctacatcagcccagtctttggaaaagctgtctttgtttcgcctctcccccatcttctcttgcattcgatctcaccgttcctgtctccttctccttccctatcacccacatgcttccatcttgaatcaacagtggacaggctggtgtccagatcggtaacgcctgctgggagctttacaccctcgagcacggattgagcgtaagttgtcgtgatgctttcttcttcttgatgttctctgtctctactcagccctgggtatatgcgcctttgagaaggatacatctcttctgcatggattgccacgaatgcatcaccagagctcttttttatttatttaaaaaaaccttgtcctacgtgctgatcatctcgtaacccttacctcttcgtgcataaccgctaactagcctgatggtcgaatcatggagggatctccttcggccaacgacgacggattctccactttcttctccgagaccggatccggaaagcacgttcctcgatccctctacgtacgttcagcccttttgtcttgttctactcctcgaaacggtccttgtgacatgcgagggatgttcgagcaatccttactaactaagtacttgcgatttccatctccatcaacaggttgatctcgagcccaatgtcatcgacgaggtccgaaccggagcctacaagaatctcttccacccccagactcttatctctggaaaggaggatgccgccaacaactgttcgtatccaactcacatttatgtccctggttgtcctgctatagggttctcattgtctctctttattacccatttgtgcgtcgattctgtccagacgcccgaggacactacactatcggtaaagatcttatcgacactgtccttgaccgagtcagaaacttggccgacaactgttccggtctccagggattctttgtcttccactcgttcggtggaggaaccggttccggtttcggagctcttcttctcgagcgactctctgccgattacggtaagaagtccaagctcgagttctcggtctaccctgcccccaaggtgtccaactctgttgtcgagccttacaactcggtgttgaccacccacaccaccttggagcactccgactgttctttcatggtcgacaacgaggccatctacgagatctgccgacgaaacctcggtatccagtctcctacctacaacaacctcaacaggttgatcgcccaggtcgtctcttctatcaccgcctccttgcgattcgatggatcccttaacgtcgacttgaatgagttccagaccaacttggtgcccttcccccgaatccatttccctcttgccacctacgctcccatcctttctgccgacaaggccttccacgagcagaactctgtctctgagatgacctactcgtgcttcgagacctcgaaccagatggtcatgtgcgatccccgacagggcaagtacattgcctgctgcttgcttttccgaggtgatgtcgtccccaaggattgcaacgccgccatcgcttccatcaagaccaagcgaaccatccagttcgtcgattggtgcccgaccggtttcaagctcggtatctgcaacgagccccccgcggtcgttcccggaggagatactgtcaaggtgtcccgatccctctgcatgctttccaacacaaccgccatcgcgtctgcctgggcccgattggaccagaagttcgatttgctctactccaagcgagctttcgtccactggtacgtcggagagggtatggaggagggtgaattctccgaggcccgagaggacttggccgctttgggttcgtttctagttttatcaaacgcaaatgttgatatttggtccaaatccgttcactgactgttttcctcctctgtctttttttttcttttcttttctttttatgaatcctacagagaaggactacgaagaggtcggagtcgactcggccgatgccgaggaggaggagggagagttctaatcgagcgatcgttatttcatccatcgcgtttgatgcctcaccacttcacattttctaagtttaaacctgatctttccctctactttcatccaatctctttcgctcccgctttctctgttttctttacgtcttcttttcgtttcctttatattccccctctttgggaccaatatctattccccttgcttcatctggtcatgattaccctttcttgtacatggtcatatgcggctcttcttggttctcttcactctcgttcccatgtctgccactgaccgcgcgatccgtcttggagacaaactgttgacacttcagaagcaaatgatcctgataagaacggatctcttccaacaaggaagacaacatgggatgtgtgacaggctgtagcagcaggtagcttgaacgggccgccgattagacccccgattagaccccaaaagagaagcccaacttgggcaaatctggccttttcgcccatccagccttggctttctagcctctctgagcggcttcctccaagtctaacggccaacacatcaccatctacttctccctgacatcgagcagaagatcctacaacacctacctggcttgcccgtgtttttctttggctggcccagcagcttcttctaaataaactcagcgaaattactcgtcgaaagacagagaatcacatccgaaaaaaagtatcatcatggtcctctcgatacgcgtctcgattctcttgctgtccttcctcgcgtttgcctctttcgcaagagcaatcaagttcgatctcaaggcagagctgtaccctagctccagtacgtctctttatgtgctttcccgtgctgcttgttccgccatcagttcttacgatgtttgcgaaacaaggggcagagtacagagagattgagggcagatggcgagagtctcatgacgatggctgtctgtcttgctcatgaaagtgaatgaaagctgacctctgatctcatcctcttttacgcttctttcaacctcaacttgcttcatgtctctttccgaacggatcagaatgcatctggaactatgcaaatgcccgtgcgtctggttttcgttcttcttttcttgtctattctctgacaagagacgtcagggttgacccgagctggacaaggcgagctgaccatctcctgaatgatttgcttctcttcgcaccatcttcattctgttcattcgaaaacgattaccgttgtttccttgtccttcttctcgcctcccccatccttttctcgggtgtgaatatcagattcattggtgattgttaccaccaacgtcggacccgggttcgtcctttgttcaaccgtatttttctttactgaaatccgctgtcagtcacctgtgtgacaaagctggaatctgaccgcgcctggtttcgttctctcggaaacgttgaccaacagacctcagcagagggtggatatcgagattcgagatggatctcataatgggaatatctatctggcaaagaaaaacattcagggggagactagactggcgatcactacccatgagaacgcagaggttggggtctgcttcaaaaactatctcgatcaaagtaagtgttcttttcttccatccttcgctccgttttgttcttctctgtctactgttcttgcggatcttgaaggtttaaaagtatgaggggagagggaggaagggaacggcagatgtaaccttccggggagaagacattcagcagatttcagaggtcgtgtgagggaacagaataccttgggcgggttcagcagacgagaaggtatagggtcatgaacgcaattaagattttggttgccttgtcgcgctcatcaagtggagatatcgttgttcaagccttctgggcgccccttctgagcctcatttaattgccttcatgatgtttgatggatttcatcagctcgtatattgataccttatcgttgctctcctctttctttttcttttcataacattcagaggcacccccgcaattcaactatatcaagaccatcgatctcgagacagacattggagcggaagctactgatttcaagtgagtccctttcaccttctgtatgatattagtcttccatctaagagcgaattcgctcaataacgttgcccttctcggctcttttcccctctcgcgttttaaagtgcgatcgccaaccaggaatctctctcaacgctggaagttgagatgaggaaactcgaaggtgttgtaaaggagatcgtcgatgaacttgcctaccgtatgtttggtctcttccgaagtagaatttagaaggaagatgatacgacagctgattaatctttgatttgtgttcttctggtcggtatcaaatagtccagcgaagagaggctataatgagaaacaccaatggttcgtccttcaaatctgctgatggataaaaaattgacagcagtactcaagatttaccttttcttgaaacgaaaattgttcttcaaataattcgatagaatcgtcgaaccagaggatacaatatttcagcctcttaacactctgcactcttctaggactcggcgtttggcaggtttgtctcttctttttttttctctctagttttcggtcaagagatactcaagcatttgatgatttcttttgtgtatatgcgtgtattgttgttatcggatacacttagattctgcacctccggtccttcttcaagcgaaagtacctgatcgattaaatgctctgtctttctctctcgatcttcttctcaatctctcctgggtatagcccagtttggccatatctattcgtcaatgtggtagtcgattggagacattctctcattggaaaaacaaataaaataaaatattgatacaaagatgcgcatacagggaaaccaatggacgtgtgtgtatgtgtgtatgagagaaaatgagtacagggtagaggagaagagatcgtcgaaaaggatcaacagaaatgcacaagccagcgaaacggagggaaggaaactccgaagattagcaacggcggcggacagggtgcggtgatgaacatagatgaactaggtagcaggatatgcgagagaacgagcccgggcgtgctctaagtgaagtccatgggaagcaaaggggaaaaaaagaaggaaagacagagaggcagacattccagacaaaacaaaagagaaaagattgaaggaaacgaaaaaaaagaagatttgagaattaaaataaaaaccgatattgctgatcgatcgtctcaatgccgaacaccatacggttgtcgtgagtcaccactgccaccatatgcattcggcccattgtacatttcaggatcaacccatcgaggtgggggagcttgttgagcgctaggtgggaatcctatattacctgaggcagcgtaaggccgtgtttgagggtacctatcgaatacgataatcagtgcttagcagatcggtctcaagatgaaactcgtgttcaaacgaaacagaacaagaaagaggttcttgtctgtgggcttacatagggggatgtgtatctgtcactaggaccgctcttctaccctttttcttgcgcgacccacatccacatatacacctggcgacactgaagattattgcaaggacgatgagaccaacgacaacagtgacagctggggatcacgtccgagataacaaaccacaagaaaacgtttggtcagacatccttaagcagaagtggagcaaacacaatcttttcctctgtcaagactcacgaattgctatattcagatggtctcgatctaagacgaaacaaaaacaaagaaggagctttagacacagcagacccatcattgtaaaaacgaaattgggacagtgtaatgacaatacttacaccagccctttgcggattccagcccactctggccggcgcatgatccgttctggcatgttccgctatatccacaggcggttccatccaagaagtgtgagtttaaagactggaaggtagaacgcatgtgagataaatcagtacaacatcttggaggaacttcagatggtaagacgcgacagagtcagggaaacagaatgatgatagagagacacgcacaacgcaagtgttgatactaccaggcgcttggcatgtcagcgaacaagaactcgttcctacaggcaagctcgaacacgccctatctagcttgtaatccatcccggccagtttacattgtactgtattttgaagaagaaaaggaaaggagacgattgaaaaatcctgtcagtgaaaacactattcaagttcagagaacgcagaggccaaaatcaggtactaacgatctcgcgatgtgcagacgccagaggcgcacgtcaaaccttgacctgaggtcccacacgacgttcctaaagaaacaagcatgccgataagttcttgatgacaaagaagcaacccacaagaaagaagattgcatgttgcaaaaatctggacagaagattcctacttacgatcgtctaccgttctatctgtcgggcaagacgaactgttcccagtgcaggtctcttgaatgtcgcattcaccttgagctggccggcagacgacggatgaagatgcatattgacaggtttctgtacagcacgcggcggacgttgggtcgcatactgcccctgttctgaacttgcaagctgtagttgttcgttatgattagtgtctatcttctggagatatcttcgacctcagatacaagagaaggggagaaagaatgatttactggcagggtcgcaacaggcagaagttgcgttcgatccaggatcgcaatcttccccaggctcaagtattccattaccacactagagtagcagtaggatatagccatgaagagccggtcagcgatgaaactcgagacaaggtatgttttctccggtaatagttgtgcacacacctgctgaagagagatgacatcggtcgatccaggttgtttgaggcaagacaggtcgatcgctttgttgcctatgaccgagcagatctagaaagaacaacagagaatcgagagacccatcggaacaatataaatatttggtgtcagcgacatgctgatgaagatagattgagaatgaagaaacaagttcaagggcgcacgttgccaatactacatggcgagaacactgtttcgcctctagacgaaactggactcatcagatactgtaaagtgaacaaatcaagtaaacatacataatgttgacgccatcagacacgcagtggaagggccacggcagcaatgataacagaagggagggaacgaacctggccgtcggcattgcattggctaactgagagcgggcaacaagttgtttgacccagggaacacccagatgcgcaatcatggatcgctgtagaccgaagaaattgagtaagatgttataaaactgaacagaaacctctacttggtgaattgaatcaagggtcaataaacagaatgatgtgtattcacctccgaaattatgaccggtctcatgggcgacaatcttcaacacattgagaggagcccagacgtcagtcagtcagtccgcaacgaatagtcaagcgcatacaagtcaaaggaagaggtgactcacctgccattctgtcgcaccattagttgagacggctgttcctgagacgaccccagaagagccttggtttctagcctatgagtgcatacggtcaagatttgtttagaagaaatcctccttatcagcacgacagtctcaactgatggagattcttgaagctaaataagaacactgacactggaaacgcacacctgccctaaccaagcgactccaacctcgcttcctgtcctgcagccgctcatgagatgccaaagtcctaggtcatcgcccgatctctcggatgcccctctccatgcgctgaataagctgagtcggctgttcaaatcggtcgaggccgaacaagcaagattccatggctcggtcgatccagaggacgctgaagtaggacagtccgttaaagggttcgagggaatgaagatagtagaaatgccgagggagatgttgaaagtctgacgatagagcgcagaagcggtattccagttgttaagcttcagccccatttagatggaccagaaacgagattcgtgtcagcgaaaacaatttgatgagatggaggaaggagttcatgtccttacgatggcttgcctagcctcttcgacagatccgtaggctccaacgtaagcacaatcggcagcaacaccagctgtttcaagcacagttgacgttagatcatctgcaagatgtatatatttaaccatgggaacgtaaacgtactgtaaacaacacgttgttccttgacgcatcccgtggtttgaccgatagtgccagagtagctagagaacgagagagagaggtatggtgtcagatatattcgcccaagagatcagaacacattctaaaatacaaaaaaattaactccgaaggtagacgtactctacagtcccagatactggaacgtcttgtctcgcttgtaacgaacctagaccggtgatgtcaagatccagatcccgcctgactctccaactgtctttctgatccattgaactcttcacccaccaaggatcattttgatcccaattctcctctagagatgatgaccttggcgcggtatataccgggtgtgtgttgtttgtgttgaagtctaatttgtcgtgcatgcatcctgaagaagggacttccgagatactctgttcgtaaccagaatccttgaagatgaccatttgtgacgcatcagctcgaccttggtcatgatcaagcagctgaacgtccccattgcgccgatggagattataagtttctcgagagagaacgttgtgaattcctccgttgtgtgtgaacgcgccttcaaagactctgccgagcgcagattgatccgagttggtgatgggtcggacgagaaatcttgcccagcctgaagactcggggtcggtgggataatctttgtcgtgtccaaaagacgagaacgaccgtgtgcgatcctccgcccattttcgatcagatgtacgtcgatcagagtagacggaaccggagaaggcaaggatcgatgtccgatcgagaggagtagatacaggcgtatttgttagggggtccgtagtcagcatggatgcctgagggtgaattaggtttctgcttggtttctaatcaagatcgcaaaaagtaaggaaacaagaaacatgattgacgcaagttgagcactctgtagaatacaataaaatgaacgagaattcagaagaaagtcgacctcgatcgaacgacatacaaggtgaatgtaaagctccgtgccgtcttccagatcgaccgtcgtcctccaccaatcttcaaacccgagatcgttctcctcaggtgtgtcggctgctcgtctataaacaggagtggatctgcgtcttgttgactcgagtggttgccaacggggaaggatctccaaccgagaagtccgtggttgatgcacccggacaaggggagagttatgatgaaaggaagctgggacaagaggtgggtcccgaacgaaatcatagaataagaatgcacgtatagacacgaccaaggtcaatttcataaacgcgcgggccaagattgaagcgtcatgagatatagagagacgaaaggcagtgtgaattgatcaaacgaatcgtcagcctgccaagactgtatgaccagatcgggtgttcatagaacttgccacatctcaaaactcagagagaacgatgaagagagaaagaagagaacggtatgaacagacctttggctggttgagcaagcaaggtaaatagaatgcatatataacctgaacagatgaggttcctccaacctgacctgctgagtgcgaatcgtcccatttgtgagtgtttcaatgaagaatcggctaaagactgtctctccggaacaatgttcttgtggcaaaagtttgaaggtggatgtacccgacagaacaccaaatgaatcccaaccaaagctgatgaaccgtttatatgaagccaaaaaaggtgcgctctttctaccaagcctttttattatccccggaggcgaaccgaaccgaagcgcgccaagacaatgccggtcggattacgtaatcgacccacagccatcgacagacgacttggtgttctttctattttctgggagaaacttgacttttcattcataacacttccacagctcgaccaaccatcgcgctcagctcggtgtccagcagctctttcagcaccgttccgtctctggtatacacccacttgtctccctcgggttcaaagtcaaatcgttttgggccgctgtttgtgtgcgttgagttgagaatgggagagagtgggagagattagacactatttattttacaaccagtttctcctagcagagctacaacagaggggatactgaacagaagcgcacgaacctgacgggactggagagccaaatctgtttgtttggtggctgtttgttgatgacgtacgtcccatgttcgcccatactgagcgttagtactccactctgtggtcaccgagcgagcagttttgacgagtggagattaggccaaaacataaagtcagcttcagtcatcgagcgacatacgcacgcacacgggctcttgacaagaatcaagaagacatcctttcccacacatcgatgtctgagaacaacatgaagagaaaggccagcacgatggtgtttgggtaacaaattaaagcaagcagaaaacgattttagaagatcgtttcattcagacattcctcctttgttctattttgtgatgatcaaccacccagcacgacatgcgcccttctatccgtccttggccgaaaggcaaggaacatgacctctactcatgtccaaaaaagaacacacgccctctccccgtatgacaacgacggatttaaattataacatgagaactcacagaatactcgacttcccatccgccttctgctccatcctcaccttcaactaattcctccagatcatcatgaagagtgttcatcgttatatctgataactgatggtactttgcctccgtcaattccctgctcactcatccggtcgtacacattttccaagcgtgaatggatcacccgcagggagttgataataaaataaaataaacagatccattagattaatgatcgatcgagatggatagacagacgtgttctctcgttcgtagagaagacagacaaactttaaaagaaaaactcacgaagcaggtccttgtggaggaaagaccgagtacgttcttgacagaggagttcttcctgtaggcaattgcatatgcacggatgagatcctaacattcggagaggagattcttatggggagagcagaggaagatgaggtcgttcgccgggcgagggatgtaatcgcacgcggtgcggacggggacgatgacagagaaaaagagaatgggactcgaggtcgaatgagagacgtcgagatgttgagcatgatgaacttttccgaactacttgaaatcaagacacctgagataaagttctgtttgttgtgtttgagtcactgacaaagatgaaagatcgattcgttcagatcagagtgatgggtcagggttgggtggatgtggacggattgagccgggcagaattcgcgggtgaaacgtaatctggcgtgatggccaatcctgactggcgcaaacgaggcaacctcagttcgcttctctctatatttacatcttcctttctctcttctcttcaaatcctatagtttgtccctcggtcttagtcgatcctggttcttgttcatttatcaaaaagagaagatgggaagactagaaaaataagaggaaagacagccgatgatagacacattttagaggacggcacatcaggcattggctaagcaagatttcgtctcgccgacgatggcctgcgatttttttctggttttctcttggagaccggaccgaacgcctgatcagaaccacagatatgccttagaaccctattcacaccctgtacgaacgtttctttgcaggcggatctcccggccgattgagaaaaatctactcgtcgatgtatctttggtcgttctagttggttcatctcggcactgaatcacgaaaataattgaatttcagcagtcttgacatgggttcaacagtggtttgttatttcttctctaggcaacacccttagatttccatttctgcgcggagtctcaagggttctttctgagaaccatgaatattctggctcaatctcctctctgtcttccttgttcacaattcatttcacaaaaatacctggatgatctgtattcagtcttgggaaactagtgaggacttgattgggaacaagtgccagaacaaaaagtccatgttcaccattttatttcagtaataatcatcatggccgctaaactgttcttttgtttgaatctttttaatttttattaaatgtcaccgccctgttagctcaatcggtagagcgtcagactcttacccagtcgacttgacagttggcatctgaa

SEQ ID NO: 1678 - DNA, 39221 bp, Xanthophyllomyces dendrorhous
cgacccccccatggggctagtttcttttgtttttgtagtcgaccctggttgttatcaatctggagtagcactcttgaagttgatgtgactgcgacgggttggtcgctctcttttctcgtcttctttcctcgctcatgggggttgttttctggtcttgacgtccgtcgttagctctgtcgttatgacaagtttatagccatgcttaaccaaatgatctatccgctctgacgcgcgtccaaactggccacgtcgccttcactgcaacgcgacggcagacgacgcgcctgatttttctatccgcttgacatcctcaccatacctcgacaagaaccatccatccttcccgcttttacctctactttctcttgcttcccgtctatactatataaacaatgagtgatcaactgatcgactgatgtcgcccttcttacagtcaatactcacccaatcaacttaccttgcgttaatccgtctcggctagaatcgtctacccttgcccatactcgcccacactcatctcgactttgatctatctatcaactgactgtcatgtcgctgacctctaacgaactgaacagcttgaagcgaacggatgtccagaagttgtgcaaggttggtctctactatacacttgctctagtcgatatcatcgctcccgcctgcccccttgtttgtcttctctttcttttactcactatcctgccttctgaacaaatagacgctcggaattaaaggagcaaaccaaaagactgacactctcatcggcctcattcttcatcactacgatactatcggagaggatgttgcctcaatgtttgtacctttctccgctatttctttctgcctccggttccgtcaatcaatatcaatcctatctcacccagcttgctgtctcttgctctttatggcttgtagaaagactagcttaaattctaggcttcttcgaccgactgctagctcttgggcaaaacaggcgagccagaaaggcatgcttcagaaacgagctgtctctcccaagcggatcgtctctcggaaacgatcatcctcttataaggctcggccaaagaaggaagccccgaagtcaatcaagaacgtcctcgcccagaggcatgagaaacccgcattgattgagtctacaaccgcttggaacgaggccacgtctgataggaaggcagacggtgatgaagcgttaaaggatgaggtcatgcgagccgaagcaggttcgcccgatagtgagtccgccggaaaggcctcctttccctctagacagatgctcctgatcgctgaccgtcagataatttcccaccggtacagaaaatatcaaggtagcaaccacagagctaacctcaacgtcaaatcccacgtcgacctcgaagcctaacgaaggtacattaatgctcttagctctctgccgcttcttcgccaggctaacatctgctctcttgcttcgaatcagtcgacattaccagccttctgttcccatcatcatccgcatgtacatgcatgaactcaaccgtcatgctatcctcacagccgttggttgatcctcgatccgtgtgggatgctctgaccgaactcactgctaagattcatagtttgcctacaaaagaagagagcgacctggacatgcaacgcttctatgatgctttggagcgtaccgatgtcgccatcaagtctgtcagctcaagaatcgatgtctccgaccggatgcgtaacctgaccgaacaggagtctgtcaagaaaggggacgttgaagcgatggtgaacaggttgattgattcgcgcctcgagcagatcgaacagtccgttgcttgtcgactcaaggcgatggaagacaagctgacagcccagatttttgagaagcatgctcctcaggtggaaacaatggttctctctgacctatctatgggactcggaggacagagacatcaaatctcgagtaaacgtgcttgggatacggtcggcttccctgcactcatatcttctgtctcgattgccaacgacttcactgttgacagggagactctgatcacttctacaccttcttctatggcctccttcaagacttctttccctcttttctcgccgcctgtcttttcggtagcaaccgctctagatgaccatcggccgaaacgatcaaagatagacagtctggtgacgggtggaatggccgcaaacaccgtcgggggtcttttgaaggatttacccgaaaggacgattagcagggatgatacgtcgcttatatcatcggctactcagtcatctatcgcatctccctttgctcctgtcatcgcccctaccatcgacacatccgctccggttgcttcaacactcatcgccggagtgacatctcctcaagtttgtcgtacaccgctgcttgtgacaggccagtctgccagatctattgccccacttcctttagccttccgcccaggctccttgaagccaaaagacaacaaccactactccaggacggctccctcgagtcgacagccgaccgcggcttccgctctcaagtgcacagctggctcccagcgcgcgactggcgtcaaggacggccagcccagcgataccatctcttacccgtcgttctctccattcgagcgccaaacggtccagtctcttctcccgcccgcgcctgctggcgcgccgctctggatctctccgatggcgtccccccgaccatcgtaccgatatcgacccaaggcaaagcaagggccaaccaaggagggagtcactccgctcccattatcagccacgggagcgcacaacgcacgacttggattgaaccagaacatagagattgctccgccgacgccggccggtccgaagacgatgtttgggaccgagaaggagactttcggtagaatgtttggcgatgagatgactccgtggatgtcgtgagcagagcggtctgcaatactgggtttatcacctcgtttcttcctcacctcttcccttcttctttctctctcggtttcccctacttctctcttccttctcttttgataccagtcgatcgagctctatcaaacaccatccttaatatatacccctccgatcaatatccttttctttcatctacatcgtgattcgccatcgactactctcatcacttcgcttttcttgcatcccgtcgcgtctttgtcttatcacttcttctatatatatgtatgtatactatattctgatctcgatgactcctgtctagtccctattgggtttcttcttgcgaatatctggctgcaggctcgagggattctcctgatagaatcgtgatcttgagcaggacgtgagtacgatgagcccaaacggtaacccacagttcaagaaacgacgaggataccaaaaagccaattcatttgatttcgactctttcttccttcccgacacatacacgtccaagaaacactgtggtataccattcctttgtagacagaaacgacgtgtaaacgaaagacgcattaagaccaggaaaatcaataaggacttgcttccataaataattgtggtaaagaggaggatcgaaaggaggtgtgaggtttttcctttctaatgaaaaatttgattacgtaggcatataaaggatggaagaaagtagaaagagactgagaaagaattacgaaaagggcgaatacacggatctctttcgaaggacgataccatatcgactggacaacgagaagacgcgcaaagtggtcgagccgtcagtatcttttttgtactaaactttgtgagagacgagatgggtgaacacaaaagcacagtcactcacgtaaacaagatcgggataggagccaataagagagcaagacagccaagaagggtagcagcccatctaggatttagcttctcgaacatctacatgatcaaaaagaagcagaacaacaacagaacagaagagtttgtacgttagtgaaactcgggttgtacaaacacgctgagcgagagacatggacaaacttgagctgttatgaacaaggaatacccaaaagaaaaccaacagggtcagcagggtgaacagccactcgaggcgttatcgataagacagagacggcgacatactggcgaacagagggaaaccagcaccaaacaacgatcggacgaccgtggtggcactaagggcggaggcggcgtgcatgagataaacctcgataatgtagttgaacaaggagaggaacaagtacaggattgcccatccgagcataccacctatattgacgaaggaagcggatcgtgcgtcagcgtcgacgttacaaaggactatgcgagtaagaagactgtttgacagcttggtacgtaccggcaagcaaaggggaccagtacgagatcgaagggaaactggtccaaccgaaccagaagagagcaatcacaaacatccaggacccgataagggccatctctaatctaacctccgggggaacgggttgaggggggtccatgtgactgtacttgtgatgaatccgaatgtatcgcttgttaaagtagaagatgtaggtgatcacagcacagatgccacctacaaaaaaatggggcgcaaacggagaaggaaagattgaatagaaaaatcagaaggaggattgcgggaagacccgaagagagagcaaaatatacaaaccgataaagagaggcaagaacataagaccagagattccttcagacatatggtgtccctgggtaaacacaataggatatgcttcgaatctagataatgaagaaagaatgggtctctcatcaacggtcatttcttcgttgttgaaagacttgacagagaagagaaggaaacggaagtgcgcacaagagatagaggatcccgtagacgaaactcatgtaaagcgtgacagccatcagcattggttctctgaaaaggatgtcgaacggcttgaccaggatcattttgactcgtgctttggcggaagtgtccaacctttcgactgaattcggtacattatgttttgaatcaatggaaacaatcatgaagcagaggtcagaaaacagatccgcgccttgagaaaatcagaggtggataggacttgctgggagcgtagtagttttcatctccgctcgactttcggagctttttcgctttcttagcaagaatgatgggctggttatgtgtaaaacaagcgggcgagatggacgagtcagccagggtttgaatgttcaagattccttcgaaaagaccagtacaactgccaaagtgcgctttaagacctaaagaagagaacaaaacaaaagaaagtgaacaaagaaggggaactgacagcgtaggtttccgggataaagaacaggcacaagacaaaacagagtccggcgaaagcaaacaggacccagtacaacactcgccagctgaccccggcggtagatatgaaaccaccgacgatgggacctacgatttgatggaaatttaagattgaaaaaagatggttgtgttcgtcgataagagaagatgatatagatgaagtggaggaaggaaggcaatagacataccaagagctggtccagcgaaaggagcgagggagaagaacgcgagggcgatacctcgtctgtcggcatcccagatgtctggaaacaagatatttgtttgagtacagccgctacatgcactgtttagagccacactaccactcaccagagatcaacgctcccgagttcgtcagaggacaagcggcgaaacctggagggaaaggcaagagttttcaacaagctttgagccgacttgcgtgtttggagaggaaaatgctgagttaaacgacagaaactcacatcccgagatgaaccggaagatcaagatgctagcggtgtttttggcaagggcacaaccgatttggaaagcagaatagacaaagaatgaaatcaagaatgttggccttcggccgtaagtctcggacagaggtccccagagtagcggacctgaacaggaaggatgtcgggagagaagtgtgttatgacgaggatgacgtttgacgaaaacctagaagacaagaatgtacataccgacacagtaacctgcgacgaagctgttcgatgagaagcaaagatgatacatagcgacgatttgattctagtcaggtgcttgaaagatggatgaagaggagccaaaacgaggacgtacatggcaatcaatagggttgctacctcttgagaaaattcaaaatagacaatcatctgagagatgactccggagcttggttcgtaagaatattatgtgagcaattttcaggcaacgccgaccagggattgagagtggactgagacgacttacggggcagaggacgcgaatgttgcgttcaacacgaggataccggacagaaccgtcaggatccactagagcgggttgagatcatatagaactgattagcatgtttttcaaaaacagcaagaccaagaggtcaaaaggttaaaaggatgatcgtccggggcgcgtactctgtagattgcactccaattctattaacagaaaacaggatcagcccgagatcagatcatgatcagaaaaagagagagtgaagacgttgtagggaactgacctttgggttagccttatcgtctggaccatcccaagtgacttgatggtctttgtctggtggttggaattgatgaaaaggattagcgtttgattgggaatcagcaagtcgcgaggccaagagatttgaataaagacaatggagtctccggaccacacaaaaaagactaagaaaacaaaaacatccaaggaacagcggagagtcaccagacgaaccttctttctctatctcggcgatacgctctcgctcgttccggtcagcttcttcagagtcacgaacaggaggaaggccggattcgtccccgtcgcctagggagactccaccggtcggtccgacgatgggtctgttagaaagagggagaaacagacagagaaaagaggcagagggagggcaagagacaagggaagggaaagaaacataagcgtttggtcagcagcccggaattgagtaacaggagacagtgtcaaagaggatgacaggacctcggccatgaaaggccgggaagggagcagtgggaaagaatagaatagaatctaactgacggattcgatatcctggaaagtgctctgttgagcgcaagatcctttgggcgtccgctctgacttaaagttctagttctctgtcttctagtctctaggagctttgaatcggctcgaatatctttaacggtgggtagtcttcggagggcaaagctatcagcgttttcgtcgtcgtttcctttatggtagtggtgctcgaaatggtctctgatcaaagcgggatgatcggaatctgtcggcggaccagtcatggctttttctgcggacgagagatcgttggcgagcgggggagcaaggccgagcatatctgccggtatggacgatggtgagctgtgaagtgtggttgtcggcgaggacattaggttgttttccttgttggtgtgtactgtgttagtgaaacaagtcgatagaacttcggagaaaccgtttggatggatcaaccttaagaagaaccgaaaaggccacgttgagtgaaagaagcaggcagagagtggatcgaatgagaaggagaaggagaagcaaaataacaaagaagaagaagaggcaagaagacaaagaaagagaactcactccctcaatgaagcgactcgacgatggtagtgagtgattcgattttgcgctcgtacctgatttgactttttttgggtgttggggcaagaattgatttactcagcggcacggcaaaagccgacgatctatgggtgactaagactgattatcatcttctagtgcatctctgtaatttacttcttattctactgtgaaagtttccttatatctcctctcccgccctctgttatgtacacgttctgtggtcccctccttctcgttgcagatccagtgagcatgctgctactgctgctgatactactgcagacacggctgccatgtcgctactgtcactactactgccaccaacaccaacaccaccaccaacaccaccaccaatactctcaacactcttttcatctctcaacccctccacgggcttaaacaaggagacgccgaccatcagccgcacgcggacgactatccgtctaaaaatatccggccggtagatttttgtcagacattctgacgtcaaggcagaatggattggtaagccgtttgtaagcatcgacgtcacatgtcacgtggtgtttacgtaaggagacaatatgtttgtgatatgagctgtatagagcctaagctacacaggtgacaatgcgcttactgaaactagtcactatccaggaaagttcaagcgtatgagtttagactttcaaatctcaggagacaagcgtaaacgtgactgaatggcaggcgtagctgataggaggtagttgagaaggatcctgacttggagaactgcatcaagagaagcgcgcaagcattcgtcttatgttgttcaagcgtgctacccaggcaggggtggcaatctggtttccactcggttactaaactaccagactatccaccagaggaatgtcaagctggaggatgatgaagcaagagatcatcaaacaacagaccgccaagcaagtgtatcgctgatcgagagaaacgggaaggaggtaggactatcaagcgcataagatgaaaagagggagcatattaagaatgggaagatatgatgaactgctgaacgagagaagcgagtacacagtacgcgtacgttatacctgatcctgattcctaacacgagctgtgctgggaacggggaaacagagaaaaggttcatcctacatgacccgcgatgatttccgggattgatgatgaaatattcaggcttactgaatacggttgacgaggacagggacgcaaggaatcaatatcgatataccgcgataacggagcatcagaacgaataatagggactgaggacaagggaaacaagggagttggcaaaggatccaggctccggagactacgctatggatggcaaaagaagctcgtcttgtatctaattctcagactccacagacatcccatgtggacattgcgacaatgaagaaaaacgcagaacatgatttcacgaaaagatggatcataggatgtgctggtagcacacgcgctgcactactccataatcgcaagttgatgcgttggaaaagcaggagaagttgaggtgacgaagggtctgcgaatcttaggttacgtgcatgtggcatccaagtcacatctctgacaccatggttacacgctcacgcctgcactcactaccttctatgtgccgctcggtgtctcttcctccgagatatttctcaccaacagaactgcaacccacaaaagatgtcgaaaggaaaagatcaggacctggtaggcaagtcgttcgctctctcatgtatcgacaggctttcaagccataccataggcatccttctatcagtttatcatactctcttttgtgtatcgatacgaagtacattattaattttcatcttttgtttcgaacctcataaatccaaccccacacctcgattgacaaaacagacctcagagagggtacgttgcgaaatgactcccggtcgttcttcccttcgctctttcaacccacgattttatgtttgaccgtcttttcgtgctttcttcagcccttcaatccacattggtcgtgctgacctcaccggtccagccgacgtcgagtacgggtctgacaagaccaagcacagagaccctgcaccaggacttgctctccctcctcgctttactcaagtcgcacacgacttcactcgccctggccataggaaagaccccaccgacgccatacgcagccctatcctcactcaacaagctcacgacagactggacaaaagtatgctggttgctcgaccaggtcggcaatgacgacaacggcaccggcagccgttcggcctttggtccgtccgaactagagaaagaatggaagagcgcaatggatgacgttcagcttgcactgcaagcttctatccgtggttaccaattcaggatgttcccttcgtcttccgatcgcgccgccgagtctgagaaggagaacgccgctcagctaggtgggcaagccgactacctgatcgacgtccgagcggtattttccgccatagatacagccacgcgctctctctcggcctcagagattcagagtcttgtcaagacatggaaaatacacggtgatcagctcaaagatggagagttggaactgagagagatcatcgagtcgatagacgcagatcgtttgtctggtgatgaaggaagcgaggacgaagatgatgatgatgatgatgataatgatgatgactggggaggcttgatgggggatctatccttaggaaagaaattcaccgagactccaatgacctctcaggagcgggatcgaatcaacttggtgggccctccttcttcttctcttctgctatactttcctttgccttcctataattgcattggccatgaaaatcaaccctaactctcgaatctctgttgccggatgttatacacacaaccagattctacccctgcttcggttcccatctttgttacatacaaacatactcaaaacccaccttctcccaaccttatcggccgattcactctcctcgcttcctgcgctctctaaatccctgctcaccgcacaggacacccttgtctctgcattatactcccctcaaacactacccgacatccaaagttcaatcgcgtgtctagaaaagacatgccttgatctgagcgcctgcgtccgtgccgacttgcagggtttggcaaaggaggaaattgacaagaaagcaggctggctcgatgtgtgggacaagcaggtcaagaggatctcgaaagagttgatcgggaaggacaggaaattaataccatgagctttttgaaactcttgtgattgttatcatttttccctttcgagtcgactgtccatttcttcctgatcatctttctttcatatgaccctgtctttcgtttgttcggaacgaccctcgctcgctttcgctggaatcttcacacaagcagcatgaatcttgatcaaagttgttgtgcgtttaaaaggaaagaattatgtgagaattagaagacccaaacccctcagactagaggttgatgttgtacctgcacaaaattggcaaacagaacaagatcagacatctaatgactggtgacagaacaaacagaaaagaggaaacaaaaaccacccactcatactctccatccccagccatctgtgccaaccagaggaccacactactcaacatgatccccacgttctgaacgacggtcgatattccataataatggtactcggatggataatccggcaagatgtatttcacgatcaaaagtgtctagagagaagcgaatgacaaagaaaacgatgaaagaagggaaaagaaaaggagaagaagaaaagaagaaacccccatcttcctgtagcgtcaactcatttttcttcttctttttttcctttcgaatctcacacattaaaaccatcaggaggtggacgtacgatcgagaacgaaacaccgccggccatgagagcaaacccaatgaagagtgcgagtcttgcccggaaggctgtgcttccttcacctccccatgctcctccatcaccagacagccgagatttgtcaatcagattcgtgatcagcatcccgactatgatgtcccaccacgatgatttgataccaatcaaccgaccgaccgaaccacagacgaatcagtacttgaaaggatttgtgatcaaaaaggcggcagaaatgatcaggatggagggcttacgagttccaaggatacctgggatccaatctacgaacgtcatatgcacaggtacgacatcgtacgacccatccaccggtggtcgagctcgcttggagagaatcagtgcatcaaaaaacacggcccatccgatagcgaactgatgcaaggacaagaaaccaaatcggagagttcacacagagatatgacagatgtcagttcggatcgcaagataggaacaagacaaaaccacttccttgggcacttaccaaggccccggcagagtatatgccaatctctctcttcttatgggcaagcccgggaatggacgggagtctgaacacaaagacccgtctgggatcatatctggaggattgtttgaatcagtataaccagatcgaccagttcctttcagatgcaactatcacacctacgttgctcttggaagggacatagctgggatcaagaaagagatggatgcgatatgaatgttggtagcgatgatgatgctgctgatgatgctgctgttgctaaagcacaccagctcaaagagagccggactgacatctcgtcgaaagctgtgcagaggattcatgtggcacgcaggcgggcccccggctctcgatgatctccgttaaacccggtggccgcgctcgccttatcatctttttggacatctttctttttgaacatctttcttctttttctctttcgttcgtcttcattccgtcaaacatccatccgcattccaattggaccagctgctttctatccatgtcgttccgaaccactgcttctctcaggcttagcgtcaagcccaaggctttcgcggccagtcctttcgcccgggcggcctacacgacttcatctacctctacatcttcctcttcggtctcgtctggtcagactgctcctgttcctgttccggttgcccaacgaccagtcaagcactttttggatcttcactcattgtctcctgagcagatcactggcctgattacccaggctcagcagatcaagagcctgatcaagcctccttcgtctgctcctcacaagcttcagaaaacattaaccgacaagacggttgccctcttgttttcaaaaagatcgaccagaactcgaatcgccagtgagaccagtgcggtcattcttgggggacacccaatgttcctaggaccagcagacattcaactgggcgtcaacgagtccttgaaggacactgctcagtgagtagtcttcccggagaacagctattcccatctttggtctctagcctatcaaagcattgccaaatgcattgcttcttctcgacctgcctttgtctcacttggctgatgactcgatctacatttttattcttatttcgtatttccttctttctcttggtactcccaaaactcaatctcaacccttcttgaactcccctatagcatcatcgggtcaatggctgatggtatcatggctcgagtcggagcccacgcggaggtcgagacattggcaaagtactctggaattcctgtcatcaacgcgctctctgatttgtaccatccaacccagacgctcgcttccttgctgaccctggccaggatctatgctaagcgaacccctaccgctcctcactttgctcctcccactcctgttgtcgcctctcaggctgaagcctccaagccggctgctgctgctgctgctgctaccccgtctggagacggacgcgcgacgaagcctctgcagaagacctcttggaacgacctctggtctcgggccgggaacggctccaagccaagcctgttgactccgctccaggggcttaaagtagcttgggttggagactgcaacaatgtggtgaatgacatgatcgtcacttacccccgattgggaatcgatcttcgagtggcttcgcccggtggaaagaacggggcctacgggcttgataaacgagtggaagctaagctgtcagtctgctcttcgattctcggcggacaattcggtgaccgttttctgtcttctctcttggtataacccggctgatctctgtatatatgttatcccatccagtgacgaattcggtctcaagcatgccgtcaccttcaccagctctccagaggaagccttgaaggacgccgatgtcgtcgtcaccgacacttggatctcaatgggtcaggaggaagagtctgctaggcgattgagagactttgctggtttccaaatcactgagggtatgtccttctgaccgatcttgaccgtcaccctatgtttctgtctgcctgttctcatccttctaatctccctcatcttcttcgccgcgcgcagagctttgcaagcgagctggcgcaaaccctgactggaagttcatgcactgtcttcccaggcatcaggatgaggtcgacgacgaggtcttctacggtcctcgaagcaccgtattcgaagaggccgaaaacagaaagcacaccatctgctcagtcttcaagtgagcgttctctttcctgtgtcggccccttgctctgctggataatttactgatgtttggttgcgctcttcttcctcttgggacgaatcatcatttctcccatggcacacagctcttacattggaaagagatcgatctaaaagcatttagaacgcctagcttcgtggcatagtaaaacattacgttttactttttcaaagttatcttgggctcttgtaggactttttttctctcatctaccatctcttttctccttaattttctttaaatatatgagcacttttgtcgaaaaagaaaggaaaatccgacttcgtcactgttcatctcaataggtgcactacgctatcggtgtataaagtatggatgggtatagaaaccaccacgaccttttcaggcagaagttcctcgaatgagttgcttgacctcaagaaactgataaaccctatcggcagcccacataggtttggtctttgtctcatcttgaagaagaaaagaggatcccccaaacaagattcgttaagacacgatgcacggtccaggtacaacctgtcaaacttgaagaaagactcacaggcttccaacttgtccttggatgcagacatgttggccatcaatgcctctcgggagcaactccacatctgaagcaggttgaattttttcttatcgtcacagtcctgggagagcgcgattctgagaaaaccgatccccatgtcaacccagttagagcagtctacatcagagaagtgagagtcgaggagagggatccttctgagacgaacgtgactagctccttttgcttggagagctccttgatggatgcttccacttcgacgagccctgaaaaaagaaagccacccgaggaatatccacacatcaggacagcatgaacgggtgaacatgacagaatattcacaaagacatacaggcggcaatctggtcctccttgatgacgaacgaagtggacaaagtagtttgaggagaagacatgtttgagaggttggttggaagatgaagagatgggatgggatacaagttaagaatggtcgagatgagaagtgagatggggactttatatccaaacggaatgcttcattcaggtcccaagatgcatcagcagatgtccccaacaggaacactcattcgagcgaaccggtcagcagatgaaatgataagggactaagacacgttcgtcctgttcaggaaccaggggctcaggaaactcgatagatagtgttggtccaaaccagccagctttacgtttaccgctttctttcaaacaatgtatgtacaatgaatcatatgcatacaatgagatacagaagtcgatcgagacagatttatttggatgcacgaacttgaataccacttaggcgacaacaggccagctgccaaggtcctcgaatcagacatcgttccgtgagtaaatatacgtgaagcatgagcggctcgaatgaagcttgacttacccgccctggaatttaagaagattgatggctagctgagagtctgtagaggtgtagtagtgatacaccaaaatagctccatcgacgtccttgaaaatgctttgacctcccggaccgacaatctgataagtggcaacgacgagtgagtaagctgattcaaccgcccaggaacagaatagatcataaagtgggtattcactgaatcatgagtggaaaggatctcggttcctcctccagagagggcagcaaccccagctttgtcggtataaggaccggtgatagaggtagctcgctttatagacatacaaccatcatcaaattggattgttcaggaaaccaagcggactgcagggcatggtttagttggagaaactcacggagacatgaatgctgtacgtgctactaagtccgctgcagcatttatcccaggatgtgaacagatagtaactatcataaaggaagcgaaaattaagctcgttttacagttaagccaacagattcacaagagagagtcaaggtacttactatcctccatcctgccagatctgaggagcttcctctgcgttccctacacttgcaggtcgggaggagatattcttccgctgagcacccgaaagaaccttaccagttgaagggctgatctcttgaaaaccatacagacgaatataccccgatgtcaatagaagatgcagcacagcgtgtgtgcgtgatgttcgggagagtgaacttgaacatgactcaccgatgatctgaatcccgctccagaaagatccataagtcaaccaccacctgccagttgcggcatcaacactcaattgaggatctttggcaagaagaccttttcagcaagcaaaccgttgggagacgatatatattcgactttgacataccgatagcattatagttatcagaggaagaggaagacaaaacaagaccttggtcgacccaagatccactaaggcctgcggtttgaagataatgcctgacaagttcagtatcgaatgtagaattgaaggctgaaatgatatgaaacgaaccggtagtagaagtagctaagaagatgccggatgtctgggatccgaaggaagacgcagcatagtacaggaggtattttccgtcttgaatggagagatcgggcgccctgaggaagagggacgtatagactgaaggtgagctgtctgtatgaagcatcatcataagaaacctatgatgagaagagaaaataattcaaaacaagacttaccagaggttggcatcagctccagcctgggtgtaagcataagtaccctgaggagctccattggggaatacctacgatgttgcatgttatatcgtgttagactgtgttctctgtcttaataacggccctctgatcgaaatagactcacgcttccagcagcagtccaggtctgatacgcccaccagtaagtgccagtatagttaataccaagctatgatacagtagtcaaacactaacaattcggtctgtggaggtcacaatagatagtttgggagaggtatagacctgttttgtttggtaggttcagtcaggctatagacattgtccagttgagggttgaaattcaaacaagcgtacctcaatgtacgtgcctgtaggcgtcttgactatagtgggatcgtgtgtgaaggttgcaccttttctgtagccgttagtgagccagaatttattcacaagtcagcatgccatgtttctggttacaaacttcagagacgaagggctatcagtgcaagaatttatgcttacaccgttccggggttggggtaggaagctgccgcgacggcagaaatgaacgcagtgaagagcgttccgacttgaaagaagttaaccatgctgtagaataatcaagcaagctgaaaaaatgaaacgagagatagcacaagttgatgcagaagatgaaagaaaacgaataagtctttctctctagaactaaatacggatctgggcgatgagttccgttgttctgcttgatcaaattcagccggaatgtccgtcccaatccaaagctgtcctctagggttctccgtccggttgaattcttcctctagagcacaaattgtgtcggagatgattgacgaaaagaatatttgatccgtgtccatattgtgtcaacgtatggcgatggcgagagaggtacatgatttcaagttaacgtttgacatcaagcgtgaaattaggatactcctcacaaacaaaagtccgtgtgtcaaggagtgattgaataaaagtgctgcttggaaactagacatagagaggaagattcatcctgatctaaaacgacactgagactcatagttgagccggttccatcggtcagctgatgaaggtcaagtccggaaggtagatgatcagctcgaaagtgtggaaatgttgccatgctggccaccgttccgccctctgtcaaggttagcatcaatatcaactatttttgagaattagcataccaaccagtacattaagccaagaacaaagacccagtttaccaaaattccgctcgtttctccgacaacatgattgctgagaaatgaatcttcacgatcttggatgaaaagctgaatcgatcatgtttatgttagggttgcatgctcaacctcctcttcgcgtcatcgttggggtttcctcacatatttctcaagaactctcgaaatgctcctcactagcttgttgctttcatgtcggattcacctctaaacactgctagaaaccatgccacctagaacgtcggaagctttaaatcctgctcagccttcgctcgactcatggctctctattccaccgacggtgtctgaacttcatcctgatcctgccttgatcacatattccgatccaatattcgacaaggatagcattttcatatctcttacatttccgattaccagcccaccaacgacataccagatcaggtcgcttatcaagcagtacatgtcgcctcctcaccacccgaaactaccaaaagttcttcagagaggggacggagtcagcccgactcacagaatgtacgcctggaaatgtctggtgctcaaaaaaggacgcgacggtaccggtggagaggtggactatgaagttagggaaggctctgacgatgatggagagaagtatggggcggatcgcatactaatggtgatggaaggagcgatcgactgtatcacattttgctgtcggttagtttctcttacgcgtcgttttgaacgtagccaggaggcttatagaatggttctttcttttgcccttcagatggtttggcggagaaatgcttggggtgggttttgcatcaatctgttcgagctgtaatctgaaaatgccttacttaactttaacttgagatgtctatctgcagcctatccgatttcaccacattcaaacaaccagcaccgaatctgttacagctcatatgtccctcgccgatcttcatcctcttctcctcgagcttgaagcccgcgactcggtcataacggacctacgagggaagctttccgctccaactcctaaagctgccgactactccgacctcactctcgagaaagctcaacgtcttctcgtcgcgcgctcaaaaacaattgaacagctccataaaagggttcgagaattgatcgagacagataaggtgactgtagaaacgcctgctgtgaacgtggaagaggagggcgagccaaaaaaggacgttggtgatacgggtaataacgacgaggatggccttggaacgtctgttctcaatcaagatctaggcgacccacacaaaaacctgtcgacagaagaaagcgcgtttctttatcttaagagtgtagatgatgatagagccatagcgggggaagagaaagaacctccaagaaagagaggacgagtaggcttggagagtagttaatataatgtagtatcaatctataaaggcgtagtctacaggctgtcgtaaggttatctatggttcacttttcaaatataaatcaaaatcatcacagttgaatacccacatctcagtcgacatacatccagtcttcatttacaagcttcaactttatacttgtatgtagctctcatcatcctctgagtttctttcgcattgctgctcacactgagctcgtttacgtctacagagatttgcagttgggatttagtatctttcccacttctctatttatttctctttttccttcttctttctgtcttctttgggtcaggtatcattgtcgttcgactggacttgtaagtgaggtccttttcagtgtcaatgctagttcttcggccttctactgatgagctaggcctccgaatcttcgctctcagaattctgtgcataaatctgaaggtctcgcaacctccaccaaggctacaatttctcttttagtgagtcctccatcaatcggatgacgaaatgtttaaccttgggtacggaagctgataaaacctgtaatggatacttagctagccgagcttcctactctttacccgttcaatacattcgcaatactcttatactgcggtatctcaatgagataggtacgatattcagattctcaaccatggcatgattagacagaagatgaagacgctaacgtggactcgtcttttcttttcggcctttctatgtctcattttgcctcgacattagaatgcctcattgtactcatactcctctgacgtccctttactggcaggccgtatcctctattgctaaggcccactctatacgtccattctccagttcggtacttcgcagcgtttcatcagcaactctagattcaacaaacgtcgcatcccaagcctcatcatcaagaacccactcactctcctccagcctatccacctctttcgacaaagttcttgacctatccttctcagcccatgctgctctccttcacgatttgaatggaaagggaggcgtgattccagacatatttgaagaagaaaaggcaggctacgatgacgttttgatgactcgagagttttcagtacctaccaaacatgcgttggtcgctccttcggcatccacaaccgatccactcggattcttctcaccaaacactgtaccaaatccaaacggggatatgttagaacctatggtggctgccatccagcgagctgacggaatagaagctagagctcaacttaagaagttggcagaagcagacatcgagattttgcacgacccggtgtacctaaaggcggctatcgactcgcttcttgtggactacgcagctggtgatgcgggtgtagctcgaagagatctgcttcagaccccggaagaaaagctggagtggtttattcattggtattctctcgttccagaggcagctgaaggcgatttgtctactttgtttggctcgaccgcttggacccgacagatgtgggcagttttggaactggtgtatcaattccctactcacctcgagcacctatctcgaatcatggttctctttgccgagaagggctacggtctattcttcgttcccagtctgctatcccacctcgcccggcatggtccgcctgagcaggtgtacgatttggtgatcagtgtctgccgtgcggccggttgggagaacggaagcaaagagaggtcggccgcgtataacacggccgttcggtctctctgtcttgccggccactttcatcctgcgatggagcttttaaagaaggcacggagaaggacatcagccttttgggacggtagaaagatgtgtgctgggatagaatttcacacgtaccaagttctctaccaagaagttacttcccaatggggaacgaaccatccttactgtcggacattaattcactgggccgtcgaacatcatccagaacaagagatcacgcctgcgaagaaggcgtacccagagttttcgcttatcctcgacggcccgcccgtgttggaagatctgccggcagcgattcgtcaggtgactcgacctggggccagagtttcggccaaggcactctcgttcgtgcttcaagcgctgtacgagtcacctgtgcgtcgtggaaatcttcttggtttgattcatcggagaattatcaaccgatcgtcctacgatccgagcttgccaacatacgcccgtcgattcaagacccaggagggcgtgtggatctcggcggagatgatgcgccttcaacgggcgggccgacacgaggacgcgctcgagttgtttgcatcgaggtaccagtggattggtctgccaacaacccggaggtgggcccggtatggattaatcgaaccgtcggatgtgttgatggacgaggcttcgagagatctgcacgcacgaccgaaaccccgagcgaaggacttttacgtcggcccggctcgaactctggcgatcaagtcgatcatcgcactatcgtacggagatgtgaacctattgcaggcggattatgcatcattcatcgaggcgaacaaagctcgtttgtcgatcatggacccaagcatattcgaagagattccactcgagtttgagttccatgatcctgtggatttggtagaaccgccagtgtttggcagtagtgaaatcgatggcgatggccgactgacgacgccttggtcgtcccctggattccaattccatttaccaccggtggcgcttccgtgtgctgtggtatggcagccgtggatcaatgcgttctcaaaggtcgacccggacttggcgatgcaagttctgcgggatatggtcgagcgcaagattcctacggaaagttcacagtgggctgacatcatggtcggactcgttgctcgggggcagccagaggcggcgatggaagcattggagatgatggaacgggatggggggattcagattttcaaaccggtggaccacctgacaattcaggctcgctcccggctgggtccgattgcgccggtggagggccgagtagtccctgtggtgacgtccgaggtgtacgtccggttattgttggaggcgactcaccagagggatccagaactggcgactttgatcgagggaaaattacgccagagcggcgtgatcgtcaacagggaggatgtgtcgatgttacgagatgtgtaccgaaagcgggtgtcatatatcgggttcgcgtctggggagcgaccacctacgtttgagcagacatttggtgatttgatcgacagggcgtctgagtggccggatgcagcgtcaacaatgcgggttgaagagacgggaatacggacgaagaagcatggtaagctgagaagggtgctgccaagctgggcggacacgacgaacgatttgggaacaccgatcgcatctgcattgatggaggtctcgagtagcgccagaaagccgggggagggtaccgttcggatcggccacgcagccgcgcgaagagccaggcgacataagatggcgacttctgtagagagatgggaacgatctgatgaaacagtgtgaactcagttgttctgtgcgttttgcgcgtgcgcgagagagagaagattatctagaaaggttatttgtgaacaatgtaaacatactatacgacacgttgcagcccgacgagctgatgaattaagctttttgtgctaagtatgcctgacttctcaaacgacccagaagggttgggtactgtctgaaaaggaaagaacctttcgcactcggtctagacccaacacaaagcggtttgcttgtgatttcttcttttcttctctctctttcttccttctgtttttggcacgcataaggtagaatagaaaaaataaaataaaataaaatccgaaatttcaatagacgtattaccaaccgtcttgcttggtaaggcttttcggtgagtcgtgaccgaagcgcttggtattgtgtggtgctttaggggcgatggttacgtagacgcagctcagcataaccacaaacgtaaccgtatctcggttgattcggccgtgattgtcaactgcgaacagattccggcgtttacggcaccggcattcattggaagattttctcaaacctttttactttttcaataaaattctgatcttgtcttttcggggacccgctccatccgactcactagtgagagcgacttctccttaaagaggatgatcagtctggggtaagaaggcagagtgttcttttctttcttccattttggagacccttgttaaccaccaccaaatacacagacacgtactcgctcacgtcgaccatccttccgaggtctatcccttcttattgttctttcttgtgcgtgcgaaaggtaggtaaagttcagttggcgcacatccaactcaatctttgtagtttgtcacccgagacttagactcagctcaccaccaccgcttagggctacagagaagctaactcattctctgtttggtcactggatcaatttttcctctctttctcgtttgttcagctttaatagcacggcaagcgctccatcgatcatagtaacctccatcttggtcaatcgtccatattgtgaatagtcctttcaacaacggcttctagaacatcttctcttccatattcaacaatggatcccacatcccctacctacaccgacgagaaaggcctggctctcaaagcctcccctctcggtcctccacttgaccctctcccttctgttccaactgaggacgctaccaacgttgagaagggcaaggcgcccagcacattcacctcttccaccggcggtcgtcggatgaagctctctaacatcgtcattgccccggccatcatcgaggacgacgttgatgtgtttgagcaacgagaagacggtccagactaccgaggggtttccttttggggagccgtcgttcttttgctcaagcagcagttcggacttggtgtcctttccctcccaggaatccttaacaccatgggtatcgttgtatgtcgaactgctcatcctgtccaggcttgtctgtcaagagaagtaccgtatgctgaattgaaacactctataccccttctgccttttcccggaaaccaaaaattagcctggtctcattctgattctcttcttctacgtttggactacctacggagactacgtcatcggacaattccatgctagttagtgtctgcttgctcttctgtcttggcgattgcgcaagagcattgaatctgatacaacgtttcgtctcattcgtagaacaccgtggagtgcacaccatgggtgacgtcggatacattatgtggggtcctcttggacgagagttgatgggttggggtttctggcttttccagttagtcgtttcttttcgccttgatcacatgtctcgtcttgccatcgagatctgacactctgtttccgatcattcttctttcttaggtgcttcattgccggtgccggaatgctcacgatctccatttcattgaacgctatcaccacccatggaacctgcacggtcgttttctcttgtgagtattctctcgaccatatagtagccatcgaaaactgcttacacaacagggtctgtttcttctcctcagtggtcgccatgattgtcattgggcttggagcgtccatccgaacgttcaagcatatttcttggttgtcctggatcggaatggccgctatccttcctgctatcttcttggtcacgatgtaaggcttttatttacttccgttcctttcttgctagtgctctttggatcccgatctaacatacgcttatatcgctcatggaacaatgtctcggctgacgacagtgcttgcgctgtggctgatcgacctgccaacgcgcccgctactggaccattcgacaagggactcaaagcatttggaaacccaagtttcgtcgatggaatcatctgtgtggttaacatcgtattctcttacggaggttctcccggtttcttgcccgtcatcaccgagatgagggatccgagacaatacaccaaggccatgttccttgctcaaactatctgcgtctctctctacttcgtcatcaccatcgtgctttggtggtcttgcggacaatatattgccagcccagccctcggttctgccggagttcttatcaaaaaaattggatatggaattgccattcctggtcttcttgctggtccaatcatctttacccacatgtcagccaaattctgctttgtccgggctctccgaggaaccaggcacttgcaagacagcactcctcttcactggatcgtttggctttccttggtcgccgttatgagcggcttctcgttcatcatctcccaggttatcccgttctttgattacttgatcggacttgtgggcgctgtctttgcgaccttcttctgcattgtcgtcattggtttcatgtggttgcacgacaacggtcagaagcgcaaggagggaccgacctctctgtcctacaagcttctctacatcaactccctgctcatgatcttccttggattcgccctccttgttatgggtctctatgcgtccatcgatgctatcaaactagccttcgcgagcgggaacattggaagtccgtttgcatgcgccgacaatagtaactctgtttaatacaccttacacacattcatcctatcttcacctcacgttctccgcatatcctctattcattttctggagtttaagtcaattacttaatataaacatcaggttcattcatgaaaacatcgtcctacccatcctttgaattcgtcttttcgtttttttaaaaaaaaattaatttttccttccttcttcactttaaaatacaacaaaaacggcctcgaacagttttgagcccatgtaactatacaatgaatgattccaaccacactcaaatttttcaattggaaccggacggaccatccaagtgaggtcggaggatttataatcgaatttgaaacgtcgacttgcagaacatgtgagttagtaggaatatcgaaataaagccacaagaaaaattgtccaagggtttattttttgcttattcgcaaaaaaaaatttaattcctgctcttcctcccgcaaaagccaaggacggggaagtatgatcagcttgctcgacagtttttcacggatttcaaacggtcccgtaaaaggaagaggaggagaattgcctatacgatgcttatcaaactcccacgatcatcgattgcctatactttggtactttggatatccgtcatcaaataagtcttctgagtgttcccttgtcctcgacacacctcgtaccccctacattttctttaaaccgaattttgatgtcagccgcccccctacagcggatgtccgacagtctgtcggaacatgccgagaaggatgaacctaataaggattcctctaagaacttcctgtcccgtcgtcgtgttgcgcctaaagcagaaggagtcaacatccaaccagctgaggttgaaggtgacgagaacgacgtgtttgccgtcacagaggacgggccggactaccggggagtctcattctctggagcaatcgtgctcttgttaaagcagcaggttgggctcggtgttctttccttgccagccacgttgaatactctgggtgtggtcgtgagtaaatctgattgtctttttatcgagcgatcgtgtaggtacatttgtgaccgaataagttgtcggagagagcttcaattattcaaacaactcgctcgttccctgcatgtatcgtgctgaaaccgccttgggttctctcctatcgtcaaaccaaccagccgggcctgatcttaatcatctttttcggaatcgtggcaacctatggtgattatgtcgtaggacaattcagagtaaggttggtcacccagtttctattctcttttcatccttctccccttcttcttttcaacccaacataggctgatcgaagccgctttggtcgcagacaccccggggtccacacactgggagatatcggatacatcgttggtgggaagtggggtagagaactcatgggctggggcttttgcttacttatgtgcgcctatctttcttctcaaatttgaacctggtcttgtactttggctgatgtctttagattatcatttcttctctcttatccggcgctgcaggtgcttgttatgcggctccggtatattgaccacatccattgcgctcaacgctatcacttcccatgctacctgtactatcgcatttgccggtacgtcttgtcttaaacatgtattcagtgggcgttggctgagctggtgataggaacaattcccattctgatctctttcttggtgtaacggctgtttttctctatgttggctttcctctccagtcgtggcgatggtcattatcatgattggagcttcggccaggacgttccaacaaatatcatggatgtcatgggtggggatttcttgtatcatcccggccattctgctcgttaccatgtaagtgtagcttcgtctcaagacttataagagacctcttgtgttgagaacgggatgaatcgtccatttttatttttattctctcttcactttcttatcctgatttgctctaccccaacagtgcttgtgggatatctgatcgacctgcaaacgcgccttctattggtatctttgacaaggagctcaaagcttttgccactccctcgttcgtggaagccatggttgctctctcaaacgtcctctttgcctttggaggtgtgtccttctattgacagataattacgtgttaatctgctggctaatgcttcatggttctctgaatgactatcaggtctgcccgggttccttcctgtaattgcagagatgaaagatcctaggaagtacacaaaagccatgttgatcgttcaagccatttctatcgcgctctacatcgccatctctgtacgtccaattccgtatcttgattactgctgcaacacatgagcgctaagtgatcacttgtatggatttgttttgggaatctaccaggttgttctgtggtggtcttgtgggaaggtaagctaactgcaaattttattcctcaaacccatactgacggatctgtcttcccgctactccatatcgatggtctcttgtttcagtacatcgcttctcccgcgttgggaagtgctgggccattagtcaagaagattgcgtacggcatcgcactccctggactgcttgctggacccatcattttcgctcgtgagtgccattctctcgaggcttagaaaatccaagacatgtgactgatatggcaatctcattcttctcggtgggcagacgttgcttctaaattctgtttcgtccgactgcttcgaggaactcgccaccttcaggaaagcacaactactcattgggtcgtcagtttttattttctttttctccttcttcttcttcgcatcaagctgctgtcaatttcttagttcggatatgagtagctcacttcggccttgaaacctaacaacgattatcaactttgtatcatcagacctggctgagtttggtcgtcgttatcactgggttctctttcaccatctcccaagtcatgttcgtccatttgattgtttctctctctctcccctcgtgaggcaggagtaatctgacctccggattgattgacgatgtcctcgacttgttttttctagaccgttcttcaactacctaattggaattgtaggagctgtcctggtcagtctgttctgtctatcgatcacgggcgtgatgtggatccatgacaacgaccacaaaaggaaggccgggccaacgacgctcagctataaggtaaatcccttctcaaaacgaaaacgtgaaataagtgattcatgcaaaacgatatcagcgtactaaatatgtttctgccacagttgctttacgccaacgctgtctttttgtttgtcataggaatggcaattctcggaatgggtctctatgtatggctctatgtgttagcttttcagatatatcctcatgtacttacgctcttcctatccttggtttctccacacccaccttcttccacaggcatccattgatggaatcaagaacgcgtttgcggctggagaaattggcaggccgttctcttgcgctgacaacagctagacggttgtggtacatcatcacgcgaattacccaaaagaaccacgcccggttcacccttttcttccttcccctcatttcatacaaacccaagagtgaatgaacgcattgtattctagctatgaacatgtagtctcttttgaaacactgctttccaagactggttataaatcaaacgttagagagccacactggttacaggttactctgggatagtaaccactgacgagacgtgcctcaggaaatttagacaactcgttttgactcttgatcattcaaatcctcgaccgactcccttcaaacgtctctctctctccgattgaccgtcccgcttgtcgcccacacttctttctttacttaatagcttatccgggacgcaatacaactagatactgtttgtgattcttcaaaaatggcacccacagcctccgtcagcatgccctcttccgaacaaccctcaaaaaggtcaaagcagaccactcggtaccacgagcgagcgaacgccaatgcctccacctctgctcccttagctcttccttctgacttgcctcagcctccgacagatgactctccttcatttggggatctgctgaatgctaagcctgctcttgctccattatcctcgtccaacaacgcaaccgtcggatcagaaaagacgacttcgctctctcttgctaggcttcttacacaggcccttcattcgtccgattcgccgcttctggagaaatgtcttggttactcggatcatgctttggtcagcagcacggtgaagaaacttcagcctgaactttctgtcgtacttttggaaaggctcggggagcgaatttcattgggtggtggtggtcgaggcggaggagctagtgcaaatcgggtgagaggtgctggcgtttggttcagatgcgttatgagggaaaagattggatacctagtaaccgtaagtctgaacttttgtttcccgatcactacctatatatgttctctggtactgcgaagcatgacgcgagtatcgtgatgcacgaggtcttgtacgaagaattagtttcaacagcgaaataaatactgacggcttcacttggctgcaatcccttctctcggctctaggtccccaacttgcttgtcaaacttgagcctattcatcgagttcttaacgaacgaatcgcccttaacgcaccccttctgtctctctctggtcgattggagttggcactcgctcagattgaggctcgtcaacagcagcaggcatcccaggcggcccgagctgctggcaagagcagcaatggaggaacttatattgagggagaaagcagcgactcttcatcatctgatgaagagagcggaagtgaggaggagggtgaggatgttggagagatggaggatgttggattcggtattggctcggacgaggatgaggacgatagtgaggatgaggacgatgaggacgacgaagatgcagaagatgacgaagacaagtgcgtatatcgctcctttattcttttcatattcacattcactctttcaacttcatctatttggatgagagcgattggtataccgaggactgacgctacgtttgtccatacagtgagtccatcgaagactctgatgctgaggtcgtgcgcaatgcgaccttggtggatgatgaagcttccgaggagggtagcgaggccggggacgaagacgatgatctcagcgagtgattctagggttttgtttgggattctcatgattcttgttctatcttatatatctctttctacttggcctggagaggccttgttattcatgagcgaattcattacttttgatttctgactgaattttttggtagggacatctcttgaggatccagtcttcctgtgagtaacttgttagtcgatcgccacacacagaatttagtcacgaaaaaagtgaattgcaatcaggctgtcaaccccagcggccatgctacttcatagacgatctttatcttcggtaatagactatccttctagaatctcttcacgaaagtctcagatgatgacttagctttagcattcaggtgtgcgacctataaattttatgtcacaacatcctagtcgacgaacaatatatcaacaaataaaatggaaatcaaaagctcggctgaaaccctcttcgcagtgccaattctattcaagcttccaaaccccgtcagtctctttaaggagtatagttcggcgctcgtccaaagaaactcggccagcattgaggatgaccgttgttaataggctggtcgtttcggagaatatgatcggtaccatcgtgagtgacattgacgggttcttgctaggtttggatacaaaataaggagcttacgtgtttttgattgtcggtagacccttaccatcatagtctgccgccttagcatttccagcattaacctctctggcagcatcgataaacttctctagtgagacataaccataaccctttgacccatcgaagtagccgttctcatctctaagttttattcgtggcgtacaagatagataacgtcagcgggagctattcgacaagcttgatcagaatgaataagaactcactttgagtatttcatatagaaggggttgtactgcagacgaatatacagcgaaatcgtgagtacacttcaaatgtaacgggaaaagttaatctacacttacatcgatctgtgacaacaagcgcgaagacagatacaatcagcatcagaagttaagatgacaagaccaggaggtaaaaagcatttaccttgcctacactctcgtccacaacagagtatcctcgatgagcttgatcaaccttgacctctccctgtattggtcgaagagacagcgatgacaccaatcagtgaccagagaaggcttattcatttgtttcctttcatggtcttcaagacgtaccttggatgccatgtaatggaagttttgttctgagtgtacaccggccttcatcggagcagcccatctgtattgtcgagatcaggtgttgtaataaaaacgggcgcatcagtcaatgcgcaagctgctgcttgagagggaaggtgcgcagaaaagggttgaatactgacgaagcagtgtacaccccgacacctcgagttgactcatctccaattttctcccattcgacgagaagagtgatagtgtcttctgttcgagcgtcacatcccaaccctgtggcgatgcccttagatccagaggccgtgactctgaccggtttgaagataccctcaaccatccaagcgtgcacatcaatatggtgagagttgagatagtaagaaatgtcagaatcaatacctgcccaagacttgaaagtctcgagctgagatttaggctgtgacatgctatagaatgagtgttcagatatgagagcgcaaacgtcaggctcaggacgttcttcaatcggactgagcttgcatcggtatagaacgtactaggaggagaaatagttgaagtttccaagggcagcagctctggatcgagcatcactataggcaggatcaaatcttttgtggtgttctaccatacaaaccactccattcttcgcagcaagttcaacaagttcctggtgatgctgtgaagaatcaaatgtggaggagagatgttagagtcacaaggtagatcaaactgtcgcatgtggccaaagtggcctacctctagcttctgggttgcaggcttggtaaccatgacgtggtgcccgagctccatcgctagtttcgcaatctttggacatgaaggtcagtatgatgagcagttcaattgcgatgacgggacgaatagcttacaggaaagtgtgtggagtctggagtaaaaatgatgacagcggaggctttgggtagagcattgagagcctcaatatctatttcaagtaattgttagaaatcatagtctagttgtgggatttcttgatgctaaattagactcacaagcttcaggatctcgagtttgctcatcgggatatcctttaaaggtcaagtcaaggccacggtagacatccccaatgttcttttgaaagtgctttcggatatctggaaacttgcttccggtggtgccaaccattgacaatctgtattgtaccagagagatatcggtcaagccttcatgacaaaaagacgataatggtttcggcgacagcagttacttactctgaaaccttccctctacgccgaagatcgaacatggtaagagcgacaaccccgatctggtcgatgacatgtggatataaattgtcagtagcaaagaagatgatgaatcagatctgagatgcggcccaccttcttgtctgaagtggattgacctccaccaacgaagcctgtagtgtactctccagtgccgaccatcaggactgggagtgtttcgagagaggcgtagtccaaggaagtcatcgtgagagttttgaggagtacagtttgagcgcgagcaagacagtgtgtgaaattgaatggacgcttatgatagaagagaagaatccaagaaaaaacatatcttgctgtatcggttcgttggtttcttaagaatgcttcgagtagagccggtccggccaaagattgaacagatagatccgtccacggaccggagccgggccggacggccgtgttgttacaatagatgtttggttacagtatccacagcgttgtatgattagggttgattgctcgtgtactgggcctccacaaatgtggtcaacacatgtgagatggaatgaattgttccaaacagccaatcattcttattgcgactctgccctctgatctcatcttcaagctccgttctttttcttttgtttttactccgagtctgtcaataacacaacatgcgctccctctccaccgtacaggcttctctccgccgagcaatggtctcatccctgcatcacgtacttcggcccgccgttgcctcatttccctttcgacgactcgctactattcctcctcagcccttctcaactctcgccagcacaaactcgtcatgggaagtgtccaccacatcagaaccacacacatcatcgaaatattcggagaatgaagtttccgatcagatgttcttcaatgtcggacgtcctgtcggaggagaacgcggtgattttgttaggtccgtttcttcaatagcaagataacctggccttgatcgaagctcatcccactgctttcatctatacttcgccattcagagttgttgaggttggacctcgagatggattacagaacgaaaaagtcatatcgaaggatgaccgcgctaaacttatcaaaggccttctagtggctggattgaaaacaatcgaagcaggaagctttgtgcatcactcatgggtgcctcaggtttgttcatcttctatttgtagtttgattccagcagtgtattcattttactacatccatcctctacaatccaaactgacatatcgattcattgcgccagatggacggtacagatacagtattgaccaaaatcgggaatatgaaccctgatgtccatctaccggtctatgttccgaacatgagaggattcggccgacttttaaaggccatccaatgggatgagtacaagcgaaacgccaatatagaaggagagattctttgtgacgagatcacagtaaccgttaactgcactgaggtctgttcaccactccacctactcatgaatctcgtacacctcaagacttacctctgggatttccttatttgtaaatgacggggctttcgttatgcttggtcatcctggacgtggttcggttagacattctcctttgcgcatgaggctcttaacattcgagagcatatcgaatcccttcgagaagtgatctccttggcaatctcttacggctttcgggtgcgcgctcatctagctgtggcgatcgaatgccccttcgagggaccggtaccagcttcgcgagtagctgacttggctcaagagatggtcgagatgggatgctacgaggttgctttggcagacacgaccggccgaggagatccagttactgtgaggaatctgattgagacggtagctgctcggattggcgtggatagaatctctgggcatgtgagtcaacctgatttccattttcgctgttcacttgctggctgcatacttagttactcgaaatatgtctatatacttttagtttcacgacacattcggcttaggtctctcaaacgtcctcacggccttgtctgtaagtgatcactgacagtctgagaccatattctcaagtatttgttgaaccaaagacatctctcttggcttttgtttgagctgtatgcagctcggtgtccggtcctttgactcggctgtgggcggtcttggaagttgcccttactctccaggtgcggccggtaacattgcgaccgaagatatcgtatatacccttcataatctgggctatcacactggagtaaatattgtcgagctcgccaaggtcggtggttgggtctctgaaaaaattccgcgagagaacgcatctcgcgcagggaaggcgatcctctctcggatcgcgtgggaggaagatgctgacgtgaaacggctacgagctgagcatttcagcttctggcagagctgggtgatcaaaaaaaggttaggcttgttggcaatcctttttggattagcaacagcagcaggggcctggaaatggcaaaagatacaagcacatccagcaatggtcgaggccggcttgcgatctagaatggcccaggatctaataaccgatgccttgtccgagatggaggacacggaacgaccgccacggacagagaacagaccctcaggctacaataaataaaatatgacccgtctgtatttaggtgacggccttagttacaattatcaaaatgttaaactagaaagtattctatgtataattaatttcatcctcctttctctccttctgcgtagctgatgatgggacctgccgttttgtgtcagcatgaaggcacatttcgtacaatgagctgtgttgaacgaggaagacaaaattcaagcaatatacatagtagggtgtagagagaaaaagccgactttcgactgaaactagctgtttggccaagactaacagcacaaatgcttctgaacatatctcgatcatgcgtaactggggggctcatcagccgacagttcatccgacacaagctctttgcctagatcgtcaaacgatcgacatcgacacgaacacaaatcccgatcagtcaatcagtagaactgccgaagaatgaaactgaagactgctgtgacacgtgactatagaagcggtgtcatctgacttgcgaatttgcttgtacaaaagtcaggttggctgattcgctcgcgttgtcgacaagaattaggaaacctcatttccagcctttctttttttcccctcagaacacctcacatcttctcacaaaaaagtaagatattttcacttggagttggtggatttggcgactgaatggagagacagaagcttgatactgataagacattcttttgtcatctatctcgaacagcttcaaaatgggaaaggataagcttcacgttaacgtcgtcgtcatcggacatgtggattctggaaagtccaccaccaccggacacatgatctacaagtgcggaggtatcgacaagcgaactatcgagaagttcgagaaggaggccgccgagcttggaaagggatccttcaagtacgcttgggttcttgacaagcttaaggctgagcgagagcgaggtatcaccattgatatcgctctttggaagttcgagacccccaagtagtgagtagtgttcgcgttttgtaccgagtgtgcttcctcgaggagggcggaggagaaggacgttgtgtctgactgcctttttcctcctttttctttgcctgttctgacttgtctgttcctcctcggccctgttgattgtccttgcggtcgccttccagcatgatcaccgtcattgatgctcccggtcaccgagatttcatcaagaacatgatcactggaacttcccaggccgattgcgccattctcatcatcgccggaggaaccggagagttcgaggctggtatctctaaggacggacagacccgagagcacgctttgcttgccttcaccctcggtgtccgacagctcattgtcgccgtcaacaagatggacaccaccaagtactctgaggctcgattcgaggagatcatcaaggagacttctggattcatcaagaaggtcggatacaaccccaagaccgtcgccttcgtccccatctctggatggcacggagacaacatgattgaggagtccaccaacatgccctggtacaagggatggcagaaggagaccaagtccggtgtttccaagtgagtgtcgttctctgtctttgtcttgctggtgcttgggtgggcctgtgctgttgggatatgtcgacggaagctgactgtgacgttcctattttttgccacaggggaaagaccctcctcgaggccatcgacgccatcgagccccctgtccgaccctccgacaagcccctccgacttcccctccaggatgtctacaagatcggaggtatcggaacggtgcccgtcggtcgagtcgagaccggagtcatcaaggccggtatggtcgtcaacttcgctccttccaacgtgaccactgaggtcaagtccgttgagatgcaccacgagcagcttgttgagggtctccccggagacaacgtcggtttcaacgtcaagaacgtgtccgtcaaggacatccgacgaggaaacgtctgctccgactccaagaacgaccctgccaaggaggccgcttctttcaacgcccaggtcattgtcctcaaccaccctggacagatcggagctggatactctcccgttcttgattgccacactgcccacattgcctgcaagttcgatacccttgtcgagaagatcgaccgacgaactggtaaggtcatggaggcctcccccaagttcgtcaagtccggagatgccgctattgtcaagcttgtcccctccaagccgatgtgtgttgagtcctacaacgagtaccctccccttggacgattcgccgtccgagacatgaggcagaccgttgccgtcggtgtcatcaagtctgttgagaagaccgatggaaagtccggtaaggtcaccaaggccgccgagaaggccgtcaagaagaagtaaacgtccccgttggcttcttttcgataccacctcactacctctatcctatcatgttatgatatgtacttccgaatattacacttttctagccctttgacgtatggtgttcacatgagacatgttcagcggctaaactaactacaacatcaagcaattaatttgaataagcatcacaattaaggccacaaagaactggcaacctctgattgaaaccacgagtcgtttccaggttgctattcaagaacaagtctcaggaagtgaaatctaaacaaactagctctccatagtagataaaacactttcgagtgttatgaggacaaactgcgaattgttttaaagagtatcaacttaagtattctgttggtaatgaaaaagtgaatcaagagagggagatgacagaagaagaaagaaggtgaggcaaaaacgaacataggtagtcaaaatacagtcaacattctggcccccttacgttgt

SEQ ID NO: 1679 - DNA, 6749 bp, Xanthophyllomyces dendrorhous
ccatcgtggctgtttctcttagtgtcgtcttagcctttctgttctcatctttcttctcatctgagcacgttgtgttctctcacatatatctgtgctcgatactttcttttctattctattctctctctcttttttttcctctcctcagtattcacatacaccgttttttggctaagagaacaagggtttttctcatctgtagaacaaatcgtgaatctccttacagaatacacggtcttggaattggatgctaaatgcgagggcggaagggtccagctaccgtttgttgtgacttggttggttttagagttttgcagatgagaatgtatgttgaaggctcaggctctcgaagatctaggaagatgccaaagtcataggcataggtgtactggtagataggacgaagacacttcgaacgaagatgacagaattcaaacttgagagaaaagataaaagagaaaagagggaaaaaactatggggaaagggaaagcgacgaagtacttgtatctccccgtcgctcggcatgtatgcaagccagaagggatgcaagacggaagggatgcaagacggaaaggatgcatgcaggtatcgaagtgtgaaaactacagagggtagcaaatacgtattgttgagatggtatgcaaatgcatacaagcatatactactcggtctgatccctaacactaaatatcccagttctgctataaacgctgctagacgcgcggccgtccaacaacacgctttcgggctacaaagtggaatgcgtcgttctttgccgcaatctccattctctctattctgtccgttctccccacctagagagggagatactattgaaaatctgatcgattgttatgtcctcgcatgcatttgcatactatctgaactatacgtgtttcttacatctcacctttcttacttgtgtccgtcctttccgttctgcatcacttcaggccggtgtgcatgccgagggacaaagatatacaaatagatcactgctattttcttctccgtgattctttcctttttttcccttctcctccaagtgaagaacttatcgtcttcgtctgaagcgcattagccctatctctcaacacatgtctgtccatgactttggattggatttaaatcttcgagagcttgagcttcggttcaccactacatctgaaaatcatactatttatcaagtcgtaacagaaacaactgccgagcctttagccttctcatctcggcattcgtgttttgcctcgtgttcttcgacatatatatctctccgcccaacgctttctttccttttctctttctcttttctcagctttctccaagaactatttggtcactgaggttagtccctatctgtttccgtactctgcctatttcctcatcggtcaccgatagcttacttactttattgtagaaagaaaccatgttatttggcctagatttttgttctatttgatgttagcacgcccacaaatattctgttccctcaattaaaaatggctaccaacgtacaagatcaccttcgggatctctcaagactttggtctaaagtacagctaggtatatccctcattatattttattcactcattgtcaaaaggttcacacatctctatgtatgacgaggtttaaagagctgggtgaaagtgacacatcgaatagcttcaaaatatttccccccgagcaaaccatgtatgtgatagatattgcaagttggtttatcgacccacacaacattgttaaattgtgttttgaactcattcttcaatttgttgatttaacgcgtacatcggctgataccgttcttctccttgtttctttcttgtactgttccattccttttaggtctccttgattatcagccctttcttttagcgtagaacgaaatattcatattcagagaaggaacggaaatttcttcatcgaaactatcaacaacagaaccacctttggaaacaaatatcatgtacattcttattagcctcaaactattgtactcactgacgtatgacacatgaaaattttccgtgtcatctttgttgttaccttctggaatatttagacaaaatctcaagatcgtgaaaacgaagaactaatttgtttggaatgattacgtgcaccgcctgaaaaaaagagcttgatttattacgctgcccattgattgcgttataacagtgtttgcctcccaggttccttcatctttcaaatgtaacagccctttagatgaattcagaaaagtccatgggcataaaagtgcagatatataatcatgaggcagcaacagtagctttcaacaactttgcctttttatcctttgtaattcaaagcacacttccattacacactgataactcaggctgtatccataaggtcttggttgtgaagaatggaatgaaaaagagcgcgaatagcaggtgtgctcgtatgatgacattgatattcttcccttgtaacttgccactctctgcaataaacggttttattttgggccgattttgttaatcttgatttccggtcgccacgattgattttttattcgatatcaggaccttggcacatgaaccctgatttatatatactacgcatgaaagcctggagtttttttgccaagtttttccatgacgaaaacttttagtatatctataccactacgacagattcattgtgtttgttgctaacgagggtataggaatagacaaggtacatgatgtagtttgacatgaataaaatttttgtagacgttgcactatagatatattagagaaacagtttcttcggtttgaattgtatgctcaaccagattttatgttgaagatgaatctgatttaaaagttccattcgtatcttaaaaagcagaggccgactctcctcaaagacgtgtgagggttccctaaattttagatatactatgagcgtttctttcatggcaatttaagaattttgtgctgatcagatattgcgtttttgcattgagacaaaattaccttcatttttgagcacaatgaatttgtgaaactacagggctcgcttacgtctgtacctccgacttgataaggtatttaacatcaaacatgtaaacctcgtcatcatgtcgagctcgataatgctataaacaactggagttcaaaacaacgttgactcggaacatgctctcaagctataagtccactgatgagaatatcatttcaaagtgtgaattcagttgcattctaaacatgagagccagattgaaagcactcatgataccattgatgcatttctgatgagtttgatattttaaagacaatgatatacaaaactgatcacaattcattccaaatctatttacaaaacagtcatttctattctatactccattttttgagcagaaaccacattgtgcatgctaaattcgataatggcaaaacgttacctcagtattcatacagaatcaaaggaagacatacagaatcgtcaagcacttctcatatcgggattgcttgaacttcagatggaacctgacgtagaagctatagtttctgcttcccatgttacagacgaagggaaacaatatctaaaatttgatagagatagtgccaatgaagaaaacttatggaaatagatcggaaaaattgactaaggtttgaaggatgttgcagttttgtctgatgacgagagtgttacgctagaagaaaagcaatctttcatgaaatttgggtagaaaaaccaaagtaagaacacatgatcagtaaaatgacatttcttatccatcgcgatatacaaataaaacatttttgagcgattgttttatgccgagtactcaatggtctagtgcaacataacttcactaagatgaggcccgatacgacatgattccttcaacgggttcatcgaaaagaaacaaagtcttagttttgacatggaatgaagaatgaacaaaccgaatcgaagattcacaaatcgatgtacacattgtgttcattaaattgattcaaatggaagatagaaatttcttccagtacactgctttgagattgaaaattgctgagatacatgagagagatttttttcttcgagacgtttgggaaaagttatgtatgttgaagttattcatatttatacggtgagtagagttcgtactgcaatgatgtgatcatcgttctatagtcgaccaaacaaagatcactttggcaaaaagcttatcgaaaaaaagcagggatagtggtgggcacttagtctaagaactgccattcagaactgcagatcaagctgttttcgactcaaataacggatgaagctgatttgtacttattcttggttagataagtatctactataaatattttataattcttatcttctcaaatgttccagagagtacaatatgaaaatatcatgacatatgccaatttctgcacacagagtgaatctatagtgactctatcaatttgaatataccagatattctgaaaaagtactcatgaacttcacctacattgaaatggagtgattgaaagaatgggcaaacaaatatgttattactcctatcgatacgttctaaaggtattcgaaatgacggtttgttgtgctcgttttgaacaagacaaaagctatccttgattgtttgtgaagtgcttaatgatgtgatttttctctctgcagctcattagtgccatgtacttaaaatatggtcagcccagcaaatttgacgatcgttacgttttatcttttgcataacgttttttggatttatatctgcacgtcaattatcgaacccatttttctgaagagtacagtgaacacatcaacatctatcaaatcaaagtttcctgtattcaagatcttatgaatctagctcaatctcaagcaatatgtcatgacacgaatttgacatttcactatgctgggacctgaaataacctttttcttctatcaagttttgatctgcatctggagaagttttgcagtagtattgattcactagatgatgtacgtaaacatgcaaaatgtttatctcacttcaacttaagcttcatcaattcttatcacagaagatctcgtgactaaaaacgtcaaggtcaggtatgaatgaatgccaaaaacgaagaccttctcagcgctgtgaaaccaatttgcaaagatgcaaagtttactcaactcatggctttggtcgagacttgttgatgatgacttcgacatacttctttgatttcgatctattttcttaacattccttcgaaccttgaataatttacgtcataatttgtaatgtaacaaagtataattcttgttcagataacaattatttgatacgataaagctggttttttaaccttttcgctactaaagtcattttctaggcgttagcttgaagtccatcagcaatgccatggaagtttatatctgacaggacgaacaaatatttttatccatcgtagctcaaaccaaaaaaaagatgacttgtgaaaataagagacgatttagtatcatcatcaaacatcatgaagtgagggtatgtggaatagaattgaatcagaacaaatcaatcaacgactggtcacaagcattattttgcaggaacacaaacgtgacacacgcaatagattcggaattctgagctttggaggaaggctgcaatcaataatttactcatatcagactatcatgatattatgcgagaaggtgagaaagtcaacgaaagatgattcaccgaattttaggtcaagctatcgtccagatttttactttacgcaataatgtatctattgctctaccgaacaattgtggctgtgtttccaagcaactagacatgcagtatgtacaagtaggatactttgttcgatattattcacattttctgaaacagctcaactatcaatgttattgacgcttaaatgatgtcatcaccgaaatcaagccagacaggcatctgctcttcatcgaatatctaattggctcaaaataacgtggggaaaccttcagattaggtgatggtacatctcgagactggtgcctaatgtatattcgccccaagatattgatgcaatgatgaattatcaatggaacatgaatttcagctcagatgatcgtggaaattttgttaaagtaagtataatcaccatcagatgtttgggcgatgaacctgagatttcgcaatcataaccagggctcccgacttgcgtctgaaagtcaatgttaatgactcgatttacgatatcaacgcatgaagctgaggtcttttcgttatttgccagaaagaaccgcgagatacgcatcggctcgtcacaaacaattatcaatatgattaaaattatgattacaagattgtgatggatgaaacgagcatactgacaggcagactatgctttagcaaggaggttgacacgatactggcagttttgatagatgatgtctttgaatatctcatcccttggtgacgaagtaaggtaagtaatgttacaacgcaaaagtacccgttgacttgaatgtcaagactaaacttgatagatatttattgatatctgtatattgaaattcagataaaaccgtatggccaataaccaaaatctgaagctctttacaaatgacaaaacgcgggacacacaaaggtgtcatccaattgattacgaagaaatgaagacatgttgaacagtagagacatgatctatatattattgtgataaaagaagagtgttgagttgattttaaaaatatacacgatttgttctacagatgagaaaaacccttgttctcttagccaaaaaac

SEQ ID NO: 1680 - DNA, 11732 bp, Xanthophyllomyces dendrorhous
cccccttcccctccccttactatttctatgatatgatttctccgaacgaatacttgcaaactattttacggcatttctttgtttctctgatacgtttcacatgtctgcaccacttccatgatttcataagagtacaaagacgattaatgaaaagactagaaccagagtggtaagacttcaacgtgaccatccgtgtaaccatgaagagagtcaatacacctcgccgaatgtataatactgctttcatcaaagaacatgcaaaccaccaactctgataatctcttcaagtctgatgctcagatggctaaagaggctggtcgagaggaaaaactcgtccggacacaagccctgggagatcctattaagctcacgagcaaacctcttgggattcttatcaaaggtgatgaggtctgggcggctgagagtggattcatcttacggcgattaagcctaatagtctgtcttttccggttcggtatggattaatcatgctgtggacatgctgtacttatcattgcctccaaatgaatctttcattgtcgtttgatcaaagaccggaaagtctagtattgtttataaaggacatactgcaccggtaacctgtcttgcattatacgaccttccttcctcttcggatgcactcattcgacgatttctcctctccggttcgtgggacaagactattaaagtctgggatcgagatgtatgacatgtacctatttctaccttcaccggctctgcgtctcatttgtatctgctttttcaacgttttgtgtctgtccatccgccttgtcagaccgggatatgcctctctaccacttcggttcacacagactttgtgaaatgcttgctgccccttcctagtctttctacgcctcttcttctttccggttcatccgacaagtccatacgggttctttcccttgcttccctcgcctcctctccttcaagttctctcgagcaaatgcagtctttgcaagaacacaccagacctatcaagcgacttgtttcggttcctcaagtggagagggatcatgtagaggcttattctgcagactcgatgggaagagtcatcctctggagtttaaagataaatgatcatggaggactggatgtgaaggagaagcacaggtggagtgcacacgagacgagcgtgacagatctttgggtggaagaagatggtgtttggacaggtgcgctggtttcttatgcatttactttcaaacaggccgaacatctgggctagattagccagttttttctaatcttactcctgtctttgatcgttactttcggatagcctccatggatactttcattcattatcacccgttctcttcttcatcctcctccctaccgatcaagatcgtctttccacagccatcgatacatcctcaacctgcccctcacgcgctcctgccgcttttccatctgacgccacccattctattgaccggctcagccgacgagttcatccgagtgtgggacctgtccgcaggtgaagcgtccgggcaagcccgtctggtacatacgattgaaggccattgtgccgacgtgacaggactggccagatgggtgaaggatcgagaggagtgggttgttagctgggctttggacggaacggtcaggagatggagattaaagagtacgtccgttcgggtttcttttgcttttgtctctgggtcactcgagttctccgattcacaatgtcccccttctcttcttttttgctcttctctcttctctctatctggccaactttgccatgactctgaccatggtcgtaatcagatcttcttaacccaccgccgccagcgcagccagatgaaggagaaaaggatggtcttactggtggaatgactgaagaagaagctcgggagttggccgaactgatgagtgacgaagaatgaatgtatgcaaagacaaacgagactatcgagatgcgcgaagaagcagagcgaatagttgatgataatgcatacgatagattaaacgcgtaagattggtataacaattgagcagcttcgggaggcacattggattacacacgccccggttgtgcgtttcatttctgaaaaaagagagaacgatggggtatcaagagaaaataggagaacgagagagaggtgaaaggtacagcagatcgtgtattcaagaagtgggacccagatggtttaggacatagattctcatatttgtccaggagggggaacttggctgtagaagtatagaagcaaactgacatgcccctttctcattgttatgatcatataggtttgcatcaagggaggagctgaagatagttcgaaggacagatgccggtctagcggagaaggaaagaaagaggtgcggatagaaacagagtaaatgactgcgctacttcatcgacttcaacttgacgatatttcttttatcaaaagaagaagagacttacagtaccatcatgcttgcgggcttgccaccatttgcctgaacgacacgtacaggaaggaaatagtttagaggcaaaagagtgatatcagacacgactgaagatgtgaatgaatagtcaaaatctaacgaaccggtattatctgaaatctcaagaatctcgcccttgagaaaggacatctcctgaggatcatcaggcgaagcttgatctgtgtgagagaggtaaaccggtcacacgttagcgctgtacagaaacacggaaaatgtcgcttgtgatcttaactcacaggcataaagcgccttggctcgcttaggaggcataaacgcgtcacccctttcgagatcggttgattcttgcataaggggtgtactcgagctaccgaccaaaacatcctgactttgatcgccaacatgagactctccacctgggtagccactggtatttgtgctgcttctcaggttactattccgaatctggttgatgtgtgctgtcgagctcgattgattgttagcgtacgcgttgggcatcattccatggttgccaagattggagccagaggattgaggtaccatgagagattttgaaccggacggatgaacgagctggggtccatgaacgacagcgttcgagttcaggaggtggtttagaaccgttggcttctctgatgtcaagtacaagagccaaaagatctgttcgttgattgttttattgtcggccaaaaacaagagtggacgctcaagtcaacagtgataggtaagaagcgtgagtgaatgtatggactaacatcgacgatagcaagaataagccagcctgcaccggctgcttgttgaggatgcaaagaaccaaaaatgttgtttgcctgtccaggatttatatagtttaaaagtatattgaccagaaggaggacagaatcgaaaatcgccaatttatgagatatgttcgacgagaagtagttagccggtgaggagaagatgaagatcacgagaagatgctttgagcaaacagagagactgaccccgaagacggcaaacaccagagcgacagcaccaaaggtacatagctgaagctggtacaatggcaaagagtctgtggcgatgccaatgaacagaccaaccatgacgcccagctggcagaagatcccaaaccaggacgtctcgaaaagagagccggtgaccgagctaggcctttgggcctcaccgacggccataccaatgaaggcaacgaaccagcctatcacagcaagagcccaagtgataaggaggatgtaatgagtaagaaatggctctgcaaatggagaaaggaagaagataaagaaagccatatattagttagaaaccaaggcgatagctgtcgtcggagtagtgattgatccgaaagcactcggaacatatgtgattgaaatacgaacgaaaactaaagcttgttcgtccgggcatgttgcttgtgagaggagcggtagacgagtagatcgatagagtaaggaaagcagctggacgaaggatgaaggttgaaggcaacaacaaaacgaacgagctctaagaagaacgagatcaaccgtctttgccagagtggaggattcagtcaacaagggaaaaaaaaggggggaagactacaaaactattctattgaaacaggaaaacaacagaccaatttcctaatagatcgagagattacaatatggactatgaaatgattacgagtttccagaagattcaatagacaattatttaaccctaacgagaccactagagcatcattccttcaccttcacctccagattatcattggtaaacccgtacgattttgaagaatgtccaactcccggtacgaatacgttcgttcgtatgagcaaccagacaacttgcttcccaacacgtttcttctgcttcgtatagatggtcacgcttttcacaagtctgtcctgtttcccttctgcttgactctttctagtgttgcttacgcgcccggttaggttttctgaccagcatcgtttcacaaagccaaatgatctccgagcactcgagttgatggatagggcagcgaaggctattatgaacgagtatccagatgtcgttcttggttttggagagagtgatgagtataggtccgtctctttttgatccagagtaaatatcattcggaaaagctgctcattcctagctttgtcttgacaacgacaatgggataaaacacatggcaactagctttctgatccgtcgagccgccacgatgtactccagaagggagtccaagattgtctctttgctcgtcagcctgttcacctcggcctatacatttcactggcctgaatactttccgccaaccgatcctgcattgctcgcctctggccaggcggatcccaacaagttactgtacccaccgacgtttgacggtaggattgtttgttatccttcgcccaaggaggtcagagattactttagctggcggcaggtcgacagtaagtctcctttcctctcgttatcgtctctctcttcttctttttgttcccatcatgtccttcgtcgcccttatatctgttccattcgaccctgtccgttcagcccatatcaacaatctctacaatacgacattttgggcgctcattcaactttcagatcctcctctcacacccacgcaagcacacaaggccctgcaaggctcattctcgaaagacaagaacgagattttgttctctcggttcggaatcaattattcaaaactcgatgaacggtatcggaaagggagtatcttgatcagagaggtcagtctaagtttgattcagatttttccatcatctctttcctaatttcatagaaagccggtcgttctctgaaaactgctttccgaatcttttgtatgaacaggagtcaaaacctgaacaagcactgccgatacctcctacacggtccggccctctatctgatctcccttctgttgacaatctctctctccagtcttcctctatgcctgtggcttccgagtcggaatctgctaccgtctccacttctaccactaccaagacatcctcgctcaacttgacagagccgagaacccagggcgcgaggaaaccgaagaaagcacaacgcgcgactgagccggatggaacgagaggtcctgtggtggtacttcacgtagacctcatcaaggatgagttctggctgaccaggccttggttgttggcttgatttgagagtctcagctttcttttaaacatggctagaaagattcatgatgcctggtaaattcagttttgccttgtatcagtcggaagatgatgataatgatgatagaaaagacataagattctagataaaaaaagaggatagatcatcggatgaatgtggaaaccagacatgaaggaacacaatgtattgaaaaaaaggggataaagatggcaagaggagaaaaatgagtccaagaaatccgaatgatctcgaatttcagctctaaaatgtgaactgaaagaaagacacgatatcggcgagatcttctgattgactagttagaaaaaaaacagaagaaaaaacatggccatctgtagaagcaaaggctggaagcagaagagaacgaaaagagaacccaagaggtggatgaagagacgagaggtaatggtttataaggcgcctgttctaaccctgatatgtcctcgaagacctctggtcggcgaccaaacgagcccactcgagggcgagtcggtagacataaatctccatgtcgaccttccggccgttcgtcatcttccactttcgaccttccattgcgatctttctaagttctgaatcgtcatgagtaccagtagcaatcggcgtggtcccgttcgcgagcttcttgctcgtcgaagcagatggtccggagaagtaggcgtggatgttgtagatctcttggtagtcggacgaaacaggtatgtagtgcaaccagggctggatccagtccgagaagaactctcggtagactgtggtcttcatcaccgcgctcttactcatcaacaacgcaaacaacctggcagagtagcccataccgtcgacgtcaatcaaatacttgtgcttccagttttcgccgagcgagacaccatcagcaaatcgatggtcctttcgaagtccatcacaaccgccagggtaagatgtgcaaccgacggctttgacaaaggcgaagtccatcatgtcctcatttaattcgtccaccggtacggtcacctcgacgtacttcttgctcgaatgcgagacgggtacgacaacagtccggttcacatcggaaccgtcagtgctcattcggacaaggctgagcaagagagggaaaaagaaagaagagagacacataagcttctataattcacgcaaatagacggagagggagaagtattggaaagaaagtagaagaagatataagcgactataagctcaccggtgtcgctgatacctcgagagatagccgggaggagaggctcctcctccagtcgtagcccctctccagaagatcttatctgttttcttctcccaagggacatccatatcatcgaaatccttgatacgcatgttgacgggatcccagccgtaggtgtaccttttggttgacgaatagtagtagtgggtcgggatgatgatatcgctgaaaccgagtcctttagcaggggagaacatggggtaaagtgaatcgataactcgccagtccgagaaaaagtgaccctgatcaaagtgggcccaggggtaatcacagaagtcgtatttgtcgtctacgctctcagagaacacaaagtcttctccggtctcttgccgggcaaccccggcggcgacaaggtagttgaaagacttctgctgtccatcgttgaggggagttcgaatggaaccaaagagtcgtctagcctgtgacgatggatggcaggttcgccggaaggcctcccacacggaaccgccgtcaccttgccaagacgggatgaattcacctccaagaacagatttaataccctctgtatgcgcgcgtgtgcgtgtgtgcatgttgcagatgtattttatatgtaaaaaagccgcaaggtgagcataattgaaacaagtgaaagatgtatggtttgaaaagagactgactggacgaatcgacggtgagattggcatactgattctgctcccaaggtacgaggactcgaccctcagccttttcgttaatcggactgattcatcatgtaaaatggcacgtataaatacgaataattctctctttaagatctattttgagcaaagaaacgtacaagtccatgtcgggaagtttctctttgatgtagcaaacgcaagggagaaaggtgcaaaggacgttagtatgaaaacgacgggatccataatgatggtattaacaaacaaggacgaatgcataagacacaccctggaatttttctagcattaatataaaaccgttcgctcgggctccggcctcggaattttcgagtccggtatcagcctcaattgccttggcttgtccatcttgaatacggacaatatccaccgagggcagggtaccgacttgttgagatcttcgcctgatttcctcaccggtgaggagccaatacggccgaaggtctgctatcatttggtcgtactcatcaatgatggtcgcgccgttggcagtagcaaactcgtaccagtcatcgaacccaagcggtgggtctcgatgatacctttgtttgtaggttttgacagcctcagccaaggtttttgactgggaggcaatcatcttgttgtacttgatctctgccttctccatcaagatcggaatagggtgtacgatcggcttgtcggcgtatggtgcatagtactgtcgcagggtctcatgagaagggaatgcctcaaggcgtcctttgtgtttgagaaaaccgccgaagacgaatatgagggcggcagcacccagaagaaagacgactggctttgctcggctcgcaaccgttttaggtttcaatgtacgcggggacatggcaagagttgtgatggggaaagtgaacttgttcttgagagtgacaaaggaaggattaaacgaggaaagacgctacaaccacttcttctactactactactactactaataaacgagacccttccaggaatcggcgttgagtggaagtgtgattgggtgcacaagcaaatatcgtccgaagggaatggatggagagtgggaaggaatgaaaaagaaagagaagggataaagagaacgatctcgggaccagcgccataggtatgccccaaatttacccatgttttggctggtgagctccaggccgacagccaaatttgcccaaacatgaccaaattagtccgaggctcaacaccaggcctccggtcggttgatgatgccgtccgtttctccttctctctgccatcctcaagcaatcagacactcacactcacacaaacacacagacttacatctcttcgaagatgtcctactttatgactcatttaccgacggcctggtgagtgttttattccttggtataatctcccttttctttccttcccactattctctctaattagtcttcatgcttaccggtgttctttctctcgcggctatacctttctaggcatgtagaccgtgagtatatctttttattcagatgaaacattgccatcagaacgactcatacttatccttccgaactcatacagaggccatactctctgaagaagacagagtagtgatccttcgattcggtacgcctctgctgacgcgttctccaaatatcattgatcttcaacgcctcacacttaccgactaacgcgatgctttccttgtatcaatatggtcaaatacaggtaacgattgggacccgacttgtatgaagatgtacgtatactgtctttcctatatacaacctggtctagcccacatagccttatatatggactcactcattatctcttctcatacctctctaatcacacagggacgaaacgttgtactctgttcaggaaaaggtgcagaacttcgctgtcatctatctggtggacatcaccaaagtaccggattttaataaggtagctgaatgcttcttctgccttttctcctctctctctctctctcttctcatctcgagacttatgctgttcttttgacttggccttcctatgtgtttttatgcgcatcaagatgtatgaatgtaagttcctttccagatagaatatagagcctttcttatcagagtgtcgctcaatagatatcctatatcctgaactatagtgtacgatccttgcacgaccatgttcttttatcggtaagtatcttatctcatttatatttgtgtatcctttcagctctcactcattcaacccttaaacaacagaaacaagcacatcatgatcgacttgagtacaggtaacaacaacaagatgtaagtcctgttatgtttcgtacgaagcttatgaatggcgcgccaggctgagatcgttcgtctttcgcatcatctaacgacattctttttcatctttgtagtaactgggccatgacggacaagcaggagatgattgacatcatcgagaccgtctacagaggtgcttccaaaggtcgtggtttggtcgtcgctcctaaaggtatgtattcctctaattcagattaggtatctctcattcagctgtacttattctttttctaataaatctttaccttcattattgataagattactccacaagatacagtcagttttcaattctcatgcctataaaacccttacaaaggtctcctaatactttgcatcttcttttgtttttgcagagtattaagtatgccgagttgaaagagtgtgacgagatcataaacggaaatagaaagagacccctcctccttagttataataatcaatgtgcctcgatggctttcaattccacggtttgacaaacatatttttcagtgtgaatgtacaatacaaacgatggcactcaacagtatgcgagtaaatcacctagaaaggctcctatgagttgactttacatgttagtcaagaactgaaagtgcattcaatcagacaacgacggcggccttgaccggcggttgccatggcaacatgggaaaatatgatacattcctcaaatcaccaccgaatttgagaaaccagcccttcccttgatgcccatccccatacctctcacacatatctcaagccatggcctcgactgatattcacctcaaaaatcaggtgtttgacctggtgtttcatcctaagcataatactttatacaccgctctgctcactggagagatcaaggtcaggaaacaccattgcttgcttctatcaaagacgatcggactcgtccgttgagctcgagagccagaaacatcacctactcatgtctatagggaagaacgattgactcacctgagccatggactgaacttataaacacaaacgtacaaaaataaggctttcaactacactttaggagagccagacgagatcacatacgagaaagcgttctccgttaggccgactcggaagagctgtcggagcttggccttggatttcgagggggatctgttatattctgtaggaaaagaaaaggcactcaagtccgtctttacccttgttgttttgacttaccttgcctacgatatacgtatcattcatctattgctttttgatgttctttgataacagtgtgatcgatacagtcacaggccaagtcgtctctaccgtcgctgaagcccatgagtaagtgtgcttatattctcatggctcaccgctcatttgatttatcttgtcattttgacaatatcttctctctcacgtagagcacctatcaatcgggtctcgtatcttcttccgtcatgtctcgtcactggggatgatgatggtgttgtgaaggtgagttctccttcctagttcccttaaaaaagagattatgtccgaaagctgaagtgagcaagagaactttctcatcatagctctgggatcccagaatcaaaccgactggaccgacagcgcagaaatcgtttactcatcactgggatgttatcactgactttttgtactttgatgacaagaaacacttgctcactacttcgtgcgccttctcctccgtacccatcaaccttctttatgtttacttacatcctctctctgtttcgtctggtctcatcttggttggatcagttcggatgcaacgctatcagtgatcgatatccgaacgtccaaagctgtgccgctttcggtatccgaaagtcaagatgatgagcttctaagttgtgtatccatcaagaagttcgtgcccccgtttcaaccgattcctccctgtttttttttttgtttttttttgttttttttttt

SEQ ID NO: 1681 - DNA, 2903 bp, Xanthophyllomyces dendrorhous
ttttttttgttttttttttttcaaatcttgaaaaaccgcgttctaagtattaactaaaactccgtttctcctcgaacagcggagcaaaagtcctcactggttcatcgatgggtattctctccgtttgggacaagaccaaaggttacagagattgtgttgataggatcccggggtgatcatttctttcattcctctttttccctcttgtttttttggtcgatttcctgacgcgcttctatctttttgttgaatagacatcccgactcgatagaaacgatagttccactatctgaagatatcgtcgccaccggttcatcagagtatgtccttatcgtggtcgaagagaaagggaaagaagggatgagacaggcaaagcccagagaagcactcaagggcttctgctttgaccatagatctgtggtgacccttgagctaaaagtataacctgacccaacatgtttttcctttgtctgtatatcatcttacccagtggaatgatccgtatagtatccatcctacctaccaaattcagtacgttcccttcctctttccctttctgagccctcctttcttcctctcttcacgtcttctttttgactgatttaatatgtgttccccttgtcaacagtgggagtgatagcccatcatgaagattacccaatcgaacgactcgcgctttcacgtgatagcacaatccttggttcggcctctcatgacgaagtttgcaaactgacagacatccgagacatcttcgacgagtctgatgatgaggacgaggaagagggcgaaggcgagagcggcagcgaagaggatgtcatcatgggcgctgatgggggtgatggtaaaggagaagaggaggaggaggaagaggaggaggaaaaggttgttaggcgaccgagtcctgagcctgagcgaagaaagaagaaaaagaaagagttggttgccaacagggaagaagaggagaaggccgagcgaggcaatttctttagtgatatgtgaaaggaactctgtctttcagattgttattcgcatatgctcctctaatcagcctcttgtcatgtacaatgatatacgtaaacgtgtctttgaaaccagagccggagaatcaaagaatcatgaataaacatcacgcagagaacagattgtaggatgttagaaagaatgttaagatagatagacatgaaaaaattaggaaatgttaaacaaagcattagtagagagattagagggaaactggtatattggactatataattcccaagtatacaatactcaagtgacttcaacctattccaaccagcaatcaacagaagtgaactcgtcagttgcactcaaaagaaattacatagactcaaagcagaacacagtacaaagattggtcacactcacatatcgagatcgtaaattctttttcttggcggccgtaccacccgctgtaggtgttcccattcggcttagcaaatcggccgtagggtccacaacacctggtttaggtggtggtacactacctgctctggagggtggtcctgcaggtggcccggccagcgggctgggttgagctccaggtgttgcggatgcgctccgaggaggaggtccgctaggcggagcaggcgcacttgagctcataggcggaggagaaaacgattgtcgaagggaagaaggcggaggggcccgctgagaagaggatgcgggtgacattgtctgagcccggggaggaggcggaggtggtttaggagcttcggcttctggcccagcctacattatcaaaaagtagatggtggttgaataaatagaagaaatacatgtaagaaatacatctatcacgaactttcttgttaatccatttcttgagatcgttgtcatagtagaaagcgctctcttctccaagcttggccttgataggagcagacttggtaggactttgagtagaatctgtcttctttccgccccacagcctaccgagccaagaacctccggcggccggtttggcttctgcttggttcaatgatgtcagttgagactctgttgatagttccgatatttacacatgacgtcgcgacttaccatccgtcttcttctcctcttctctcttctcgtccttcccatcatccttgctctcttcagattctacagcggccttgtttgttttcttctttctagaagcattgcctagcccgagatcgtcatcatcgtcctgatggacatcatctttgccctcgacctctctactttgtcgataagccgataaaccctctttggattcctctacagacacgctttccgcctcatacggcgtatacgattctccagcgggctgataaatcgacgccgttgaaggcgcgtaagacgaactaggctgatagtagatgttgtccgtagatgggggacgagagagcgctgcgaacgaaggaccgggcgaaatcgagttgtagtgagagaagggaccgatcggggctaaagatccgttattctgaggagccgaaccgccagagccgattggcttgacagaagaggaggccatggcaagttctgaattggagggggaagctgtgccgtcctcgccagcgacaaattttgtcaagcggccttcgaaccatgagccaaatccatctaatgagggtttggtgactgttcgcgagatccacgagccagtagaatcgttgctggatgttcctgacaacatttgagatagttcttgaagctgactcaagaaagggagagtatgcgatgcagatggggctttgtaaagcttgagggatgcagcgatagcatcacagtacttttgggctctcgcgacatcaccagattcgaccaaagtcaaggcatggagcaacttgtacggctggagatagtcgatacccctgaagggctcttgtcccttcaaaactggaatgagagacagg

SEQ ID NO: 1682 - DNA, 19499 bp, Xanthophyllomyces dendrorhous
atgagctcggtgatgatgactgcgtcgagatcgatatgtctacctgggtgagttgacatagtgtaaagatgcacacgaggagccaaaggtcctcccagtggattaagaggcggaggtgtgttcgaaagaagatagcagacatgtccggcgttgacccaacccttagtcaccagagagtttcctaatgagataagggcttcggtatctcctaagcttcggttagcagaaatcatcgcggccacctctctccaatcactgctcacagcagtttggtcaaatgccccagtcgacaccgtagctgatggaagccctataacagtaggaataagcatcctgttaggactttgaaacgaactgcggcagacaaggaggggttgttgacaagagaacgaaccatgattgactcccccaaacatatcgtacgtcaatttcaatgcatcccggctctttccggtactccctccatgtccactcagttctgaacgagtgaacgccttgacaacttcagcgaaagcctgcttatcaacactgcttgagataatcaatgcgtggctccagagtttctctttgatggcaaactcgacagcagattttctctcgccttggacgagcagagtcgaaagctgatctaaggccgaagatttggaagacaggggctgagtaaatccgccagagtcagagtccatggaggtacgaggggcgtaggaagatgtagaagtcagggccacgacaggagaaccagagcggaagcttccgagggacggagtgttggctcgagtgagattagttccagctgcagatgatgtatggcccggcatcaagattgcccgaacagaatccttggccgcatcactaaagacaggtaaaaatgagctcaacacactcaggctcgcgcgctactgaacgacgcgaaaatgtaagagaacgtgacaaaccttcccatcaatctgccttcattctcgatcatcacagctaataaccgaagtaaaatcgcctttccttcttggtctctaaactttatctcgtcacccttgcctttcacccaggcgagtccctgttcaatttccgaagcctgattgtctatgtaagctaggactgatgccttcttggccttttcgcccgccgcgttcttaatcgtggcaggatccaaaaatagtggtccagggaaagaaggggaagaaatgtcttgaagtaatttgatcgaaaaagagaagccataaacaggtttacactcgttgtcagtcttgttctcattctgaagaggtgacaagaatatcaaaatggcatgcagacatcaactcaccagattcagggctgacgtcggccatcgttttgatttggatcgtccgtccatctccttgatcgccttctccgtgcaggccggttccaaacgcaccgtaccctcctccgactccaagggacgggtagcatactacgaaccgaccaccaaatccgaagctgaacactggaaccttcttgaaagtttctcgacctcgaccgagatggtcctcggtagcatcgtgaagcacttgaggtgcgtatgccgagggttgcgtaggagcggacggctggggctgaggaacgaaggtcgatgcagatgaaggtggagggggtgcaaatgaatgagttggtatagatgtgggatgagggacaaaagaagacgaaggcgtgtaagaggagggcactgatggaggagaaggaggagaagcaaccaggcttggttgtgtagtttgaggggatgagggggtagagggagaagtagcgaccggagctatctgtccatgagcaggcgatttcggtgtagacacagatgtttggaccggcgacgcgtatcgatacggagagtagctagaggcagctgggggaggaggaggaggccgagcgaatggaggaggagctggcggaggagctgatcggacggcaggcggaggggcatacacggccgaggtcgagcgagcgggtggcggtggcggtggcggcggaggagcagcgtccacaggtggaggagcagcgacagacatgagagaagcagaagccgcaaacgctggcgaagaggaaggaggtggagaagatgagaaatatcctgaactaggctgagaaggagatgcaaacgccgcgtaagggttgtttcccaagctaggcgatgagtacgggttcggagacatgtatggattgggggatttgactagtctgggaggtggagcggctgcgaatggcgagagactaggcgagaacggtgcttgaggaggagaggacagagaaacctgactagggagcgatggagccgagttgacggcttggggacctgagttgtaaggcagtctggaggcgtatgggtttgcagtcacggttctttttatagtcggaggaactgccggttccatcgcaggtgggggggaaggcggaggcggaggcgaaggggagctaggcaggtcgaatgtcgggtagtccgacacctcttcgtcaaaaaagttggcgggcgattggtccactgtagtttcctcccaagcattgttggctggagcctattagaagaatagatgatgtacatttcggaaagttaaatcataatctttatacgaacagcctcatcagccagatgagatgtagaagaaagtccgacgaacatcgttaagatcgggtaaggcgccgaccagatcacgcgcaaatgatgacccatcgttcaagccagccgtaggctctaaggacgcctcgttccccagctcctctccaagattaaacccagaatcaaaggtctcatcatcgaacgggatcgagtctgatacggttggttgaacaatgttctctgcctgtgatgtctgttcctccacttcgcgactgagctctataggctgaacttcctccacgacctcgacttcgacctcggccacgaccggcaccgtattattgcttgattcttgctcaagatcaaacgaggtgccggccgagtcctcatcgaaagggatttcagcggacgcggccacctggtcatccgttccggtctctacaagtcctaaaggctcaatcgagatctctcgactaagttcttcttcccacccatccggttcttcaccaaagtccaacgggtcttgtgtgaaaagatcttgagggactacttcgttcgtggcctgtcatgagttcatgagttgggtgatacacacacaccccggaagcatggtttcaaacgttcaaagatgtaaagagttgagtaagttgtccagcatggaaagcaactaatcagtgaaggaataaaggtccggagggacagtttcctagtcagcacgaacctcatgagaagaaggttcaggctcttccggagaatgagaggcagcggaattcttgatctctatctgtagatcagacggatcgtctgtatgttttaccggatctggtggaggacctgactgagagtcgtccatgagtggtcttacagaaagatgatgtcaattggaccgaggagaaggaagaaggtatggtaagaagagaaaaaaagggagatggggatggttcgtcttcggaaaagaggacgatctctaagtgtgccagaaggtttccccaaatttgcccagatgcctgggcttttgtttggggtagctcaattcgaaacttaaaaagaaatttcatcctcacaatacaaacataacgatcgataagggaagagagggagagagaccagaattttgaatacaatcaacaccatgtacaagaacaccatcttaaccagctccttctctctatccacatcgttctatatacaaatcacaattagacggaaccaccagcggccaaagcgcttagccgggcgctcacgttccctcgatggctcctattgttcaggtgaacaacaaaattatccagttctggaccgacaccaggatcataaacctttccagggcaatcaaactgtattggatatggagacgacagtgaggtgatcagagtctgatgattcaagcataagacatgagtgtgcaaacaagaagcaacgaacgcatttgattctccattctgtcactggcgtcgaaggcagtacatttttcctcggcttaggaattatctggaagttatcgtcgggatatcgctttcttaacgagtcggccgcgatcgcgatccagcttggaggaggtgggggagcctgaagcatacacgagaacaaaatcagcgattggaatacgcgcactcatacggaaacataaggaaggtagaggaatagtacataccggacgagttgcagataagggtttcacataaccgttcatatttgccgacactgtcggccgcatctcttcaacgcgtaagggttgcggtgggggcggcggagatgttaacggcggaggtatcgattgaggctgtggtattgatgatgtttccgaatcacgctctgatcctcttccagtcaaggccatgtctggctgatcaagcgatctgggtgaaggcgataaactgactgggtctttgtttttcaatgtatctaattctgattgtgtaggtcgaagatggttgaactctggactggttggcaaactggatagcgagtctggggaggctgcgtccggagagaaatcaccatgtggggaagatgcggattgttgctgcaacgacttgccagtctgaccagactggctggaagacgtggatgaaaactgtctcttccgaccagagctcggtcgaccggcttgtttgagcgatatctttgaatgtgttcccgggcccggccctttcttccgataatccttcttgttgttacttatgttatcattgacgttgttgttattgttgttgctaatgacgctgttgttactggcggtggcggacaagagatcttttcggtaatggggagctgagaatgtaggggtttccctagcggatgtcggtggcgatgacggaggtggcgacgtttggatcctaggaggggaggatggcatcggttgaggactcgtcctatcctctttggcgagagaggcaatactagccgaagcgagtcttgcggccgcccgtttcgatggaagcaccggtggcggaggtatgaccggcaccatcttcggtgccatggagattggcatcaaattaccattctcgtctagcagacccaggctaggaattgaccgcttggtcgcttttggatcacgatccggcaggttcacgcctcgtcttcctctggtttgcctcttctttcgtctcagctccttctcgcgttccttgtccatcgtgtccatctcgacaggatcaagctctcggtagataggggtgaaggacgcatcggcaatatcttcgctccggacgacgttgacgagtgagggcagaaaagcgacccgaaggtcatcatccaagataggcgttccatcgaaggggtggccgacaagcacgagagacttgatgtacgtttgggcttgctctcgaatatcatgcgcgatggcagttctaggatgaagagtgatgaaggggatatccgaacatcgaatattagtatactcgcagtagatcatctagaaaaaccctcccaggcttgaatacctggcaaggaatcaaaagacttacttgaattctccggcaagcccgagatcactagcatacacttccgcaaactgctcgatcatgctgtctgatccgttggcatcccactcaaacgcatccaacaagttaagactcccaatagtgatatcgagctagggatgtagagatcgattggaacgcgcaaaagatacgatgtcagctctcggatacatgcaagaactccagacagacaacatcaacgacagcctcgacgtactttgataagaattctcatgtcctcgaatccaacctgcctctcgtccggtcctcgactgagctccccagcggtgagcggcctgccttctttctggttggttagatctcctccaggacctgctgatagctccacttgcttccatcctctctttcgtctattactctgggttctttccttccacccaacccaccacgcgctactctcttcatcaagcgttccattatgagcatttcctccctttactgtcggattggccgagctaccgacgacatttgcagatagagaaaacaccgagcggtactctgccagctgttcgttgattgaactgacgatcttcgagtggaatagctgagggagatggaagtcgtcaacgagcgtttgagcaaatatctctggggttaccacacggtctgagtttttgttgaagatcaaaatcattgatcagatcaatatacgctttcgttgtgtgaacagatagtcgtgtgtatgttaatctaaaaaggagagcttaccagaagcattccaggtaaaagtatctctgaacttgatgggttcatgatcgatctctatacggatcggtacgaggtgctcctcttcgttcgcgactgtcttcatctgagtctttgtgctatcagaatttttaaaaagattcccaagtgatggtgagcaggaagagaaggcgcaaaaaagtagccagagaaaaggaaccaacaatctgatttcttttcttttcaatccttcctctttcctcgaacgtttgagctctggccaaacgacggagaggccttcagttctgttgctagacctatctatcgacatgcgcttgtctgatgatgcatccccttcccaccaacctggaggaaccaaacctcccggtctagccctcagtatgtcaagcagcgcccggctacgttccttgtcggtttcgcaagccagggcgtacgtcttgtctttctcgagccaccttttgatctgtcggatctctgcctcagtcaatgcaggaagtaatccaccaaacgtcgagtccttgagttccatgttcagagggagaggttcgacccgagtgacgggcaagccaggagtcgcgttctgtagagaagccatccagtccgaggcaaccgtgctgtttgatcgagttggtccaaggataggacctggagaggatcctataggcttcgcagatgcaggagatgatgaagtcggagtagaggctgaagggtgaggtaccgcggacagggaggcgacgcgctgcgaggttagttgggattgggatgacgaaggacgagaggacagggtctggacagaagagacaggcaatacaggaggaaggaatccctgatcgggagggattggcccaagctgggtcggcacggtcgaggtcggtcgtccggatgaagaactaggacgtggatcaaccgatgtgctctgcggaggactgcctgcagacccgataggtaccctctgctgttggactacgcctgaagggatggcacctgggtgctgtctggacgagccaggaaagccgggaataccttcgtgagacctaccggacgcgaccatcattttaccgattacgtgtagaaccggtggcctgtctctgaacaacacctgaaggacagccggctggttggcgtaaggtctggcccacggcggcagctgatccggaggaagcaatatcggaagctttggattcggcggaggaagcggaggaaggttggttggcggggggatcgacatcagggacgagacctgctgtggtctctgttgattcgtgggaggatttgacgacgagtttggtcgttgcggattggaattttccggtagatgaggttgctgttgacggagaggtgttgaggatgaagatgatgaagcagccggtaagggttgataggcggatgagtatagatgaggctgaccgggtggaggtgagccttggtgagcggatggattgtactgatactgggcctgctgctgttgcaagtattgttgcctctgttgcagatgaagctgttgctgctgttgttgctgcagctgctgctgctggtgaaactgtgagcttgtcgaaggtgataatgcctgctgggctgtcggggagaacgagaattgattgttccactgctggttgattggaggttgtgacggatggcgttcgccttgctgacgaaggtcgggcatcatgatggacgctcaagaaggcgagggatgacagctaaaggacgatgagcgaagcacaacaatgggaaaaagaggttaaaaccccagaggaagaagacagaaaaaaacagggaaaaaaaagaaaagaataaggaaaagaaaagaaaaaaaaaagaaagaaagggaaaaagaaggatagggtataacagccaaacttttggtggacagatgagtgattgatggttgatctcggtcgtatctccttgtcctacccttttcaggatatctctccttcacgacaacgaagaggagatgatcggatggaggatgtatacgtgagtgagatcgacggatacactggaacgaccgggaatacgaagaataaataacaacaaagataccggctgaagctgaagcgagaaaccgaggagaggggaagagaaaaaaatggaaacgggcaaaaaagggaaacgcgatgggagcggccggtctgttcacccagaggcggtatggtgtggtggcaggtttcgcgggtttcatgcacggaccccttcctcggtcggtcggttacgccggtttgggaaagtttcgctcttttcttgttgccgactgcgcggttctaatagggctttatagtgttttgtagtgcttcgcagtgctctgtttggtccactctaatcgtcgtgtaaccaattgaggacggtcctgctgaacgggctcgtttgttacccgtgcgtcgtgtcgatcggtcggttaggcttagaagatcattgggttccaagccgtggataaatgaatgacatgaacggagaattattccgggtacatgacaaaaagcgatgaaagcagatcgaccaccaactcgcacgggttggatgatgggtccgatgacgaggtcgatcggacatgcggccactggccaagtggaaagctgagcaaccgagacgtcatacacgcacatgtatggtctatctctttctggatttcgtccatcgctctatctgcttttgggttggagtggttgtgttcaattgcctgaacgtttttctctctctccttctccttgaatctttgttatcaattcattttgcttccaggagaatctcgccaagtggacccacgaatagtatcattggtttccaaagaaatgaaaataataataaaaagacaaaaagaagaaaagcacagttttgtatccgttggaatcagcagcttccttcggacgatagtttgccgataatattttgatcttccccctcatttgtttgttgttgctcctcaaagaccgagcagcttggctctctggccttttttgacgtgtgtttaggccgggtaaaccccagcgtgtttcctttccctccttggcttttcttgtctctgctctgttctgataaacacatatccccacaaaacgcataccttttgaaaatcacatatatctattatacttttttccatcatggtcagctcaagccgggcaacccatcgatggccactctcgacggcgtcccattcatcgttttcaccggtcgagccgaagcgaccggcccgttaccgttcgctcctcctggggtctgactcccagatttatcagcctcggtctctcctccgaaccggtctctacctccttgttcactctctactcgctctcccttttcttcctgtttctctcttcttccgccccccagtccgctagctccgtcctcctctttttcttcttcctctgaaaccacactgttatctccgttggtacttcctccgaccgacgttgtcatcgtcagttcaccatcaacagacccgttcgatgcgtgcgaattattatgcccgtgacaagtgagagacgacccgagtccgagcgaatgtgattccgtcttgagactagacagtgttgagagtggaggaagagaagctatcgatccaggtctaagagaaagaaggaaagaaacaaagaaatccagagtttacgccatcagtttcttggctaattcgcccagaccaaggcgttgtcacatatacacatgaccaattcgacaaggaatgaaacaaggacgaacgggtcgacgtgactggaagagatggccattagtagattcatcaggtttgccagggtatgtcgcagatcgaccgtcttgagattccgatcggtcatcagctagattttatcgatcgaaacgaaacaccaaatcaggcctgtccgtatttcaagagaagaatccgaaaaggttgaacaacatagaacggagactagaactgaccagctcaatatccttgttcagtagatgaacagcgtattcaaaccgatatttggcaactccttttgaataaagcgggaacctgacaagaagatacaagcctctggtcaatcgacatctcgagagcacacacacacacacacacacacataaccgtccatactcacattcttgtggggccttgcatatctgacactggatctttaacgagacttcggctctgcgcgggcgtcaacgggtacaccaatccttttctcagatattttgctagtaaatgaaccagcatggtgacataacccaaagctgcagcgatcgactgctcatccacttgaatacccgccggtaagtcttcaaccgccagatggagcggtggtgctggctccttgtcgatcggcgtcggcagagcgacatccaagatagtgaacaccaacgcccggttatgaacctttggtccaatggggaaaataccttctagcgtgcttgtcagtcgagaccgatgatattggaagtatggccgaagagcatgccgattggcgctataatcgaacaatcagatcaattgtcagccaccaggttgagcatccaacaaacttggaagaggactctggaaatggcaagttgggtagacatacgtcagagtatgggaaaacgagttgatctcagctatgtgagcccgctcttccaccaggcaagcttctcctgcctgcaacaactcttctcgtctctgaatgttatgtcgataatcatcaatacatcgttggactgtcaatgtcatgtttgacgacaaaatgaaaggtcagcgcatcaaacatcgcaaaatcacaaaaaggaaataaagattcccacgttcatgccgactctgttgttttaatttcaaatgttctcgaagacgtttcatccgatctttcctctcgcttagatcccggatctgagacgaaaagtttgatcagtaaaaaaagaaaagaaaaaagagaccaagctagacagttgatagctcgtcatcagatgaagaccagacgtaccatgccagctacctcgttgtctttctctatgagattgttcaatccagcctcgattgctctagtcgattgtcgtgtgtcctccagaacagactgcaagttgaccaatctgattcaagcgaatgaccgatcgaggccctaaacatcagttccatgccatctacaagaaagatcagaggtacgagaagaaaagaggaaacttacttcagcagttcgcctatccctatccctcgcttcatctttgtctccctcagactcttctcaagcacacttttctccgccccaccatcccagccagctcgaccgaggacttttcctcttttcttttgagcttcccctgaaggaagcaagttgagttcaccgtccgaaacgttcctagtcaagaccgggatctctgaagccggatctggcggaggaggcagatagtacagtgtgtttggatgggaagatagtgtgatgatcagggtgttgggaggtagaaatgactatgcgtatataaaacaagatcgattttggacgtagaacgatacatattgaagcatgtcagttcaggagacaaacatatctctaggctcttgtctacgccctggtttcctcgtaacccagagggagaggaaacctttctatttatttatttttaatttcgcaatccgagtagaaagacggacctttccattccatctctttagtctttccaaatgtactttccagcttttcagaattctccagccctcttcatccgctcctttcctccgccgccgcctcacaaagacctcgaccttgaagacagtcagcctgccgacaaaagatcccatttcatccgagaagtcgtgctctggatcaaactcgccatagagcggatgagtggaggcttgctgaatccgagagatgaagaatggaactggatcctgtatgcttgaatagctcgtaggtacaacatcggcgcttccagttcgagccatagccgtggacaagactggtgggacgggtttctgatgagatgctgcataggaagatgcacgttgcgcctgtcggggaaaggcgctgtcgaccgatgtagaagtcgagatcatcataggtgatgctctttccttcccctttgtgctgcctcccgaggggggagcccaattcttaatcgtctcctcggccagactgagcacgacaaaactctcgagcagtcttgacgaggccagcattaacggatcgttctcttccgactctacgttcaatccaagggatttcatcctgaccgattcgtcggctagaagcgagtcgggttcgatctcttcctttgattcgtcgatcctcgaatgatcagacaaattgtacccggggccgacggatctgatcgtccggtcagaacacgagctgccgacactcactctggagctgctcctcggtcttcctccagacgtagtgtttaacgagctgctcagaaaaggcgatgaaggcggatccatcgttggcgaaggatgagacgacgtaggcaagtaaggtgccgagttggagggaaccgagagtcgggaagacgtccgtgctcgggagagagacggtcgacggggttgatgcgaggttgtagaaggcagatgcagcatagccaatggagagctcgagagctgggcagaaaatgatggggttgtacttatcgaaggctctctcggagactggaggggttgatgagaagacatgttgatcagaaaccttgccttgatcttgtacaaaacgcgagcaaagagaggcactcgtatcggcactcaccttggcgcttccgatactgattcgtctccctcgtttgcctggtagattcaaaagctcgagatcatccaatgtcattcttcttctcgccttcctagcgatgtttcctccggcggtactggtgacaccaccgctgctgacgccgttgcttctgcccacttgtttcgatacatcgtcctcctcttcaccgttctcctccccctctccctcacgctgggggatgttgtagccggtggtgagcgagtctgttggtttgaccagtgggagggagagtagttcatcccgatgaggtgtcgacgtcaggttatggattgagagtgtttcgagatgtcgaatctttcgctaaaagtttataggaaagcaaagttcaaagagagtcagacggttatgacgataacatagaagcgctcaagcagggactgggttccagcttctggcacacacaaactctttctctccttgagagatggagaaagcgaagtaagactcgtactttggggatcgtccgagagtcaccaaactctgactgatcattcgacatcgaacggggtgggaaagagtgcccgatagatcggatgaagatcctgtgtgttgttaagaagaagaagaagaagaagagaaagaaagtgtagctggttgagtgatcctctttctacgtcgaagaacagacgagatgctcggcgggctttctggatggaaacgaaagaatgggatcggtctgattacgcttgttttttccggtgtcttcctaaggcctactcctcccaggcgtgaccttccccatctacaccttctctgattgtgtttgctctttcactcgcatcttgcgtttgaccatcggccagcctactcgagaacagaaataaccccgatgtccgaaacattcgctcctctgacaaaccctccggtggacacacaggccgaggattctgttgcgcccggtgtggaggagggtaagatctctacggtcgacctgacgagtaagtcgcatttgtcctctcgacgcgtgcttttgtactttttttttttgtttgcatcgttctttttctcattttcttggagcttgaggctagagcctgataaatgtttgttgaatctcttgacctctttacagccaacaagcgaggagcatcggatgagaatgaggaagaggaagaggaagagtcaaagacgactaaaaagtataagcctctgatttgtttgatctatcgatcatccggtctgataactgaacctcagaacacgttatattgcattgtgctgcctggccgaacctttctcttgtgcgctcttggcgaccgaacagaccaaagctaacgggcacaggccagacaaagacagcagagacagcagctgccgaagcctccttggtcgaacctgaacaagaaccgtacgagtcccccacttctatttcaatccgactggtatttctacccaaaaagagaatgtatatgctgatggcgcgtctctaaaaactgggactgtcaacttttatctttcaagagttgaggattctggagttctctcgcccttgccttctccgcggtttgaaggagtcgatcctgatgttcagcagcagcaggaggaaacggcggaagatgaggaagatgaggagaaagaggtagaggaggagaaagaaacgaaagagaaggcgcacaagaagaaaaagaaggacgacgaagaggactcggattctatcgattcggacgaagaaattgacgaggacgagctcgcgttcctcgatcagacagccatcatccccgatgaagaagaggaaacagccgggacaggaaggagatcaagcagacggggagccgcaaaggtggactacgtgaagtaagattggtcgttgcatacttctttctctttcttgtatcttttccagtcttgctcgcctgacatcaatctctcgtctttccattcttgctcactcgaagggccaacctcgaattgggaggcgatccgaacgaggaggactgagctacccagtcttgatttgttctgcctcgtttctgtttctatgattttctgattttcaattcttatgcgacccggaataaagaaaagaagacgcccacacacacacgacgagagtgtgtgacttgttatgtacattccattcatgttatgcaaccgtgttcaacaagatcactctttcttcgtcctctatcggcctgggaccggggataccggttgaggatcgattagaccaatacctcatagagaatggcaaagcgagcgcgagaccagagagattggctaggatgtcttgccagtcgaaggatctggtcgaattctgcagttgaccgcgagcgcaaccatgaaccgatagaaacggagaaggacgcaagcagggcgagtacaaatacagcgacagaaagaagaaaagtcagacccatgcgtttgatgctaaatactaaatgacttgaagaaaggaatcaaaaagaagagaaatgagaaagggccgaaacttacagtcgtccaatcttgaacaaactcggacaaaattccaagaaaaagcccgttgatgagtagggtataaactgcagggacgcaggtcatcaatcttggcgccggcctgtgagccacgatcagcaaaagggagagacagaggagagaaagaggtggagaaaacgagagataaacaagaaagtcattagatgtaatcgggcgtcaagattgaaagagtagaactcacggaggatccaggatagggtagacaagtgtcgtagcgatcgcgttctgtccatttatttgtttgtttgtttcgtcatcaaccatacaagcataatagaggtgaattcgtttgttctaagaacctagctttcgatgacgaaagagaatgactatacccctaggaagtgttggatctaaggaaggcgcgtgagacagatgaccggataaaaaggaagagaggagggtagcaggaaattatgtgagccgggcaatcgaaccaaaagacacaggcgaaaccaggagtactaaccttatcatccagtccgagtggtgggagcggggcgagagccagaccggcgagaaggccgatgaacaagccagagatgataaagaacgcctatgttttgaggcagaatcggatattctcgtgagcgcgttgaccgaaagaagaggccaaagaggtaaaaacgaacgagtctgatacggaggttcactcccggaggaaccaaggttcggacaagccagatggaatccaacgcaattgaccgagtcaggaaaccaggaatattgaccatcatgagtgagaaagaaccatgaggtcggaagaaggagagaagcaaggcagggggggagcagaacgggaaaaaatacagggaggagaagaagggatatggagagaactgctgagcagtcggagagttggaagaaaaaagagaaagtctgatggccactctctgttggctgggccgggtgaaaacagagggacagcaaaggctgatcggaatcctgaacgaagaagaggcgatactaccgagcaagcaaggactggatgttgagaaagagaggaggaaagtcaacagaaacactacgcgtgtcctaatatgctacgccgcgtgtgagttccacagaggagtgtactgagttctctttcgtaaggttcatttatctcgtgaagaaaagccatgcgcatagcgaatagttgattcgaggtctagatggagaaagagaaagagaaaaaaggaagaagatgatatgatagtgatgatgatgatgatgctcctttctgtttcctcaccacgctttcctctccatgctttcctctctcttatcgaacgtttgatctctcacatgaacgaatgaatgaatgaatgaatgaatgaagaaacgaacgggcggacgagcagatgcttggatggatacaaactcaataatatcgaaacagaacagaattttaaattgagaatgttcaccgttcgacggctcagaagatcgtgcacgtctttcagctgcatgccttcgatgcgtttataccgaccggttcttttccagcatcttcgctgtggtccaaggaggatatcagatcgtgttcgttggtcacgaaacagaaggcatatatttttcgtcgtcgtcgtcgccgtcgtcttcgtcatcatcatgaactttatgattcccttgatggccggcaccaccacttttcagactaagagcagtaagagaagagatagatgcacgacgacgacaagttcaagacgaacactgcatagaaactagtatatagacaacgagaggaagatgacgaagatgaatagacttccaaatggagtaaatagttggaatctgatgaaaagctaaacgggtaaatacggggagccgacctgcacgccaacgtctatcggtgactccttgtgttggcgatggcgatggtggtgcctgatggaggcgatggtgggggtgccatcgaggatgacggcgggcgctgaaaaaaaggaggttggaccgcagactatgtaacctggcgctcggttttgtttctcgggccgagcctaccggttgagccgcatttgggttggggggagggggagatgggaggtgaagagtgggtttgtgcctgtgcctgtacctgtgcttccgttcttgtgttcctgtgtacctgagtgtccataagcccatgtgtccatgtgcctgtgtccctttgatggtgggcttcttattttgcccccgtcagcgggcatcggtgaattcttatttgattccgtcgaggacgaccgagcaaaagtgcctctagcgggaaacacaccggatccgttcccggttgggccggctgatgtgcgtccaaagcattcgaaacaccaaccgaccacacaagcgggctttcggatgaaaacgggcgagaacaaacagtcatgcaggaaggccgagtctggggtttgggggaggggcctcattaaccggaagcatagagctaagagtcggggacaaagagcaaagagtgaaacgttcatgggaagccagagtgtcaacaaaacaagagtgaagagataagaaaggcaaggaagccacaggatgaacagggggagagactcggtagaattatgaaagatggaacatgaatcttgcaagcggcagaggccaaaaggcgaagggcgaacggtgaaaaggtaggaggagtaagaatatttgaaggaatgtattagtaactttggtgagctcccttccagatgatctctgtccgtcggtaaaagaaaatgaaggagaaagaaggcgaaacgggatgaaactccgggaaaatgcgacggaccaagaaagatagacgatggaaacagaacaaacagcgagagcgagagagagcatgtgtgagactctactggccgatcggttccattccctgtggttcttttcctcctccttcttccgcgtcctcatgctcatgtccatgcccaacatgctcgggaaataaaacaaggaggagcaagactcaaagctgccaaaatgaaccacacagttgagcctcatcgggtttaatgcaaaatacagaatacagaacctgtacgagaaagagaaagaagggagaaaaaaaaggagaaaaaaaaaaccccccagtcggtgtttcatgcgtcggtcagtggatgctggaaagaatgtgtgctgaaggtctcgtcgacttcttaagaacttgaacgggacaaacgaccgaatctttctcctttccttctctcctctctctcatacatttgttcatctggttcgcccgatccgttcctttgtgttctcttgctaacacattcatctcgttcgttggtctgtgtgtgtgagtgtgtgcgtgcggtgtattctttctgttcgctccaacatacccatacctatctgtttcctagtcacccaatcacataccgtatttcttttttctctcccctcttttctcatctcctcaaccccactcacagccccgctcgctcggtatatcttgaatccccaatcgccaatctccaatttcattctctctccggcgtctggatctcctcggcgtttctgtctcgctttcttctttataaccttcacccctcgaccggtctttccaaatcgacccacgggccatttcttctagatcccatcctccccacgtttttcattattatttgctcttatttccaaatagaaataaactcaagataaaacaacgggaaacagagacagaggatccctaccaaggagaataaatcttaccaagccaatctaccctacctaaacgaaaccggaaaaaacaagagaaggacacggaatcctggcggcaagagaagaagagaaaaaaaaaatccctcaagatccggtcgctcaactctcgtcctccatctggcgttctcttagctcatccatcaaacttgacccaatttcggactcgtgtcctcgctcaaggctatttctgttcttcgtctctctgttggattgccaatcagatcgtatcctaccgaattcttcgtgactctcgtccatcccgtcgacaccgccaagagtgataagttcaaaggcagattcagctttgtcctagtctggtcctacccttaccattcatcctctgtgctctatccccatccc

SEQ ID NO: 1683 - DNA, 19474 bp, Xanthophyllomyces dendrorhous
  misc_feature (5434)..(5443): n is a, c, g, or t
cccatccacatgtcttcaactcgcatcaatactgcttcccccaccaacatcatcacctcccccgccactaagagttcatatcagtcgtccttctcatcttccactgcatccacttcattcacccattcagtcatgaagtctcgctcacctcgatctcgatccgctggcccatccaccaccaccacctccgccgccgcgaaatcatgttcggccattccggaccgacactacggataccgtgaggcagcttgcagtgccgctcgattcgtaagtccagcttttcgtttacttctcattcatcactccctctctacctctctacctctcttcccctctctttctctcttgcgtcgtctcttccccagaaacttacgggactcctcttctcttttttggtttctcttgatttttctccccttcccacccaatattaaatatatatatatatataaaatataaaaaattagatcctgagcttgtatcattgcccgaacataccggcaaagacgtcaccctcatcgcctcaaccgtcacttgatgtcttcatcgcctatgctctccaccgaacaaggcttcccacgatcgtcaccacatccgccctacacctgctcctcaggctgaaggccagattcccggaggccagaggctcaagtggacacaggctcttcctcagtgccctcatgaccgccagcaagatggtctgtgatgattcgtactcgaatcagagctggtgtatcgtcggtcagggtatgtttgcccttaaagaagtcaatcaggtgagtctttcctttaggtatctgggatgtttgtccttccattcttcttactcacccttctttcctgccttctttctctctctctctctctctctctctctctctcctttttagatggaacgagaattgctaggctaccttaagtgggacatcaatgtaacagtagaagagtgtgccgagctcgatgtaagctccatccatcccaacatctcatcactcatacatacaactggttctgactttgaacgcattctgtttcacttcacagctcaaactacgaacagattactctggtcgaccgccgtgttccagctcaaactcgggccttgactcgataacatcgtcctcctcatcgtctgccaccacagcagtcaggtcgatcccgatctctgagtgcacccttccggatgcgtacccatcaccaccgtgttcccccatggtcggctcttacacctcggttgactcctcagaatcctcgccttcgtcctgtggcccgtgtgcgacacctccgaataccaggctctccacgtttggtccgtttaatacggccaccaacacggccaccagaaccaacaccacgtcctcttccgtagtggctgctgccgccgccaccaccacagcaacagcaaagcccgttcgccagattactgatgagatggacgagatcgagagctggtgaccaaccgctgtgttgccttttctttctttctcatatttcccccgtctttacctttgccttcgatttgtcctcttcttcgtttcccgctattacctcataatcgtcttgtgccttcttattggattaccctcatcaaatcatgtcttttgttttaatccaagcttcctcagtctctcttctcggaaaaaaaatcccacatctctttcatctttgctggcttgttcattctctctctacctgtttcctttcgatctatcatctatcatttcgatcttcagttgcctttcaatcttgtattcttcgttgtatgtttcttagaacccaaatcaaattgcaattttcaaactcaaaaagtaaacgaacttcaaatacgggtgcaagaagaaaagaaaattgtctgtcaaatagtttaagcatgcctgtgtgctccgttcgattctttctttcttttccgcctcttccgttgctccctccttttccatcccgtcttgtttccccggccatcgtcatcgatcactcgatctcctgcatcatagacgcccatatgaacctaaaaaatccataggaaatgataaggagatgaggcaggaggggcactaagaaaaggagttagatccacatggcccaccacagagttgcgtccccagcctttcagaattttattttattttattttattttgttttctgtagatacaagttccttctcctctccttattgatgctgctccatcgctccattggtttgtcgctctctgcagcacgggcgttgagtttgctttatttacttatttgtttattatccgactttatcctatctgttcttcttcttcttcttaaagccggaccggaactcggatagagattcccccatggaaccgaggttgtctcaattcgtgccaaaacagtaatattaatactaatgacgatgatgatgatggtgatggtgatggtgattggtccgcgtgacgagcagcgactttatcgggatttcaccccacccgccttcatcatcatcattccgctcaaaacaaaaccaaatgaatacatctcaaataaaatccgatccagacggacaccggagtgaacatggagcaaggaagcaaaagttattcagatgatgcgcttaaattagaaccgatgggtagtgagagagtgatcgagaggaaacgataggcggctagctgggaggaaagtaaacaaccaacatgctgaggtcattctctgtccgccccatccaccagaaaagagataacctgctacttccatcttgcgctccctttctattccattccgatctattcttttcaattcaattcaatttaattcaattatattctatctctcttctcttagtggaagttccgagagtctatactgaattaagaacggagcaagagctttttgtttcggaactatttctttcttgttcgtttcgcatcttgaaaaaaatccttttttttttcttttttttttcggcatctgcgtccgtaagcgaatgggagatcgttctaggcagctgagagttctccttctttctctggctggatatacagatcccatctatctctttaaaaaagaaatccatgtaggttgtgttcggtttcgtcgttttctatgtccatctcatctcatctcacctcatcccccacctcatctcatctttcgatcccccttgcctgctgattgttcgatgaacgctttccccgtttggtgcaaacatacatacacatacattcacgcaaacgttctggatccgatacccactaatgcctgactgacccgctcattctcggttcacctttccgtttgatcgacctgctacaaacacagagagagagacgatagccatcacggtttcaacatatagaccgaagatagacctatacacatatacaacactaacgccacattcacaaagatgaacctgttggatcttccgatcgagattctcctccagatcttccaacatgccgccgggaaggacaagcccgccggccaggccaccacacggtcggtcgctagcctgttggggttcacgggaaagagagagaacgttttgaccacattggcgctggtctctcggaaatgccaggtgagagctcgtcccccccccccttcctccttattttgcccaacacgatcgtggttgaggtcgaggcctgtctgatgatccgggtgcgcttgtcgacactaggatattgcgtatgagttcttctatggctccctctccatgacgaacgaccgcgcagagaggttctatcggtcgctcgaaaagaaccctcggttaggaagtttggtcgtcagctaccggttcatcagttgtgatctcgcccatctgcgtgcgttccaccggtcgatatactctttgccccccgcccagtctgctctacgggtgattcattcgcccatggtagccaccctctcgtcgcttgtcgatcgtgaacagccgccgctatcaccatcatcaccatcgtcatcatcgatagcgccatcgcgacgattggctgttccagactcggtgcccatccggacactaacactctcatccgtccatcccatcagagatgtcccgaaactggtcgaccctcgttctgcgtggatgaacacatccgagctcgagaaactcgtcctgaacttcacgcccatcaatctcgcacccaccctcccgctccggtcgaccgatccgttctactcggtaccgcttaacccggtgtttgctcgctcgttaagatcgctcactttaggaaacccggtccaggggctcgaaccagacgtgatcctgccggtgttggaacgtctgccgaacctcgtcaggttgaccatcctcggatcgagcgcccccagtctgaatttcatcctacgggcggtccccgggttgcaaaccatcgtgttcaccagagctccacaggccatcgccgaacggtcgttcgctcaagccgacagagccaaggacgagaacgggaatgggagtgagaacaacgacgaagcggtcacccacagggctttacgacagatcgagatcttgtcgcctaacgagacccggctgatcgagtccttcaacaggcgcttcctcgatctgatcccgtcccttcggtcattccaaccgtcgacccatcctgctccttctcaatctgctcgcgctgaattcgagcgacgggacgtccgggatcgactacatgacttgccagcactcgagaccgtcaggcttgcagggctcgtctttgaccaagtcagagcatcgggcgaaggcctaggtcgtgtgaccgagttcgcggtggccctagatctatggggcatcaagctcgtcgaccaggacttggatatttggtagtttgggcccaatacagtcgcttcgttttatcagaatgaattaaaaccttgttcttctcgagatcatctcaatttgccgtcatcatcatcatcatcatcgttgttactatatagaccatgtcacgtaggcttctctgatcgaacgcattgcagatctcatctttctttctttttttctttctttcttcattctcttccacctgtggacgaatcgttcatcatgcggcatccaatgtttcttcagacaaacgaaaaatagtagtgatagaatcgcccctgtgatatatttaattagaaaaacaaagggcacaagccgtcttcctccggtttgctcgttcaggttgccatagcggtatctccactagacccaccaccggtccctgcgccagcgccgacggtctcctccttcgttcctcctagacccaaccgttggagaatcgagtctgtttcttcacctgaaaagatctttgcgagcggtcgcttcgtcgtcgggttgagcgtcaacgtggccaactcgactggaatacaaacgaaaacgatttcacaaatccgtatggacagtgtcagatgaagattggacaaaggccaagggaaaacaaactgcaacgagacaaagaaagagaagcaaaaaaaaaagaaaaaaaaannnnnnnnnngagactaacgcttctcggatcccagcttggtcgtgtccatagttttagacatcactttgaggcacagatcggttgcctcggccacattcatcgtctccttgtagtcctgcttcagcaacgaggttgccctggaagtgcaaaacatcatagaagactatcagacctgaaactcgtacgccaggagttgaaagaagactaacgttccgttgttggcaccaatagccgtagccttccatccagagtagttgcctgacggatcagactggtagagctggaagttgtagagatcatcatagccgatatagatcaaggagacaccaaacggacggaggcctaatcgatacatggttatgaaagagacagaaacacttggtaaggacatgattaagtttgcgacgatgaaagaagatcatgatacgtacctccatgttgagtgtagccctgggaacagtcacaagcgccacgagtttataccggtgcacatagatccgatgagtttgcatgccttggaaataaggaagacagaagagcagtaaagtacacacctgctttagatcacaaagcttctgaacaagcacttccaccggaatgtcttcgttatacgacaacagatgattttgggcggctgttcgagcgtagttgactacagagttggcgtctgcagtgtatcctgctattccagtgatgacattgctgtaaatcattccgaccaaatgtttttgctcttcgtcaatttctgccgacccagaaaaacatgcacagcgatagacaccagaaagactcaacttgttgagcaggaaaaccttctctcctccagcagcccaggctgcgtctccctcagcccctccgcccttggtcatactcaggtcgagcaacttgcccgtcaccttcttctcggcggccacgaccacttcgtcagtcgcaaggatggccatcacggatccagcatgagagatagcctccatagcatactcgactgaatgaggaaggagactgaacggtcagtctggtgaactgatgggttcaaggaagttatgcgagtgtagaaaaggacagggctcactctgatataatcgacctgaacaatggattattcgaacgaacaatataccagctgggttaatctactggctaaaagcgacatgaacaagtagcacggagaaatagtaccttctggagaaaagatagttgttctacctgtttagttcaataataaagaggatcgaaggtgagtattaagacaaggaagaacgaaattggaggattcgagcgagagatggaccgaaacgaggacgaactgtcgtatcttctagactgtttggaggaaaacaccaaacaaaacacagaatgagaaagagtgcttcaccggagctatagtttcacaagcttgagcgagactgaccatgatgtgagatagaaagaatagataacaagaaagaaagttggtgggtcgacgtggatgagatgttggctctttcgttcagacagacattcgacacatctggtgttagtctgagttggaggaagggcgtcgtggaacttacgtaagcaaggatatatttgaatataagcatcttattaaaccccattcaaataaagctctcttgttaagggcaaccaagctatgacataagcgattgcatcctcattccctgtcaactcgcatcgatctcttcgttgcgatcgtcaaccgattccatcgccatcgccatcgtcttgtttcgttttcttctctcaaccaccatcatactaagaagccaaatctccatctgttcgtctctgtcttctccctcactcctatctcatctcagcgcatgctctccaggctcattcttcgatccattccgctcgtagcccgtaaacctacttttgtcaaatcgttctctagtaccttacccatcatgtccggacctcctgctcataagatgggtcagtctcacagctcctcagatacatcttctgcagtcattttcactggatctgatcaagtctcttctttttgggctgaatcctgggcttgctctcagcttactttgccaacatggcttcctctctccctgaatctcacggagagttccgaactgttctgttcgtctgccgtcattcttcttttcctttatcttccatcgcacgatgtgctgacgtgcgttcccttgtttgatgtctcgaacagctggactggactctacagtcaggtcgtcctgatgactgtccagccgggtggtgagagtgagtcgatcttttcgctggcatacctgcatcgtaaagaccaatgctaacagcgcagagctcattattttgtcatcgaaacagtcggagatgaagttcacaccgtcgatcaagctttgtccttcacgagcgggatcggtaaggccatcgtcggtggagaagagcaggacgtcaaggctggcgatctcgtagtggtcccagctggcacccagcacaacttcatcaacactgggccaaacccgttgattctatacaccgtctactccccggcggagcacaatcccaagactgtgcacaagaccaaggaggaggctgatgagcacgaagaggacggaactgatgaggcccctggctggagtcagaagtccaagaaggagaacgaagccgctcaaaagaattagatctgacaagctccgtgcgctcttggaaacaatgatcaagccatcgacggcttgtcctctgtgtttagtcaattttgtattactctgattatctgtatctatgaacaggttgaaatctgaatccaatcgggagtctgtacagattggtctcaagtcctgaaagaaacactgcgcaatgaacacttgtctgcaagtccagcgatatataatgacacatgtctcctcctcatctattcgtctttgaggatgtcactcttcttcagtctatcaaagatcaaattttaaacacggcatgaaaacgaaaatcagatcttgttgatcgaaagacaatgctagaaagaagagaggaaagaggtcagggcaactgactttaattcatccgacgaatccttcaagtccgcccctttggcaagaatcttctggaccttgtcatccaccacgatgccgagtcctgatagcggagtgatgaagaagagtaaacaagagtagaaagacagtcagcgaggaagaagaagggagaggaaggcaaaacaaaagaaagaccgagaaggaaatggctaaccttgatcctgggtgaggtcaatgacatcctcgagaacctgtacgaacgatatttcaagcaagttcatgacgtcagtcgattctatttctgtttgaccattcgatcgacaagagagagagcataacgcagcgggtggaggagaatcaaaagaagcgagaatgttcggacgtacaacaaagccatcatggtcactgtccaacttttccaagatcgtctgcacctcttcctgctccggtcggtgcttaatcaccaacaatgccttctccaaatcggccaaagaaatctttccctgtccgtcgacctcgatcatcttaagcgagccaccgactttagagtcataagcttcaagttgaatatcgatcttgttgagcatcgatcgaatgcgcttagaaagcgaggtgtcgatctcgtcgtggtcttccggtcgaagcttggagccctaggtgacgtaacaaggatgaagaatgtcatgagttagatggaagaacaagaaggaaagagaagaaaagatggaagatgagaaagacgtacctcctcggaagcaatgttttcctccattagctgcttaagctcttgtcgctataagacgagagaaataaggcaaccgttaggtctttgactaccttctcatcgaagacgggccgaatgcaaggggaaagaatccatgcagaaaaaagaaaaaaaagaaaaaagggcaaggacaaacctcctttacaatcgatgaccgggcagacaaaacagtcaaggcctctgccaactcgtggagctgttctctggtcattcgaccatccgcctcaactgattcctcagcctgggcgctctccggctcggtcttcagctaaaaggtagacgaaacattcccaaaattggtaagcgagctgaacggtacatgtaccgttttctgagacggacaacgaaacgaacctcagattcaggcagcaaggcaagcgcatcggaatgcatcttctcctgtctggccctctcctcctcctttcgagccttttcctccgctcgaattcgatcatcctgatccttcttctcttttcgggcagtctcctcctcctgtattcgagaaagttagacgaaacatgtcgagacaaggcacggtgtaagaacatgtatggcgcattctaaaaaggggagcgaaagaagagaacgatagacgaacctgctcttgctcggcctcctcctcaatcaactcctgctgctgctgaaggacttcgagcttctcctggtaagtcgcgtcgcctccaagaacctcgagctcggcctcagaaagctgttaattgtcgcccgaatgatccagatcagcatgtctggaagaaggagggggaaggaaacaaagaagaagagagaagagagaaagaacggggcggcaacaatgaaagggacgaaccaagttatcaggcaaactgctcaatgtgacctcgagggacttgatgacatctgcgtgctcttcgttgaagtggaaagctcgacttaggacgagaaggacaccagagaccttgttggtgtaatgaagctcaatccaagactccagctcccttcgaagcgcagatggagaaactccagtgaaccggatccctcgagactggcaggccatttggagctcagacacagaaagcgactgaataccctcagccaggatgacctattccagaagaatgatacaagatggattgaggtgagtaacgcgcaggtcgcttaagtagacgagatgatggggaaggtatatgagaacaagacggtttgtctagctaaccttgtcgtcccgtcgaatcttttgaagccggtttcggatttgatgtctaaggaagttgtctgttccgaaggcatggatcttcatatatctcgacatggagaccagctgaggtctggacaggttgtccagtgtgacatcagactcaaatagcttggcgaccttgatgatgtcctcctttgagggagattcaccagttgatcgaacctaaaacaggattcaaacggtttgtcagccgataagttgtcgaaatgacgatgtgaacggaacggacctttcggaaaaattgcttaaactcatcgctcttgacgacgtcgttcgccttaagaccactctccgagatagtctcctgaaggaacttggccataccgattcgaactcgaagaagcttccgttgcttctcctctgccgcgtacttgtcctcgaatgtggagggcagcatgttcgggaagaacttaaggaacactgggagaaggagttcgagaccggggatgatgacaaagacggagaaggggataagtctgaggagatcagtagtggttcgtttgagctgcctggtctctcgcctagtgagagtacctccattaaggaccttccactgaagctttgagctgattttaacttcttgtccaagaagctttgtgccgtgccaatagtgtttggcctcttttttgaccttctcccatgtggtgagctgtggtttgacgtcttttgatgagtcactggtctttgcgatttccttggaagataaatcagatgatgaggatgacggttctttattggcggtggaggaaggagggttggtagagtaaagccgggcgagcggtagaaggggtaagtaggtctcgctcaagttggaggctaggtaaggcgttcgccgactgaaccctgccagcttggtataaggagatgagacaccggaagatgtgttccgaggagaggctgtagattcagattgaatggtagatgacaagagttaggagatgtgagatgtgattcttataacctcgaaagtaagaggaatatagaaagaaacgtagagcgacgaaacacacctcggacgatggtcggtgtcagacgcctggcggcataggtgttcaacccagaaactctgctgaccgacctagtggaagatatgagggagtacatgagagaatgttcttatgtgtacgtgggtggtggcaacgctgtatactgtcgagctggagaaagcaagaacaagtagagggaagaaaagaaaagaagtacaggatcacagcactgacacactcagcctttctttcttcggctcttctcggcatcggacggagtaggaagccgcagtgaatttggagtgaacgtaaccctaacacggcacttacctatgagtacgtacacactcacacccaacggcttgactaccttttgacgttcttcgcgctcgtgaacaagtgcttgttttggtatggagagaaccatcctgagaactagtagattcgagagcagtatgctgtggaagatcctccgcccaaaatatccgtcgaatgtattctctcagggttcaaacattttgcttcgatccaaactgtccttgtcatgtcgatatagaaaccatacaatatagggatgagggatccatcgtgctcttcctgatgtacaaatgctatccaggagtgtgcgctactctgtgggtctgcctggtcctaaactaaagggcgtgatgaatcaaaaagtggcacaatgtagagcacgtgcaggcatccatttttggcacctcagtagacaacgtgataagcgacggtctactagctcagactagaaatttctgtaatgacttcattagggaaaaagagcccgaggagggaacataacgcagacgcacgaccagctgaagcagagcatccattcgatctgaccgacatcaaacacactccttcacttggtcatactcactcacacgcacattacatcttccttccttcctccctctcttctctgtattcgataacaagtctggatacggcctgttttttctccccgaccagatttgttttctcggtagaattaacaagaagaaaaaataaatcaaaaaggactaccgctttccttcttcatcgctcgcaacgcgtgtgttcatccagtcttcgtagcaacccttgctactcactttaccaccacagatctctggagagactaatagagtaacaaaagagatttattcttcggattcattttctccctgtccaattgatttcctttccctgctctctgcattcaagaggaaaaaaaggctcccacttcttcaccaatgagcttctggaggttcgtcaaccaaactggttcaaactttgaggcccttctcacgagagaacccccgccgacactcgaagagcttctcgaggataccgaactcttgaccgaatgcaagactcagaatgcgaagctcatagagatcctaggaagggaagatcacgttaagggtcttcttggttgggtcaccaaaaatatggacccattggaagaccgggtgggcgagagtgaagaagaagagaagaggagacaaaagtaaggatccttctgtttcggttctgtcttgttccttctcggagagtcaacggtgaccgatctgaagctaagaatcttcttcaattctccctcacagattccctaacttggcgaccgaggtcctgtgttctgacgtgtactctattttggacacctgcctttccgacccggccgagtacctgaccccgttttgggagaaagctatcggtcccgtgcccattcaagcatcttcttcgtcgtctcaacctgtcggttcgccctcttctgtctcgtccatcgtcgatgtcgacctgacgacagacggaagccagactgccttgtcgtcaagcacgattgatcatccaccctcacctcctcctgtcgagcaaccgaccgtcaaagacacgctcgatgaagatacctcgatggatatctttgtagaagatgccactgatggatcgaaagctggcgaaaaaaacgagagggagattgtgtatggaatgtggtgcagggtgaattccgtctttcttggcaagaagacggcagaggttagtcaaacctattctttctctgtccttcacagttactttgtctgttactcttgccctcggtttacatatcctctgacctgtttgcactatcttctcagatactcgcgtttatcaaatctcaaccgagaataatagaacggctactcggaaagttggattcgcctgccattgtcgacttgttttttcgattaattcagtgtgaagagattcctgaaggacatggtgtgattgacgtatgttcttttctcctctttaattttccttctgcgtcctttctcgcgtagggtcactcaacttttgtcttttctactatctatatctgtctccgtagtggctcgcctcagaacgtctggtcgaaagattgacgagcttgctccacccgaaacattacccaacctaccatgataccgcgaccgaccttttaaagggaatcatcactatgtctgctcccgcgcctggtccgttcaacccaaatctaaatggaaacccaaactccagccaagacggacctatgtcagaaggaggcgtggccacaatgaaaaacaatctgctcattaggcagctcgtcaacgcacagaccgtcgacaaactggttgcctacatgttccgaccgtctggttcagagactcctaccggatcaccaaagaaacataaagaatcggtcgcttcgatgagggccattgagaacgaactgccaggtttcccaccagtctatccgccttgtaccgatcctgagatcgcgctcacctcgagcttaacatccacgatcgcggtattcatcgagcttatcagaaagaacaacactgactattcggaacctcatctgttccatgtcgttcggaacgcgctcatggctcggtcctctgctagggcgacggacaaaacgatgtcgacagacggtgcggatgatgagaatggcacactcgacgaacatgatggtgacgcggaggaagctagagagcagcaagatctggaggacacgatggagcggatcaacaaagagatcgggatcgttcacttgggcaacttgttgaacgtgttcacagaaaatatcggcggattccaacacttgatcaaccaaccgagaacgagcaacgaagccgcgcccaccactaccggtccctctgttccactgacacttgaacgattcagaatcatcgagctctatgcagagttgcttcattgctcaaacatggttatcctgaaccgtcccgctgggtccggcccggtctacaacgaaaacggacaccttctcgaaggactcgctgggcttgacaaactatcaaccgctcttagtcgggcggaaaatgaaggagcggacgataggtcaatcagagatcaattacaggcatcccatgagctcccgatcagttgctcatcctctgatgcaccactcgatatcgacgatgaagacgacgatgacggcgatgatcatcgcccccatattcacgatgacgaggaagaggaaggtcggctcaacgatggaaaggtcggatcggaacatgatggaaacgataaggtagatgaacttagggattcaaaaatgttgagtccagagccggaggtggacgccaacggcgagccatcatctactcgcccgacgatagaagaaaagaccaatggtcgacctcaatcggtagatctatctacacaaggtcctgtccctatggattcttcctctgcggaggaaactagaaagaaagacgtcttagaagagcagctttcccctggagatgtcctcaagcaagcattcataaaccatcatcttcttgctgcattagtcgtgagtaatcttacttttccgaaaaccatcatctttatatacaggtagaactaactctagcgaatgcgtgttaacacgatgatgacgacggcaggatatgttcttcgcttttccactcaacaactttttgcacacagtcgtctatgatgtccttcaacaggtcctcagtgggaaactcgatcaggggcttaacaagcaacttgtgatctctctgttttgtgatgcccaactcatagaaaaaatcttaaccggccagaaactcaacgacgcttcaccgttagtatacgttattccgagacacagacagacctttgtcaaagttctgactcagtttgttcttgattgtctggctggatgtcggcgaccaaaagtactcgactcggtttcatgggtcacctggttctcatcgccgaggattcgatccggtttctctcccaatgcccagaagatcttcttcagactctcacaagttcatttgatcaagaagcctggcttactttcgttgaaggtccatattcagaagcgaaaaagaaggataacatggtgatgggtggtggaaaaccggtggccgctcatttgacggacgaagctggtacaggcgaagacactgagagtgatgaagatgaggagatcggtgattcgatgaacgatagaatgggtaacggagacgctggcacgagattgaatttctctcaagggtttgggtttgattcttcgaatatggaggaggacggggagggtggggaaactgcccagcaggtttgtctctcttcctcttctaactgtttcaagctaaagacctcgtgtgctgatttctcttgagttaactcttggttcagttctctcggtatcttgctcagcagatgacatctggaaactcagatcgtcagttcgagtcctcttcggatgacgatgacgacgacgaccatgattggatggtggacaatcatccatttgatcgaaatccttctagatcccaagcattctcatccaacgtaagtcgtcagattttttttaatactctggcttcttctgctttattgtttttcactatcaattcaaaggcggttatctgacgactgttccatgtatttttgctacatcaggaacccttcgtcaacgctggaaacgggttcgacgatgatgtacgtcctgtcccttttgtttcttttcttcctctcaattgacatccagaactaatgaggtcttatctatctccttgcttgtgtattctctcaggacgaggcttggggttctttccaatcgacgtcgaccggattttcgaacaacggaggtgatgatccgtttggcgatgattttgctgctccaacatcctccaactctgaagccttggcggcgcttgaatggaatgatgctacattccaacgcgagtttcgggatattgattctgaagatgaagagtcaacaaccacaaagatccggatacctgacgcggatgatgaagaagacgaagatgatgatgtctctaatggcgcccgaggccgtagtattgccatttcgaatcaggcaggttcgtctggttctggctggaatgcatttgggtcgagcttctctcgatcgccgtctggttcgccttcgtcttccacgtcctcatcttcatcttacaataaccctcgaacggtgtctcctcgggcgattgcactcaactctggttcatcgcacttgtcatcatctccatccaactcaacttcgttctcaccatcatcgccaaacttgctgtcccacacaacgaacatgtcgctctcatcatcaccatccacacgattaccggcgggcgcagccgctatctttacgcccatgtcggcgatctcgcctccagatccaagtctgctcgaggcgaccgatatcgatagaccactaggacccggtgtgggtaaaggagtgagaagggtatcgtttggaaagggtcgttcgggtgggttccttgaaaagatgggggtggatgggaagcgtatccgcgtaccacgtgagtcttcagcgcttttcatgctatgttcctttgcttgtggcatctcgttgaattgatggctgtttgatttttatgttctcttgttggtgcaacagaagacgagattgcgcttgcagtagaatttgactctgacggctcgtcatcttcttgatgtctgcagaatgctctctccaccagctttgctcggccgcatctttctacttgcttaccttccatatctctgtttacagactatcacaagatctatttacatcactaacaatttttgatacatttccccttcacttttccatacttcctgtacaaagctgtgtatatgcttttctacctattggttatttataggccattctctcgattgattgttgcttcgtgccaatgtttcgcacctgctaaccccggaagtcacagtaagcaaataagttacaccacttcgttcttctggttgatgtcaccgagtcttgccgaactgcacgagagtttcgacgccaagcatattttcatcgcttggcccacaaaatcaatatataatcaacactttgtggctatcagtatatcctcatattttcatcacgatcatcactattaataccatcaacaccatcatcgccatacctctactgatactatcaatacaccatgggtgcctctagttctcaacctctaattccgctcactccatttaacccgcctctagggatccacaccagttattgtgcacctcacccggtcacgttggttctcaaagagaaagccttctcgtttagcggtgatgattttaatatcaaggacgctgccaacggaatggatgtcgtcagatgtcaggggcaagcattgtcgttcagggataagaagggtgggttcttacaataatcaggatctacccaaacttacttactaaaatctttgtttgaacatcggtaccaactatcagtgatcaccgatacatctaaccgagttctattcaccatcaagaacaaactcttgtctgtcttaagcacatatactggcgaggatccttccggtcggttgctgttcaccgtgaaatcaaagttttctagtgagtctctgtttccgacttatgcttctcatccagagcaattaactgatgaccaacctttcctcacgtgctggcgtcagttggaggcgcaaagatgactgcccattttatcaacgcatctaacgggagagccatcgagcttgagcttcgaggtagtttctgggaaggttcagccgcgatcactttggatggtcgtccggtcgctcagatttcgagacaattcttgacatctagagagatcttcactagtaaacaaactgtacgattttcctttctcacctcttctcatctatctctcttgtgaccgttatgcaagcgttcatctaactcaacatggggtttcttgactctgtgctctaacaaacgatagtactacgtcaccgttgcccctggggttgaccttgctctcattgcagcgattgcaatctgcctagacgaactcacaactgagggatgagtggtccaacaaaaatgccttattttcctttcctttcctgagatcaaatcagacatatagcttatctgcggggatccatcagccagccgagctgttcctctcatcaacaattaccttaactctaatcaccggatccttccttcctcgatacctccatacactaaatttattctttgccaaacgtgcgaagctacatgatctgttgcatcgacagactggatcaaccatacagttttgataagcaaattagttcaaaatcatgcttaacgtggtatttatatgcgcaaacaacggaaaatgtcatgtttcaaacccgaatattcctacagtcaaaagatgagtgttctagggcgatgaagcgatacatgagataataaacacagctcgacggaatttttctttttgtcacaaagaccccagatgcaaagcaggtaagtcagaaaaatgaatatgacggaatttgagggtatgtaggtggatacatgcgatgagagatgtgtgcaaagatgaggagatgattgagtacgcgaagatagaccgatcagaggaaccagacgagatatagtgaaagagagatgaccagacataatttccctcaatacaagagctagaaagagccagatagagaggatgtagtatcagtgttatgttttttttttcttttcatagatctctttcatttgtccatcaaaaagaaagaaagaaaactcacataa

SEQ ID NO: 1684 - DNA, 7873 bp, Xanthophyllomyces dendrorhous
gctatagtcatcgaacaataaaggcattgagccgcaaagaccaagacaaagtataagtagaagaagagaaatgaatgtgatcactcacagaatagggaacccagacaacagaccgaaccaaaaaacgatgttggcgatcttcttatttcgtttcactatgggcagtcgaccaatagcaatcaacgggatttgaatcatctacaagattgcacagacgtcgcaaaacatgtcatgaggtcaggttgatggaaaaaggaagaagaaatgaaggaggaagaccagaacctacctgcaagacaaacagatacaaccttgaaagccaaatgaaacagagggacagcattcagtaattctggggcgaggtatttagtcactggacgaacacttacctgatctttttgctgacgacagccatgacgagctcatgacaaagggcgctaagaaggaacgtcaggagagtagcctggttcctagacacctttcctgttgagagggaagaaaagtagacatgtcgaaggagaaaagtctaattgattgatcgaaatgaaaaagcaaaatcaatggggtgaatattctgtctttgctgaatatacatctcaaaacacttacatgaacaggcctgatcggaaaggacagagaacacaagaattcccaaatcataatgagaaatcacagttttgaaggtagcattcatgtgcattagcaagtgtcaagggacatacttgttccactgacgagcgaactgatcccaacttgtcgaattcctatacaaaagtataataaccaagccccgaggcgtcaagaaggtttggccgagataaacacagttgctaaagaaattgtttcggatgaaacaagagctaaccaccaatcctggtaaaattctctatcgctgaaactgtctcaaataagagggtgcacaaaaaatgtggatcagtgctaagatagcagatgcctgaactacagattcttatttaccaggtgagctctgcaaatccgttacagatacattcaaagatgatgaagaatattctgtaaacaacagaatgaagatagtaagtgattgaatcgggtttggaaccaggaagatataagacaacaggcttacagaatgtagtcgatcaccatgggaagcgccagatttatgtaactaatgataaaggaatccccaggtttgggaagttgaggcactgtaaacagacaaaataattgacaatcattcagaccagattctctgcatcttttgagaatggatactcactgatgtagtgttcggtgatcagataaatcagtgaaaaagttcccatagtggcaagcgtcttctctaaaatatagatcggccttaatctatatatggttaggaaagaaaggaagtatcgataagatttatcaatcaacaatttccaatataaatcaaaggatgatgagatctcgtactgagaggtcctagggtactccaattcgtacaccaaggtaggtacgagcaggtaatcggtaaaattccagtatgtcacgttcgccggccaaacgaccttctctactcctgtactgattaactccgccttttgcgcatccacgttgtgcgccagacccgaaatctgctgatctggatgagatgagagtggatgaacctgaggagctgatatgggttcaggtgatggctgtctagccggtgtgacatctccggagcaagatgtcgtcgaaggcgcacgagaagactcaacagccggggaatcagtgccgttgctttgaactcgtagacgttgtcgaagcgctgccgccatctgaagactggaagtttcctgttgagtaggctcaagcttaggcgtgccaatttgaggtgatgattcaccagtggtaggtacagttataccatcatcatcatcggtagtagtcgtcgcgattgctgcgttccgttcggcttccaatctccgttcttggacactacgagcttcagcatagactgcttcggatccacctgggtatgctgcaactgcttccgaaagatcgatttctgtctgatgaagggaggcccgaacgttacatagatagccgttatgggcgatgtctacaatgaaatgaagagtgtatctgtgagctgacgtcatgcatctaccctagttcccagagagcgctggtttaagttggacttgcatgaatggatcttcatcatcatacttaggcagtgtaaggtcaaaaacccggactgtacccaataccaattcctgttgagaagtgatgcgcaagatcagcaatttgatatgaatgtcgacgacattcacacgtgacagttttcgaacactgacctatgaaacgtccaccgaaccgtaatccctgatataaagaaaaagagaataaacaatgtcggttgaagcatgaatctgtttgttcgagatatataagagaagaacgcacctagataaatggcttgacagatatgctgaaacgctatagttggccaaccatatttccaccagcctctcttcatcccttgtaccaatgggacgcatagatagctcgcaccaacgaggatagcatcactgactgcaagtatcagtgcgtcgccagagatgagcttgaagaacgagccggaaagaaagtatccagtttgctcgtacgacctaatgactgtctgacaaaacaggaggaacaaaccgatccagaagagggtataaaaccctcggaacggatccgtttgggaagaggtgttgcccagatcaaagtgagatgttcgaggagtgaaagatatctatttggaaagaaggtcagacatgacggagatctagatgtcagaaaaaatcaacacggtgcttgaacgaaacatatgccgcgaatgattctaaccagggctttcaagttcttttgacctctggatttgaaaggttgtatgcggatggtaccctcatcagtgacgatagtcgatcctttgttgctgatactgctcatagcatatcaatttataatgtgaaacttgtcagccgtgtttcacgatgtctggaagaagaagctcagaaaagacagaatcgaaagagaagaaaacgcacctggccgttgtcacgtcgattgtctttttctctcccttgccgatggaaagattcaacggagtgctcgactcgggaatacttatgactcttgaagagggagcagaacccatagccgcagggctgaatgcggggtttccgaggaaaacaaagtgatacagcacatatcatcgatgtgtcaacccttgcgcattgacgaaggaaatagaagaagccgagcaaggaacacaactagcttgacaagcaaaaagaatatgagaaacaggtactatcactcactgaggtggctgcatgttgaattcacagtccaaaaaagatggtcaccgcttttgaacgatgttgatggtgacggtgatggtgaggacgttactggtgatggtcagttaatctaggggaaagtttaggaattcctctgggcgagatgacgcgtcagattccggaggtggacagggatgactaagcttttccggcctcgctcggacggaagcacacactctgatatagcaacgccatcacataatatttgagggtgcaacgccgaaagatctgcatactgttctcttagtcaagactgttcgagtactagtatgaatggtcatcgtctacatcatattcattttattctgtgtcccattcatccgactcgtccgactcatgccagtactccatatatccgtctagatcgtgcgtcgattcttcctcgtctgccgaaaggatgatgttatgtcgatatgagcagaattgaaatgccggttgtgtcgacagatacatcgcctccggatcgatcacacctaacctgcatgagtccagaaaccgctctgccagaagaggatcgtcctcgatcgcttctccaagcaagaccgacccttttggagggttaccactccgagggaatcctgatagagggaatcctccgaaatccttcagttttgcaaactgccagtccttccgctcggatcctgaaagatcttttcgaatccggggcgcaacagctaatgaagatagttcaggcagcgccctggataacgaacgcagatcagagtagccttgactcgggacaaaaatcgccaagattttcagtttggttagattcacctcaatggttcgcagtaattcctgggagaatttaagctgagagtgatagatctgcaaatcagagagttgggtccattttggtacaagacgagcaaataatgtactataagtactgttgaatgtgtcgtctctcggacaacacctcgttttgtccagaatccgaaattgttcgaggcgggggaatttatcatccaacgtactctccagcagtcggacatccatcgtactcgaccgaaagtttggtctgatcagggtgatagatgtcaacgtattcggcatgagaccgaggatgcttgctatgtcctcgcatccggggtctttgatcgagattgatcgcacggagggaagagtaaacggttcggatttagtggcacttccagatatctctaagggaggacattggaattggatcacaggtgcctcgatctcgagtgagcgcagtgatgtgaagtctatcaactcgacaaaaccaccaagcaacaacggggtcgctgtatcgttgccagcgcggatagcaagagtatgtaggctacgagagagcggcttgagaagtttcaaaaacgatctaacgatgctcgtgacgacataatgcactcagctgatgtctacataggtttgagaccttgaaagaaaagaaaagcgcacatgaacttacgatgatgacctggggccgactgcaatgtctaactcagttatcgtcgagcagttctgagcgatgaaattgatagccgtaaagcttatcatcgaatggtcttggaaaagaaagaaaaaaacacaaagaagttcactgatcaaaaatgagcgttcgtatgcataggaagaacctacaagaacaaaggacaatacgaacagtgatcaaaaccccattcaaggtctgtttcattctcgtcatattcaatgacatcttctaacttctcattgttcaagtctagcaagactctcttcattttgggactacatgctggggctaacttcaataagatgtcatcattaattctaggttcacacctgtacacaaggaacaaaaaaaaggataaaacaacccaatattaggtctgataagcacagcacgtacattagagatagaaatcttgtcttactctagaatttcaaggttgggaaactgtatggagctcagcatggtaggacatgggctaaatagctcatacagtcgaagatgcttgatccacgatgcgtatcgctgcaccttctcgagatcttctcgagtaggaagccttgtaaaaattgcctgttctcgaatgccggtcaatcagctctttgatgcatacaacgatcaaagaaagtagtgggctttcttaccctctgagccaagacagagtcagagttttgcccctcaaagagtccaaaaccgaatgcgtgctcttgaagtgctccagatttcagaatgtcgacgacttcaagttgcacccagttcaggatcttgatcgcatgtcagaatatcgtaatcttacttgaccaaggcgagcaaaaaagtatgtagggaacatacgctgagaatacttgatcggtctattaccccatagagctgtcaaggccaggggagaccagtgcttacacactcgagcacatgtggcaagagtatcaggatctgcgagatcaaatatgttgaccagctgaatttgaccagaaagttttgtagaacgagcaataatcgaggacgatacagagaaagatcaaaagataaattcatcactttaacaggacgtgcatgatgtagatggtagaagctcgctgagctttatcagatgtacgtaccaactcgggaatgttcaatggagaatttggtatcgtatggtccatacttgagggtgtactcatagtcttgaacgaatgtatctgtgtgagttctgtgtgattgtgggtgcatatctgccatgaagggatgagacgaaacgatatgacgagtgttgaatgtgaaacaaggtttccatctgtgctactatcacccaaacaaccaacttttctttctaccatcgtgcagcgggatagaaaactcataccatggcacctcaaaatctaattgatggtgatgatgaagacgatcccttccaagatatcattcagtcgaaatcgaatcccaatgctcaggtttgtctcatcatgtttcatcctgcttcttcatcttgttgcttgcatacacgcgtcgctgaagctcgaaatgccgtttctgttgaacctcttccctatagcactcagatcccttctcggaccctaaacatccttttgggggtggagacgtggagaggaacgacagacgtttagagtgagtggcgattacgtttcaagttggatagaatgaaatcctctttcgttatacaaagttaacgatgcttatacttgctctgatcgatcatcatccttactcagtccgttcttgtaagatattctcctcgcctcttgcttctgaatatataaacacgcatgctgacatgatcaccctcgtctggtctgaattctcagtgatgatgaagacgatgatccctatcaaccctcggcctcacctctctctttcaacataaatccctcgggctatctagctcccgctcctacgtcctcaggtcgttttggaacgaatctgccatccaaatctatcgaatcagaccttcctctcgcacgatcagccgctcctattgcaggggcacccaattctcatgcttctgacgagcaagactaccattttagcgaccgaccagtctcgggcagatcgtccagacggcggaaatggattccagaggttgacctgggcaattgggacatcaggtcgttatggggaaacgggccaggaagagtcgtcgaaggagaaacgagaaggatcaccctcaacgatgaggcgagtaacgcagtcgggaacaatggaagtcggtttgagaggaacagcgtgagcacaggaaaatacaacgtcttcactttcttgttcttgttcttgtacggtaagtctatcttcttgatgaatcatgctaagacattaacaaaaagcaggctctcgtatttaattctcgatgttctccatttcatacttcgtcactcgacaatatagaacaattctcgaaagcggccaacctgttctttctgttcaccggtgcgcggtcgttgtttatgcaacattccgagtgtagatataaattgatcatctttcttttctaatggtgcagcttgtattcaacaagtgccaggcgtctcccctactggtcactataccactatccttcctctcggcgttgtcttgattgcatctgccttcaaagaagccaaagaagatttagtctgtcttcgcctcgaatcattcatcattatgccgatttaaggatactgactaattccttttctcacacatttagaaacgacacgccatggaccggtcactcaattcgcgcttaacaaaaattcttgctggaaccacttttgtgccattgtcctggaaaaatatcaaagtcggggatatcatccggcttgaaaaagacgacttcatcccggctgattgcatcctgatcagctcgagtgaaccggaaggtctctgttatgtcgagacaagtaatctagatgggtgagtcccctttcctcactactattgatacgatttttgctgatgaaacatcttcatttctgttttaccttttttcgttccagagagacaaatttgaaaatcaaacaggccaatccgtctctttctagcttgaccagtccttctttggtcgcctcgatcaaagggcatgtac

SEQ ID NO: 1685 - DNA, 57870 bp, Xanthophyllomyces dendrorhous
gggcatgtactatccgaagctcccaatgcgtcactctacacctacaccggttcaatgcatctcaaccagccccttcaacatccgcccggtcggcaatcatcgacaacgattcctcttgggccggatcagatgctattgagaggagcacaattgagaaatactgcctgggtctatggtttagttgtggttggaggaaaagaaacgaaagtgatgagaaacgcaacgttcgtccccttcacctcttctatagcgatgtgtcccgaatcagcagctatggtcctcatttattgtctttctggtgacatcagtgcacctcccatcaagagaactgctgtggagaggcaggtcaataaacaaatcttctttttgttcattgctctgatcgcgctgtctctagcttctaccatcggaagtagtgtccgatcagttcgtgcttgtctccattattgtcttccgttcttcgcctctggcagcgatgtttgttgactctggtatgctttaatggtttaatggagtacagtggattttttcgagcaaacagtggtacttggctggaaactacacaggaaacaaaagtatgtgcttgccacatttggtatgttttgtcccgtttcataattagacactgactggacctcttcaatatctttacaatctcaccagtcagacaattcatcgaaggtaagacaacatgtgaattcatttgagagtagaccaacagctgatctctatatatcaatcctgaatattcagatatcctgacctttatcatcttgtacaacaatctgattccaatctcgtgagttctggtaccccgccgcctgctcgtttcattctgactaacgtctttcggtctcttctgacgaaagactcatcgtcaccatcgaagtggttcggtatcaacaagctcaactgataaactctgatctcgacatgtgagttcgagttgttgttgaaacctgtgttgaagaattcgctgtagctcatgaattatctataggtactatgcgaaaaccgatactcccgctgtgtgccgcacatcctctcttgtcgaggagctaggccagattgagtacatattttcagacaagaccggtaccttgacctgtaacgagatggaatttcaacagtgtagtattgctggagttgagtacgccgaagtcgtagaggattccaagcgaggcgaacgaggtccagatggcggctataccaatgggcaacagactttcgatgaactccgtcgtcggttggctcagcgcgatggcgaaaatgcagagatcatcaacgagttcgtcactttgttggcggtatgccacaccgtaattccagaggtcaaggacgagaaagtcatctaccaggccagcagtccggacgaagctgccttggtttctggagctgagttattaggatttcaattccacgtacgcctctttgaccttcttgcttgcacagaagaaatctgcaaagctcacctgatcctcgatatggatcatagactagaaaaccgaaatctatcttcattgatgctcttggagaaactttagagtatcaaattctcaatgtctgcgagttcaactccactcgaaagagaatgtcgaccatagttcgagaccctcgtggtcggatcaaactcttctgcaaaggtgcggatactgtgattttcgagagactctctacctcgggaacacccttcctcgatactactttgacgcatcttgaagtaagacctatttcacacgtgtcatacaaacaaccggaatgactctgtctgacatttaggtttatcatgcttaggactatgcgacggaaggtttgcgaactctctgcttggcatctcgagatatttcctctgaggaatatcgagaatggtctcagatgtatgataaagcagcatctcagattgttggccgaggagaggctttggatagtgtagctgaattgattgagagggatttgaacctgttgggagccacggccattgaggacaagcttcaagagggtgtcccggagacgatccatacccttcagcaatgcggaattaaggttaacatatcttcaaaactacaaacgtcaaccgcttctttcactgatctggttgttcaaatatgtgcaggtttgggtcttgactggagatcgacaagagactgctatcaacattggtctctcctgtcggttgattacggaatcaatggacttggtgtgtaccctatctggtctgatcagtcgtagagtcgttccggtcactaatctgaagttttatgtcgcaggtcatcatcaatgaggaaacagccatggaaactcaggaattcatcatcaaacgacttcaggctatcaagaatcagcgaagtacaggagatatggaggatctcgccttggtgattggtgagaatatgttcttcttacgaattggaatgttccgtttgaaagtaacatggcttgctcttgtacagatggaaagagcttgacgtttgccttggagaaggagatttcaaggacctttttggagctcgcaatgatgtgcaaggtgtgtccaattcttatctttgcacatataggcactgtgacttacgaagcgtctgtttgtatgcgtattgtaggcggttgtttgctgttagttgtatctacaatcaaagttatattgcatgcaacgccggctgatgccatttgtaatcttttcacaggccgcgtctcaccactccaaaaggcgcttgtagtaaagcttgtcaagacgaacacatcttccatcttacttgctatcggagacggcgccaacgacgtacccatgatccaagctgctcatatcggtgttggtatctctggtttagaagtcagttatgcttcttctgtcaaaatcaaaatcctttgagacttgcctaattgagtattacttgtcgtgcgttgaacagggtttgcaagccgctcgttcgtctgatgtggctatctcacagtttagatacctcaaaaaactcctgcttgtacatggctcttggagttatcagcgtctttccaaattgattctctgtacgttcctgtctggttgacttctaaaacacgatgcctgtttcaataactgacaagctaactcacgaatgccatttaaagtctcattctacaagaacatcgtgctttacatcacccagttctatgtgagtttaaaccttgatctttggctcaataaaattcccttgtttacatatctacctggctggatgttctgctttacagtattcgttcttcaacaacttttctggacaaattgcgtatgagggctggactctgtctttctacaacgttctcttcactttattgccacctttggtcatcggtattttcgatcagtttgtgagtgcacgaatgttggatcgataccctcaactctaccggttgggacaaagcaattatttcttctcggcaaagtctttctggatgtggatcatcaacgctatctaccacagcttggtaagccttgattctatgctagtcgtaaggtattagctaagtgttcacaacgaatgtgtttcatgatttcacttcacagctgctgtttatactctccttgcttgtcttttggggcggtttgatcgctggagatggaaaggacaacggccactgggtttggggtactacgttgtatctagctgtgctgctgacggtgcttgggaaagcagctctggtttcagagtacgcatgtccttttttgttttcttcttttattggtaatctgcgtgtggcaagctttttgacgcaaagttctgttgttccttacttccccccctttcaccagcctctggacaaaatacactcttgctggttagttcgacttgatgtagccaatatcgctgtcccgatcttaaaagttctgcttgtctgtgccttcgtccatcagctattccggggtcctttgtgttcaccatggtgttcctccctctgtacgcgcttattgcacctctaaccaacgtatcgctggattatgacggaatcgttccgagattatggggagatgggatcgtctatctttgccttcttcttttccctgtcatctgcctgagccgagactatgtgtggaagtagtaagtgaatgtttgttcatgttatgatcagaatgaaacgctaactttactatttgtaaatgtaccgtctgtgttctcaagctacgcgcgtacttacgatcctcaatcgtaccacatcgttcaagagatcgttagtcatgaccgatgtgagattacatgtcttcgtcaaaaacgctgacttttttcttcctattgaactacagcaaaaatacaacttgagcgactatcgtccaagagaagagcagtcagtccctttttctcctcgagaacttattgatccttttcctcaagctcgcgttccttttgctacttcaacagatttcaaaaggcaatcaaaaaggttcgagcgactcaacgattgcgacgaaacagagggttcgctttcagtcaatctgagggtggacctcaggatcaaactaagatgatcagagcctacgacacgactcaacaagtgagcttctcttctttctcttctccctcccgattgctcctatctttcgtctcgaaatgatgttatgaccaggtgttgacgttgatctatttcaatatcatccttgatggtatctgaaccaggctccatcggggttatgaggcatcgagatattttgtataggtggaggggatataagggtttgctcaaagttttccaagtgctatatgtctatcatctttgttttgttcttcttttcctatgcggatgtcgcaatcttctctcgacttgttcgtctcaatgaagacaaccgatgaacgtaaaaggataggcatgaggaacataaaaactgagaaggttgtaagaataagaaactgggtataaatctagaccatcagatgaaaagtacaagattggcggaacactcgtaagtgatatgaaggaatcggaatgataggacaaacaagcagagataaaaccgaaaaagaacagaggagaggagaagaaagtatggaggaagagaaaacataatgtccagagaaagttgcatggcaaaacgatttgtatatattaaatatatatgtgtgttctgtccggttaaatcaaaattgacaaaccccacaactcgtcactgtcgttgtcgagtttccttttactgtagtcgtcgtgaccgatcccgttaattttgttcccgacacgtcgcatatcgacaacgccccactgccacaaagatcgctcggaagctggcccgcaagaccagtattatccttcatagacaaactttggattgatgttgggaaggaagttggaatagtcgtcagggaattagaagacagcaggagagtgcggacagaaggaaggatagttgacagggaggagggaaggacggaaagtgaattgaaagatagatcaaggtatgcaagagatgatggaagattcgtgatttggtctccgctcaacgcttgacctgtagcgattctacaattcgcaaaagtaaatcaaatgtggaatacgatatcagaatcttggctcaacaaaatgaaaaagggactaaggcttacaaagaggtcaaattgagagctcccaaaccagtgggcaagctacccccaagtccctggttgtcgatcagagtcaaactcttgagtacaccggtttgaccaaaggcagtgttgggaattgcctggtcgagcgcggtggatgtcaaggagagagaggttaggttggagagcgcgtaaatggatgacggaagggagcccgctgtttacgtgtcgtgtcagaatttgaatggtaaattgaatatgggtcaacaatgctgtattcaaaattgaaaggcagcaaagatctctgacgtacagggaatggaggcaacagtattcccagtaatcgtcaacgtttggagagtcacgatattccccaaagagcttggaatgacagacggaacagctgggtaggtcaagtttctataagaacgaaagaaatattaaccaggacagaccacttagcaatgaaaaggacagagaaagggaacgagaagggacgaacaattgaactaatcgtccgtcctcatcacaattgactccttgccagccttcacatacagcaccatttccactcgagggaaaccaaccttgcgatcccagggctccaccaacgacatcagttgtcgccccagttgagtctctggtcgtagcttcgaagatggagcgaaggacacaccactggagggcttttcctacgcctgatgttccagtattggagacaaaatcgttcgaggcggttgataggaacggatagcaatcggagcaatatgttgtttggttcgacggaggaaaggaggagagacaggtctgaaggttgatcactggtgcggctgaggcactgggtgcggaggatgagctagaggttgaggttgaagatgaggatgaggtcgaactcggtttgacagatcctgaagaagtaagagattgcgttgagattccggtggaaggtgaagcgatagtagcagtggaggtggaagtgagggtggaaaggtatgatacggtcccggagacaacgacggatgtgattgtttggatggatgcaggtgcaacggaaagatcggaagtgctcgacttgggtttcaatagaaaatacaagagtagggcaagccctacgataaacgcgataacaatcaagacgagaacaatcttttattttgtttttgaggaaaacgaaggacaattgaggtcagtaaccgaaaaccggagttgaacaaaagagggcaagatataagcggaaagcagtaatcaccattcttcttctatcatctcctcgcttctgctttggatccctatttctttgcttgccgctcatgattccgcaggtatccatgatcgcattcgtccagctcttcttctcaactcggagaggactccactctcgaagacctacgttatgccaatccgcgttctcctcatcttcatttgacccttttctctcggtatcataatcaaccattctttgccaggcctcttggttctctctgtctttctccattcggtttagctccttgtcgacccgtttttgagctttccacatgtctctatcctgaaggatccccagatgcgtagacagcctagcaatcacagaccgaggtgtttccttatgaccttgcgccctcgttgataaggaggcaggcgtgctgagcgccgatccgtacgatctgaactgcggagattgcctttgacgaaaccgagcggcctctggtgaaggtgtgaatgataggactggcatatcatctctgggcatggactgaagtttgtgaatcaatgtgaaatccaacgggggtggtcttgagctgaggttcgtagcagatggcgaacgttcgttccgaggcgtcgagagagattgatgggagttttccggccgaagaaaagagggcagactggggacaggagggagttcatctacacagccagcagcacagggagtctccggatatacagatacaggagagtatgttgtggttatcgtggtagtgacacttgaagtggactgtctcgagtgatcgttcgtaccatacgaggggatcagctgaggacttccgatgattggtctcaccctagaaggcatagcgaatattcgaaatgagaaagaggaaagagtttgatgaacaagaatgacgaggttggttcaagcctcttcctttggtcagtcttcgacaaatatacacaacaggaagagagagaagacgaaaaggtgaggaaagataaaagaagaagaaagcaaaggtgggttagaataaaagaatcattcatccagaacaacgattgagatgtgagtgtttatcaagcgagaaccaaagggatctcatcaggtcagcttcagctggatccccatcaaagggattccattcaaaacaggcaaagaaacaaagtcggatggaaggtgagaacaaaagaaacgaaagaaaggcgagaaccgaacaaaaggttgttgtaccccgtgtttcagatcttacaaggctgtgtagtctcacgtgatcgttcacacactctcgtaaccaccttctatctcgtatgctcaggatcagcttgagtctcatcccatcagcatctatcgggcttcctcaactgccattcacttgtcttcgttatgtctgtttcaatccccatccttgtaagtgctgcagcttggatattcttgggctttgatcggcttacttggaggctgatggctagttttgtaacttgtcgatgtatcgataaatcgttgtctcactctcttctttcatcttgttcaggacaagtccgacccgaaggagaacatcgcagctgtccctttccatatgccccagcaggatcctttttggactggctcaccagattatctctcaacactggctatgtctatggctggaggagctatgttcgtatatcgtcatgtgttcttcttctttctcgtcggataatgtggtgttgttgcaagcgattccctcgactaacaatcgtggctcaccatcctttcctcattcttgctgtaggttcaccaagaaccggtacttcgcctggccagccttcttcttgtcctccactgcatacctcaatgcgacacctcttcgagcgaccgaaacttcctctggtagctcacttcaaggattagggtacggtttcatctattcttgctcttctgctcctgctttaatctattggccgtctgttgtataactagaattctacttcagaaatcacacaatctgacaatcatcctccttttgttcctttttcaatgttgtttcgccgttgaccgaccttcagatttgcaattgtcggtctcctttcggtctaccttcccactcttgtccttctccccgatggaccatccaaagctcctgctgtttagatacgccaaagaacgtgaaagaccaggcacagtgtcggatttatcacaaaaaaaaaggatcgttcatctacccatttctgtttctttcaataccttctccagttcttttcctcgttaccctctccgttctcctttcggctttcgggttgtacgcatatatcttctttaatcaaatccatgacaatttggaactagttttttgcacgctcgctcgcatctctcatgaaccttccgacctgaggcaaaaccagtcatttcatctctcgagagaaaactttcctcaactctggaagctcgatcagaaatctaacatggatccagcaaagaacaacagccaaaaaagaaaatcgaactagaagagaacgtagagcaaagttaagacaacagatgcgctgaagaaaataaatatatcatcccaaagatgagaaagaaggaaaagatcaaatcggaagaaaaggggtgaatgaaagctgaagagaaagaatacaggaagagtttttccatcacgcaacgatactcaacctatattaaacctcctcaaacccatcctcctcgtccccgtgtccgtacatgttgaaagatctaaactcgtcttcctccccccctcctgcgccgtccgaagccagctgcgtttttcttttcactcgggcatgatcgtctcctccatctgattcatcgtctgatacatcaggtcggattcgttttgggccgttttgtttctgtgagaaaaaaaggaataagtacgataagaatagggaaaggggaacagaagagaagacagatggaaaaagggaacgtacaggatcgtctacttcttcgaagacggattcaaagacaatatctccaggctctagatgaccacggagagttaaccaatagagtttatcaatccgaacttatgttgctcgcaaacaaaaaggaaagaaaaacaaattagaaacaaagcttacggtctgtcttgtccacttcatacaccttcccgccatcgttcacacccagaacggcctcgatctccatcggctgctcactctctctcaactgtcgttcactcattcgctgagggagatcttcattatcaaatagcgcatcgaaagctttgtaattgatctttcgagaaaactttcgttgtacaaggttcttggcagagtcggcggctgtcgcacctcgttccgatccaggaattttctttttccgaggctagaataagatgagggaaacaagatgaggtttggtgcaaaataacaggattgatagctcaaccgagacgcaaaaagaggtaccaactttgcgaactgtagaaccggccgcatcggtgagtactttggattctttcactgatcgagacagaattcatcaatagaatcaaatcagttaaaaagaacgcgttgtgcaaataaagtgctttaaaaaaggcatcgaaacagattgaactcacgagctaacttctccagataatctttgttgaattcaacccaaagtctagtcttgatcgttgcttcttcgtctgtcagaatgaactgatcaagctcgtcatcatccaatccatctaaatcaagctctccactctcggcggctcgtcgttcggccgcttttcgctcgctctcattcaattcggttgtcagttgaatgccctggttagaatccaaataggatgtcacctcatgcgcaatgatcgggtcgaacgtttcgtctgtcttatcgaatccgccgatggacgagcctggagtcgagggtatgtcctccccgcctggagtccaagggtcatccgtcttgttagaatccagagggagagactctagatgtgtgaatgatggagcgggagaaggggatgggtagttagatagtgaagggaggaactgggatgttgccgaaggtgtctcgctagattgccggctaaatgaggaaggcacaggggtgacacttgatcgacccccgcgttcaccttcggccacacctttaccttttccactgccattactgctatggccggcaccgtttgttgtcagaggaggaggcatcagagaagtttctctgattaatctcttatcgtcactgtctccgaactcgctcccatcttcagtctctccatcggccgacagtagatgagccttcttctttttcaacccttttgtatacgccggtggatctgcgccttcctccagccaagtcgtccggaacgcctcaatcgtcagctctgaggaagctgtgccctgaaactcttcaagccgtttccggagtgttgtatctgcaatcttcacgacttgaactatttcctccacacttcgtctaaaattattcattcgcgcggccaacagaagacaagcaccacaaatcccggccggtcgtcgaccagtatccatccagtctcgtttgaaccgttggaccagacggacagcatcggtcgcgactttctgagtttcatctccgaactcaaggagggaagcgaatcgtgaaatgtagagtgagggatccataaccggcagatgcaaattgagagccttgaccaatcgaagatagacggcacctgagaacgtgaaacaagtccaaacttgtctttagcgtcggacccatgactcagataaactcgccttcattctaccaagttcttacctaggttgaagacgttgacctaatatcgagaagaatagaataggttgaacgtcagaagagcaaacgtgaaccaagtatgggaaaatgcaggtgaaaacaagtgcgcacctggaggagatcgctgaaatcgatgagcatatgatgcgtcttttgcattcgacaggtcacatacagacaacaagccacaacatgtcctgtctttcggcctttggtaaagttggtcgacacggctaggttgaaccaccggatggcagcgtctgaaattcgttcggacagcttgagaccttgggcaacctgtttgattcgaatccggcctgaattgagagggagaaaacacgtgagcacgattgccggaaagagcgaggaggtgaataatcagagaaagggtaggagcaacggatggggaacctttactgaccattgtagagcgtattctctctagactcttgagagcctcctccgcgttgaccgccaggcccttggactcgtgctcgaactgatgggagaacgagaggagaaacgtcaagtcaacaatcggagctcatcatacttgtttattgagatcagctgtttcagatcaggctagaaaaatcagaatagaaatgcacgaaccagcgtcggctcccacgtaactaccctgaaggacggcagctcccgagctagattctccgaatgtgacctcggacacaatcgtgttctcttcgaggacgataccacatcctgcacaataagtttgaccctgtgcttggtcgatctcgaccacggtggacagacaagcagcgcactttggctaaagagagacaacgagagagggcaaagaaagaatcgcgtcggtacggcgtggattgccagagaaaggagacttgcaacagatgcctatagcgaataggagaatgctcaccatatctgctaatacaaatgtctgtgtatatatgtgaaagcgttgctctttcttctcttcttatatagaaagaacctagggatgtatgtgtgctcactagcaagagcggatgagggttgagaggagagaagagaaagagaagaacagtaccaagccgtgcgaattgtaaatgtggcgtgtctcattacaaaagagactacagaaacgtgtagctaatttgacagtaatcttcagagtcacgtgattacattctagcacagcctcaaccctatccttgcctcgccttacatctcgctctttgatctgctcattgcgtcgcttcttccatctactacaaacaccagcatcgatctacaacactcatggcatctgtcttcacagccggcttggttcaagccaaggcaactgtgtctaccggcgaggtagatgatacgcagctggtgtcaaaggccgaacaggcagcttccatagctccaggtcggacttcgcacctcgagacgacatcatcagagcaacaacaatcacacctgccgtcaaacgaagaagtgggtccttatcaaattctgcttgagattcgtgtatcaacatgtctgtctgaccataactcgagtataacagatctccatccattcagcagcccaaagaggcgacgttcagaccatggaccggcttgtcaaatccggtaaagctagtgtgaatgagcgagacgaccaaaacgtcacttcattacattgggcagcgtgcgtacaattgtgctatcatgaaaaattcaattagccgaaatcttaagccactaactggttgcgtttttccctcctctcaggatcaacgcacaggtaaatccacttgcatcgtgttcatatcgagtatcaaacgcgagagcaagcgctgatcaggtctttctatatagcttggagtgtgtagatacttactcgaaaatggagcggatgttgacccgataggcggagatttactggctacccctctccagtgggctgcccggtatgttatcactattcagtgcaaaactgtgacacgggagactaattattataaaccctctctcattgttcatcatcatattgctggtagaaacggacatctttatgttctccacctgctaatttcttacggagcggatcccgcgctttcagattcccaaggatttaatacacttcacctcgtcacccattcaagcatggtcggttgtatcatctctatcacaagccagggcacctgacaaattactcattcttgttcgagcacatcgttcgatacaggtcatgccgcttcttttcattttacatcagccgttggcagttgatgccaaagattctgatggacacaccgcgctaatgtgggccgcttatcaaggtatgccttcatcgcgcgtcaattagagatacttgtcctcgtttctgtttcatgtatatgtgtgtgtatttttggaagcatctctcaagatcatctccctctcgcgtcttcttatttttacaggcgatgcaatttcagtcgatcttcttctccggcattccgcctctccgttaaccaaagacaacaacgggctgagcccacttcactgggccgtagtcaagggtaacaaagtgtgtataaaacgattggtagaggcgggcgctgatgtggacgcgaaggatgagcaggggaaaacgccgagagacatggcggttgagttgaaaagtataggcgcatggaaggtgggattggaagaggcaggtagagaggagagtggaatcttgaagcaaaagagatttagtctggttggtagctttatctttcgtcgtcaatcgcgtcgttggctttcatacctaacacacttgtgctatttcattgatggtcgcaaactgtagcgcactacacggatagtcatcttcctccttcctctattgtttttctggttgatagctggcacggtttcgatatcgccctggtatctcggcttcccgttgtcaatagcagagttctactcgatgcactacgtacgtaaaaatctctcttcgcccatgagcttacaccgttatgctgtgactccgtttctcggattgaactatcaatgttgattgagtgtttcgctttgaaactttagttgatcaccaaaacagtattagactaccgaggatttggagactcattagccaaatcgccctactttgcttcaataagtaagtcgttctcaacgagttaatgcgcggtttgccatcaagtattgatcatacgatatccatctaaagtcacgagtagcatattctatgttggacaatgctgggtgtcgaggatagtgactggtacgatgaccttgtaccctctctgatccgtggaattctttcatatcaacatgcttcttgtacagcgcgatcactgaacaatttcttctcgttcttgactgtcttcttaaataggtgtcccgggtcacgagattcttaatctcctcttctttgtggcatacattctttgcgcgtacaacttctaccgggcaattagtttagacccgggaaccacgccccaactagaaagtgatgcggagattaaggaggtccgtctggattgatttcccgtcgtctccagaattgttgtttgttgcttgaataactgccgctgaatgctgatgtgacataactttcttctggttggacctctctattgatcaggttgtcgaggaattgactaatcaaggcaaatttaacggaaccaacttttgcataatctgcatggtatgctctgtcaattttcattgttgcgttccacgtcaatacgaggttgatctggcattaagcacggctgacagaattccatcactctgcatacttaggcacgcaagccactccgatcgaaacacgatcgaatcacagatcgatgtatagccagatttgaccagtcagtccttcctttactcgtccttttcttcctgactgaatcttcagctatttgattaacttttattgcactcacggctgttgaaccttactgaaaatgtagttactgcccttggatttggaatgctggttagtctgtgacattaacacttggccatgaagccagaatccttagtctaaccgactttcttcgttttcaatctaccgttctagttggatcgaacaaccaccggcaattcttgctgtttgtaatctttctcgtatgcggaatctcgtctttcatcttgttgtctttctactgtatgttcccaatacttttaacctcccacgtctctaagatggtcatctcctcaaaattttggtttgaaacttgaatgacgatcagacttcatggagaattctccgacctggacacccgagaccggtgctccttgtgtccttccttccgtgctttgcaccgccactggatatgattcctaccttgccctcgttaccttttgggcgatgctacaactgtcgtggacgattatcctccttgtctcgcaagtctggcaagtctcgaggcaaatgacaacacttgaggtaacaaacctaggcaggtacggtttcatgggcggtcgaggcggcagttcgctgcgagatcaaagtggagctgtaggcgttggattagggggtaggacgggcggaccagaaggattaggtggacctggagatcttggaatgggaatcgatcctacaggagttgatgaacccacggtttcaggtgaagagacaggagatgggtcaacactccctcatgttcatgcccatgcacacgggcacgcgcatgggcatcggcatggtatcctaggctgtatgggaggaggctggaggttcatgctccagattttaggtctggataggttcactaagggaaaagcggcgaaaggattaaggatggcaggcagggacgctaacccattcgaccagggaatcataggggtttgtctccattctctcggtcgaacatactcttttttccttccgaactcatacccatttatatttttatattctgcttcgtccaccgtgtacctaccttcggtctgttctttgataatgataaacaacaataaaaaatcaaacagaactgcatggatttctggacagtcggagggacgctaggagttgattacagacaattatatgatattccgcttggaggattttcttcgtgagcgcttcatcattcaaaaaagtctgactgccgtgacactgtcaaactaatgtcatgcaattttcgatatcagacaaagacaaagacaacaaagttatattcagatgattcttcctaatctaggtggatcaacaagtggagaatctagtcaacgacctgggtacgaacttgtcaggtccagcgaggaagtttgagtttgagtcttgagaggtgttccgatgtcttcttgttcatctcatttgaggtgggcgaccgaatagataaatgtgatttctcatcattcgtgatttctgaacacatcgtcttgctccagaaaggcatgaatgtctctttctcaacattcctcttttctttccttgtatgacgcgtagtttgttcagatatctacgaaagacgaactacacgggtattatcctcccggctacctgcaaggaggatgaacatatacatatatagttttatttcagtagccagagagaaggtctagaatgagcttgtaagaagtcgttggcacgagcgcatgcttgaatgcatatgtacgactacagatgcggatatgtgtgtttgttcgagtacgtgtttctgaaggctatacatctacatgcgcgctcgaaagtgggaacacagcagaggagaacgaagaaggatcaaagatgtttctttgcagaggcacgtactttcccatcaaatactgggttgtcgatcgtcgtgttcgatgtatggaacgggttcaatacgatctgtttcggatattgttcggaaggagaaaatcacataaatcagttcttgatcatcctcgtttgttcatcaagtacaagtctagaggaagaatataccttcacgtaagcctcccagacttcaagaaagaacaatctaataccttcatcgttcttttgctcgtgaagaaggataaatttgactagaaggtgcgatgcaatcataagtttagtacatacagatggagtgcaagctgagaacgtactgtttggtgctacaaaagcagaaacggtccattcattatatcgatcgatattcttgtaatacctttgtgggtcaattcaaaaatatggtaaagaatggaacaagcaagatagaagacttgtcaaaatctaccttttctataactcctttcttgaaaggctttgagataatgtacgaacatgcttcctccacccatcgcgttctcaatcaggtccaaactactgtgcgcaaccatttgcctgagatgaccatcgtcatacccaccctgaccagtgcccatctttctgccaagctccttaacaccagcaagactagcggcattggcaccaaaaggagaagtaatgggagagacagtagatgcttgagaggaccatgaggggaatgccgaagaggatggcaaggatgaagtagatgaattagtggacgaggttgggagaggtgaagatcggtttgatggaaaggtatgctccgagaggggattgtcaagtggtctaacgtcgagagaagattaaaaggtttggtttctaatactttcctgaatctcaaaacaactacacggtgaacgcttacccgacgaggacaagataggatgccatgactgcagattgatagttgaagactgatggatggaaggtacttatcatgttgtcggtcgagatggagaagtcaaggcagaaacaaagttagggttgcatatcacgtgagcgctggaaatacacctctttcaacattgacctcaagatcgaaagtacgaaggacatgaaaagacttcggacggtcgtctataggccgatcaaagaatacatggtttcccttggacactgatgaccaccgatctttcttcggatcgctcatatcttcattgtccttcaataccctcttgttcaacaaatagatgcgtccaagtgctttcttcattgagacttagatacgccactacacattgatcaatctcatttcgattctaaattatactcgtattttactcatcttctcttctcctttttatgcagactattcacaaggctggctcggaggattgctctcagattattttcaagaagccctttcacgattttgattcagtgtttgttctcatctttcattctgtttctctaaatgggaacaattgaatacctatactttccaaaagtcttggtgacttctcaaagtttacaagggctggaaggcatagtcctacatcgactgagtcgaaattatatatacgaatcttccgggagtatcatgcactgttcatagatctttcttacttgaagggatcgaactgagcgtaagctttcttgaaagcaactgcatctgccttttcctcagcatccgtctgagcacatgctttccagtctactcggtgtggaatctccaagagttttgcaagaacagttctgtatgatacataagtttagaaagaatattatttcagagtttggattggcgcaaaagcgatcaaaatgatgacatatagagaaaaatgcaggaaaagaaacgtaccggccaaactgtagattgaatccggtcccacgtatcaaatgaatgagttttccgtttgggaaatctaccctgaaatagctgtctctaccgcccgtcccgatagagttcaaggcgacatcggcgtcggactcaaaattgattcctagcttagctccttcttctctaaagacagattcgatctgtgaaacggctgtcaacggtaccgggacgatttgcagatgggcgtgccctccccttccgctgttgtatatcaaagcacaaattgacgatcagcaaccgctaacaaacaggttttctagatgtcaaaaagatggatatctccagacctaccccgatcgaccgacttcgaatacaactggcacagaattgtagaccttgtaacattttgcaagggccgccttggttttttcgatctccgactcgatcccaacagcatcctccttggggatggataacactgtaggataatgcgatatcggaataatctatcaaaacattctcatacaggtgagtccagcatcagagaatggcgacaaagtcgattcaggaagacggcgctagcaaattaaaagacaacttacaagaacgtggccacctccaggaactaggccaggctgttcagacccagcaggcatctcgggcaaaccagtgaccttgttttggaccatttttgtagcggatgccgtaggagggagctggcctttaggaagggtgacgtaagtttccgtgccgatggagacaatgaggtgttttctggagtcagatttgaaaagatgatcagtctcaatcttctctctctgataaagaggtaagtccactcacgttactttaggattactcaaacagactgtgaaaagtagaaatacaccaaatggaaaggaacacatgtcaattcgctatcaacgctcatgcagaagacaccgaatggaaaaggactcacaccagcactccgcgggactaagctcaggtcgcttaggaattcctgtgacagcaccactgttctgccgatcagcgctagaatcagagttgtttgtcttctgaggacagtcgcgaatgtagtgctattggtcacaatcgggataaaacaaataagaagtgtgatcagtcaacattccctttcacatggaatatattgtagacaaactcaccccaggcaacttgcatattcggcagacgtaattagcaggggggccatctgtaagagaaattcgacaggggatgttatcgatcttgtgtacttcatgtcaatttttataattcatactaacctccctgggtaacttgcttctcagcgttatgcgcgtcttttcgagggcaagcttgaatccaatgctgatataaagagtatgcgtttttagtgaatggattacatatgaaaaccaaacgaatgaaaggactcactccaggctcgttacagattctacatgtatagctaggcggaggaggaccctctgttcaaaatagagacaaaatcgatcagtatcatcacctaatcaattcgacgcctgcttcctgtatgatactttgtaacactaacctccgcgagctttctttccgcccggtccagactgtccccagatgaagttttcacccccttcaggtgcctctcttttcgtcccgcgtccagtagaagaaggtggtagcgcgaacgggttgggcgtcgcattggccggtttcacagggaaaggaggagccaaaggagctaacgaaaacgcgtagaaagactacatatcgaatgatagagtaagagttaaacatgtaattgtgagaacaaacatccggtacgaattgaacaggagaagaaagaacgtactctagcctttttctgtccgtcaagaggaggaggacccccaaaccttcccatcctgatacatctcgtatatctcccttctgagccagctccatcccacccgaacggctccctctcccagaatccgtcctctccatctctcccgcccatgaaaaacacatatctcggcttggctcttcggatgatttctactaacggtgtagctccttgcccgacattaaattccaacccgttgaacgagggtgagaggagagaaagtgatggtggaggagtttggaggagcaggatatccaatccggttggaacgatagctttttgagaagcaagtgttaagtttgaaccagtcaaggctgacggagcattggcctcgggaaagatgtgaggagaggccagaacaggagcaaggagggaaggagtgagattaactgtgctggtaggtgtaggctcagctgcttctgactcagctgcttcggacgaggagttggtcgcggcatcccaaagaacaggatcatagtttccaccgatagctccaatctttatcccttcagacgtattcaacacgttactctggcctttcagaaacccgaagcaatcaaaagtatcctcatcaaccctactatctttttgctaatcatctgaagaatcgaagggctcaccgacgaagaacaaattagtacatatctctcctcctgtttctataatcttcgcctgaaccttctcaggcagagcgtgtgaccccaacatgatgtatgttgtcaaagggactaccgatgttcaaaacttgtgtcagcttactatcaagcctggcttgtctgatttacgcgtcgattaagcaaggaaggatctcaaacacatatttcagtgatatgtaactcgcttaccgttcaggcttcctcttagaaggtcatccacctcatcagggttttctccttccgggccgaaaaagtcacctacgcacacacatagattaaaatggtgtttcgactggagagctcgttgcttctcgatgaaagctcgaagagatcctaaggctggaccaagggctagtctggaaaagggggggggacaaggcatgcacacaacatcagcttagataaaaaacatgttctttgaacaagacagaaatttgctgacatcttgttggacatcttggtgaacagacacgatctcgagatgattgatatgaaagaaagcagccagacaagtatcaatgagattttatgattagcccccgatctgcccaaacatcaaggctaatctggggtcaatctggggtcatcacaaagtccaacagctcatttcttacttgtttttgttaaggattaggtgatatgaaacaagccacttttataaaaaaaaatacaaggtcagagagacagagatgggaagagaaaacacaaagatattgaaggagactgggagatcgaggaaggacttgagtaaaagtaacaggagaaaactacagatgatgaagagaaaaccgtaacgagaacgctgtcaacagattcgttatatgaaaagctgagaaaaggaagcttgagaataggacgggcagaagagaacaacacatggaaggagaagtaacgatgagagaaaaagtaaaacaactagaaaagtagccagacgcgtaaagaagtagatgggcacatatagctatgatactaaaaaaacgcgatgcaagcaggttacttcttcgcgtatggattgacagcgtacaccttgataacggggggcgatttctcaatgtcggcagtaacaatgacctgcaagtgatagacaaagcccatatcagtatgggggttttgtccatgaaatcatcctccttggaaaaaacttactggaacggtcatcagctctttaatctcctgaatgtggtgctttccatccgacgacgttcgaagacctttgaacacaggtgcgtcttgggctaccgactttgattgttgaatggagtctgtgattgaaaatttcttatccttggcaacggactcctcagatgcttccgcttcatctttcggtacgttcttctcttcgtcgattttgccggaggactcgatctcggcttgagcatagtgatcaccaaacttcttgactttgttaaggtgctcgtcgtcgtcacctttgaacgatacaacaaacatggtatcatactgttagaattgagaaagcaatcaacatcaaatgaaagaaaactcacgttcagcgagatacgaaataacatcacctaaaattaagaaagcagtgataaagttaactagggccagaatgaagaaccaaaaaaggatgtataactcacgctcgctccagtacaactgtagggaagagttgtgttcttcgtacacgatattctgtaagagtagatgcatataaacatcacaatcagtggtgccattcaaacgcaagggattatgtcaaggaaaatatctacctcaagcggcatttggtcggcatgcactcgtttctcaattccaaactcagggatgaccacctgcaaagggaacgatgtcaggattatatgcttgacaagctacacttttgaatatatactactcacatcaaaggcttgatcaagaacattgacaacattagcgaacctaatgacaggaccatatcggatggtgagatcctgcaagaataagaactgagatcaggtttgaaagaacattgcgatccagaaaaaaagattggcacgaacgttgataagaagacatagataaagatgagtggactgctcttgggcgagctgagcggattccttcttcatgttacagttctgagccatcttggccacagtatctcggtccatttggaacttgctttcaatagctggaaaaaaccaaaaagacaacaacgacgtcagtatccaaaattcatatgaaatgcgctcgacagactcacgtccgtcctccaaacaggctgcaagctgccgatgagcaacgatgtcgacgtatcgtctacacgagccaatgatgataccaaactatttagtgcaaatcgaagcgatatgggagtgcaaatactttcttaccgaatgggactcgtctattggtggtataagcatgacgttcagtcagtgaagatcatcgaaagacataaaagaagcgagactgatgcgttcttacaaaatgggtatagagaggaacactcagcgcataatgagcgtactagaaagagaatatagaaacagaaacatgtatttagaacgagtttataacagatagtaagacgaggatggaacactcaccttagcgatatcgagcatacctacgatgagtttcactaaatttcagcacagatatcataacgacccataacgtcttgaaaagactgaccagaacagaaatatctagctttttgcatggcttttctagacatgagctccaaaagcttcttgatgttctcgtccttgatgtccaagaacgatctctcaagcgcaccactgctagtgacatctagctcgattccgaaacgcttggcccgtttagcgagaccttctagacgtctggcgagaggaatctcgtgccgacgaagaatggcctgctcagggaagtttgccgcaatcatggtagccaccgttgtgttggcgagaatcataaactagttggttgaaccatgtcagtcaacaatccaatcacgttatataacgatgtttccgacacaaatatatgtcacaaagcgaaacgacctacttcctgaacaagagagttggactctcgctgtgtgtacactgaacaatcaacaggcttgccatcatcatcaagcttgaaagtgagcttgagactgtttattccaagcgctccgttctttattcgtctatccaaaagcttcttggcgagattctaagaatgtaagagatataagatatgaggctcatgacgtgaaagcaagacaaacgtgtcgtttttgtacgtacttgcatgtttcggatgtctgtttcgatatcctcggccttgtgtccttctgaaatctctgcttcttccaaagattgctgctcgataaccctctgtgcctgcccataagaaagctttgcacatgatcttgaaagagagaatatatatcatcaaggtcagatgatattgacgttcaagaaaaacatcaaatggtaaacgtactttatgattgatttggcaaagctcgtcttgatgacacgtgcatcagaagtcatggtaaagaatgcggagaaagctagccgttcgacgccaggcaccaaactgcagagctcttccgagagaacaggcggaagcataggaactgctcgctgaacgaggtatacactagttgcacgttttcgtgcgtcacctatatatcaagatacctcacgtcaattatcgatcatactttcgggtaaaaacaaagagaagaaacttacgatcaagtgcagtgttgggtttgacctacatacaacgcgaacagaaccgcatctcagtacaaaagcaaccggatcaaatagagaaaagcgttggaactaacaaagtgtccaacgtcagcaatgtgaactccaacttcaaaggtgccgtcctcattagtcgagatggacagcgcgtcatctagatccttggccgtatcctaatgattattgatagggggagacaaagatgaatggtctgtgacaacatcgaactgtggacgataagacgtacaggatcaatcgtgaagatcctagactctcgaagatcttttcggacctcatattctctctcagggatagtctagacaggaggcgcgaacgtagtcagccatacctgtacagtgaatagaagcattgcgcagaaacttacccagggaagagggggaaggcacttgagaacgctctcggtgaaatcttctgttgggaaactatgtgaaagcaagaaacatttgacgaaactaagtataatgtttgatcagatcgaaaatcgtcaaattcatacgtacttgcagtccttgagcaatgcagaggtttccacttcaacctcgccaataggaccgatttcttccacaagggtaccaaagggatgaagagaactaaatgcatcatgtgagcccccatcaaatgcgatgtcaggatgagacgtgatttttatcaaagcagggatgaaaggagattgagaaaggaaagagaaaaaaagggggggggacgcacgtgataggccatctcttgatgcaagcacagaagaggacattagcataagcttcggatcgctccaagaagtcggtaggggcttgctcagtcggaatcgcgatcaacggtactcgcttgtcggtgggctatggacgttccaaatgagtatcaactcagattagtcaagagtcgagaagtgcgggtcgagtcacaaggccaatgtaggtcatgaaccaaacgaaccttgaaccaaacgattttgggccgttcggctgctcgaggctcggaccgagctccaggtccctcccgctctcgtcgctcggcctcttgcttctccttagtagcagcagaagatggccgaagcagaccgagagtaccagagaataattgaccaggcattctctccacaacggcaacgacatgcccggcatattctaattaatcaaaaagattgataagaataaacatggtcgaaaaaattgaatgaaagaacaggagatccttacggggtttgatatcatccgtgacctcctcgtcttcgaagagcatcaatccttgtccctgttataatacgaataacagaattagcggttgtatccagaaatatacatgattctagactccgcaaaccgtacctctacctcaacatcgtccttcttcttctctgtctttcgctgagccgcttgcgaatttccccgtatgtcattgtagacagaattctcctccttctttcgcttcttgtcctctttctcttttttcgaggcccagacctcgtcgacctgagatgagatacaacaatcagtcaacgtagctaagcatacacagccgaatacagtggttgttcagaaaaatagctcacatcaagaagctcgacagcaacggtgtctccatcaagagctcggtttcgatctcgggacccagagatctaaacgcagaacggacgaaacatattgtaaacaagagaaccgaactgcgtgcgtcttatgaaaaacacgagcttacgtaaatgtcggcgtccaaaacctcagtagcaatataggcgtcagatcgattctattgagaagaatatgaaacgagttcaaaatcttgactcttttatatatgtaaggtaagttggtaaaataagaatgaaaacaacgaacacgcttattgactcggagaatgccgataaccagcttgccagcggcaagaagaggaggcagggacgcagcgggcaggtagggagaaaacagcgactttctctgtggctgttgagcttgttgttgaatttgtagctattgtaaggaaagaagggtagacccatgtcacagtcagctaacagaagaccgaagaagataaatgaccatctcgctctcacttggaaggcctgcatctgctgaggaatgttgaagtaaggagtattgtttgcatacaacatgttaggaagcatgttaggcaaagcaaatgaagccatcttggaatgtccacctccggcagcagctcgaaaggaagcgatggactgaagttgggcttgtgcttgagcaagatccccacttatggcattaccttgctgaacagagccaacgcctccatctaagttttgagagagggagcacatgtttagtaaacaaaaggaccgttaagcaactagaagtcttaaagaagttatatagaggagggagagaaaacgaaacacgcactgatcctccagcttccgtccaatgttctgctattctgtcttgagtgggtccccccaccagcaccggccccagcattcccgaaagatgtgggatttccaaacgcgttgaacgtgttctctgcccagtcggctggtccagagaaactcggttgggaagctttgtggctcatgccggcagattgtcttcgtgcatgcacaatcgggttaccagatgcagacgaatcgccaaggccaaaacctccaccgctcataggtccagcaaacgaggctcgcgactgatggcgagatggaattgactgttgttgttgttgctgttgctggccgggttgagctccgaactgactgagactattttggaactgattagatcggctgataccggagagatctccaaaagtattagaggttgaagtcggcgcaaccgactggattcgtctgtgccgatggagatcgccggatgattgagcaaaggccaagggcatcaccgggacggactgatagccgctttgctgttgggactgcataagaagctctcgctgttgtcgcttgagttcatcaatctgttgttgaagctgatattgagcggcgagagcgggcgtcatctcgctaccggttctccgatgagcgctagcggccaaggagagtagcgcgctcatgccgggattaacattaggcgtcgctgcttgctgaccgagcccagaaaagatggggttggaatgaaagtcgtcttcactgccgaatccaatggaagacatctcctgaggtcgaggcttggctccgaacgtaaaggtgggagctagaacgggccggccattggcattgacagtttcctgtggttcgttcgcagccgcaagcgcagcaaatcgaggggcaatataatttccaggagcaaacctagactgagcttggagttgttgttgagcctgttgctgctgctgttgaacttgttgctgttgttgctggtaaaattgttgctgttgctgttgaatttgagcagcgagagtgcgagggttggcgttggaaacaggaacgggcagaggagcaaatgcatcatgatcttccgaaagttgctccaaagtttggcgagaaggttgaaaagcaggagcattagggttagggaccttggaaggaacatatgttcctggggagacgatgggtaccgcagccgatctcggggatttttccataacatttccacctcgagacgaagttgccactttgagtgcaggtgacccctcgacaggcggcgaggttgcggtggagagtgcactgttgttaatcggaggaattgatctgagatcggtgatcattctctgaagcgagttcatggcgtctccactctggccttggtcggaggaagccgagttagagcttgatcgactaagtttgggagccggaatagagacagacgacctgtgctgacgatttccgtggccagaggatggagcctcaggagctggaggcttagtgccggctgaagatgaatacgatcttccagacacccggccattggatggagctccagcagtggaagaagatccggtgcctgacaaggcgttagaatgtcgtcgtccgttgtttgtggatcggttgcctgttccggaaagaggaggaggcggaattgtcgagggcggtatgttctctcgtttaccgctagtcggtttcagtcggttagatgaggtggaagtggtgcgctgtttggatcgagcgggggccgaggtactggccttggtgggtttctcactctcagtgatgttggaagggggtgtgggtgccagtttagcggcctgtcgtggttgatcagcagacatcatcaactggactgtatgaagataatcgagaaaattcaagaatgatgatatgttcggaagaaacaaatcagatcatggtggacgaaacgtttgaaagatgagacatttaggtcagtggcggatctgatatcccttgagatcaagagtattatgcttacaagtggatgagatcaaagcaaaaggtgaaagggagatagacaggagggtgtaaggccggaagtaagacaactgagttcaagaacggatagtcgtgagatgaagggtgtgtggggacctatagggtgagcagagtatgatgaaaggggggagtgcagggtcagcacatgggatgtataccttggcagcatacaacaagtaaggtggtaaatgtccacatgaaagccctgcccggccgctatcaatgcggctgaagaaatcgctcccttcttttttctctattctttctccttccaaaaactgtatgtgtacggacccaggcacatactggccaggcacagagaaagctgacaatttggcatgccccttctgagcaagacacatctcctcatacaaaacggtttgtcaaacagatgcacgtacgttgcacaggatatcaatagaccgagtgattgaaagtgttgttcaagtctagagtcggcaaaaaaaggaagatgacaaggaacaagcaaactcagtcacttcgtttggcttttcgaaagatcacgattgctgagaaggttgtcaaggtggaggtcgttgagaacagagcgagcccttgagctacgagcggtcaaagagtagatgatgattcttctcgatatagaagacagaggaaaaggaggagaataagagaagaaaaagactgggttgacaggtatccgtcgagaaggtccaagcgtcagaactgcggccatcgcatctccgacttcacctttgttggcaatgtgtattcgagcaaagatcggatagttgacagcaaggatggtgaaagataggagtgtacgcacttgtgagatagttcgtcgatttgcagaggaagaaaatcaagaatcagacaaggaagaaagattgctgtatttgggatgcaaagtcgagaggtcgagagattgaagaatcaaagaaggacgaagttgatggtcgatcgacgagtgtgggtttggtattgctgtgatcttttttgtgtttttttttggtcgtttcttcagtcggtttgatatttgactcaaggaaggtaaggattactctttcctcctatccttgaagatcgaaaggaatgatcgatgttactggtcgagagaaactgagggaagtagaaggactgaaggaatctcttatcccttgctacatacacactgaattaatcagcgctcaacacgcagtctttttgtttccttccaaccccaagcggtgcatccgtttgatctatttcacactctgagtccaggtgtatgcgtgcttgtatatcctggactgcgagagtggtctctgtgcgtgctttttaaacctcagtcagtttcgttcgatgaaaccagcggccgtgggcaatacgagacaaagcaagtgaggaatgtatggtcccttttgcttctcttctttgctcttctccagtttcactgctcaaagtacttttgacccttcatactctctttctaaacacatataccctcctttcctctcctcatcctcttacttggatccatttctgtttctcttcttgttactatgagaccattgagaggaaataaaagggcagcatattgtgtctctctcttcttgtagagcatcatcgaaatgacaatcaactgacaaaaaaaagaaaacaaaacaaaaaacatatagaaaaaaaagagaagacaacaaccaccacccgtcctgtgctacatctcgacccaagcgatcttcccaatcactttcccttttgttctcattcttccttgattgcctagacaccagacatgcaatcgattaaatgtgagccttaatacgtttctaccccaaatctgccagttacgattcactagaaatacgacatctcaccatctgtatcttcaaacgtgtcgtgaaacttaggtgtaagcgagtcgtctttcaccagttgatctcttatgtcgtattatccagctctctatctgacactcggtcttctgaatatgaattatcgccacatatattcaggtcgttgtcggtgacggagctgtaggcaaagtaagtcttcttttccaactttcagataatctgtctcggaacaagtagagagaagagagaaaaggcaaaacaaagggggcgagcctactcaatcatacacgtcgttaggaactgaactgattcgttctgttcgtctgcatggtgtttgactgtgctcagacttgtcttctgatttcctacaccaccaatgtatgtccatcatttcgcatacaaatgcttcctaaaaggtcttccttaaagaaaattaagagaaaactctgattccttgctttcacctccctcttgataggcttttcccgttagacctttctctccgatctaggctcaactatctttcttcgtcatccagactctacgatgcgctattctaatcacattttctctctcctttccatatctgttgacgtgtttccgatgcttaacagggagaatatatacctactgtgttcgacaactacagcgcaaacgtatgtctccctgactccctcgcaccctacatacctcggggctgactctctgttcaaactcttcctctgagcaggtcttggtggatggaaagccagttaacctgggactctgggataccgctggacaggaagactacgagtatgaccagacatatgtccttgccggataagaccacgagatactgaattgtgattcgttttcttatcaatcacttaatcctatagccgactacggccgctaagctatcctcagaccgatatcttccttgtttgtttctcccttgtttccccgcctagtttcgaaaacgtcaggttcgtgaatatttgtatttggttctgcttccttcaacaatactcgtaagactgagccgagtttctttaccctgtttcttccttgacagaacaaaatggtatccagaggtttcccaccacgcgcctggtattcgtaagtcctgataatgataattacacatataaaacatcctacatgtctgtgcactttgcttatctatctatggtttctctctcaaagctataatccttgtgggaacaaaactgggtttgtattttaatcttatctttcattggttttgtctgatcggaaccaacactcccccaatctcaatgctaattcacgttttcatttttcgttttcgggtcttttctttcttgattgtttgaatagatatacgtgaagagcctagcacagttgctaagctcagagaacgacggatggcacccattggttatcctgcaggcgtccaatgcgcgaaagagatcggagctgtccgatatctcgagtgctctgcattgacacaaaaaggattaaaggtgaatctcttctctctttttcgtcttctccttctctctgaagatgttcctacgctcttgtttgatcttaatgcttatctacctggctcaattaccgatatttgctacagggcgtgttcgacgaggctatccgcgcatgtctatctcctcagaccaagtcttcgagaaagtcaaagaagaagtcttgtgtgatcttataaagcgagaaaaacgatggcgagaggaggatttctttatttcttccaagacatacaacctttgtaccgacttttcatcccactcattcagtcttcgatctattctcctttcttctttttttcttctctttttttccctttccctctctttctgccacccttgcgtgctcttcttcttcttctccctcctttcccttctctctttcgtcttggtcttaatcttttaactttgttgtctttgtcctgcccccttcttggtccccgatttgtggttcatattctttgcttggctcatcgtgcttcgctgaaaataatctttcttgatacttccccctctttccccttctccttgtcctgacaatcatctcaaaaacataggtggcggagcctttcttatttccgcgacttcaccaagattgagcatcacttcaattctagatcatgctttgcagagatagtatgtcagtgaagatgataattatacctgctatattcaagacgacatgcatgaagagcgtattgaattgctgggtttttcaagaatcaattaaaagctaccttatacataagtaactcaaccttgacagattcactgcctaatcgtcatcagtccttataatcttcttaagatccagttcacttccattgatcattttctactgaggatgagcgacaatataggccatgaggataggattcaacctcacagacgtgatcctcgccaccaggctcagaaagccttcccacccccagagttcacagaacgtgagaacacatcaagacatcccatcaggttcaaccgtcctccgaacgttattggcgcaagcgataaccacaccgtcaagattgagcctagcatcggtctaaatcccaacaaatcttttgttaaacacaacaaacggcctttcatatctacagaaccctcaacgagatccacgatggacgaaaaagcgtcgtcgaatatgaacatggggtatagaaatcctaaacgagctcgagtcgaacaacctccgcctgtttctaatcctagcctgaatgttgtgaaggacctgaagccattatcggaagcgccttcactgaatttagacaaggcttcttctctcctgtcttcatacatggttgtactcagtcgacggccaaatctgtctttgggaacgaagaagaaagcgcctggaccgacgttctcgtatacgacgcttcaagctcccaaacacggttcaggtgaggaaccggtagtgatagctcatgtcatgttgcctcctcactgtccgtgtccgaacaagttagccgaatctgacccgaatgggaaggtcaaatccgaagcaaagaaggaagcctgtggaaagttgatgagagaactatggaggtgtggggaagtaggggatgattatacaccaaaggatttgtccgttcgtcaagagttcatccagagtcaggtgttgcagaatacgctccaagagggaatatcttccattctttgcaaagaaccaatattctggaaagcctgtcttgaagcagccaattcatcgtcatctttacatggggaccaatctcttcaattttttcccacggtaatatcttttccacgggtgccagtatgctcttcaaactcgaacgaccctatcgaacctctccaaacatggcagccgagaccgattttgattcttactcgactggcacttcctcgacttcctgccgtcaacttactcataacccaacaattcaccactctctctatcatcactcatgctgccatacagttcaaaagcatggacgagaagaaacttctcgaagcgtacacattaaaggtgatgaggacgataacaaacaaaaatataacaattgaggcaggtcaggccgaaccaaattatttgctggctccaatgatatgggacgactctgctaaatccactgaaagcgaaaccgaaaaggaacggcagagcatgtatgattctcaaacattactctcatcttcctcgtctcccgacagcccttttaaggtgtccagggctggcatccgaccgaaagctgccacagcggttcctgtactcctaccgacgagctcgcctgaaatcgactggaacgaagtaagagagacgacagagcctgttacaacccatccgttcgaaaaggatatagacaggttaaagggacaaataaaggatggaattgcaaccaacaacacagaatttggaaggagatacgagatcttgaaactcagaacggatctgtcaccgatgagtaagcttgtggatagtccagttcgtatatgcagtattcattttctgtgcttggttcagtcttcttgaggtcaaaaaccaaatgtgctgattctgtcaacacacattcttatcaaatattcgatagagagaagcagcttacagctcactttacgagtacctaaaatctagaagtagattcaacggtacaatcaacctggaacaacctcttttggaagttcgccggattcgaccagtcatgggttacctcaggtatctcgataaagaggaagcaggaatggaggcttctgctaatggtgcgcacgagaagaaaggggaagagatgaaatgtaagtctcttcttgatcatcgttctaacttgagtcgcacgcgcgcgtgtgtttcgttcgtccctcatctcggacatccttctctggactttagaaaggtgtcttatcgagacatgacaagctgatcatgaaccaccaatcatttttggcttccttgtttccttctccacagacatgataccaggaattttgcacaaatcagtggttcgagcgaggtacgtcaatcttgccgattttatatatatacatatacacttatacccaatctcctcgcgtttccgtttttttgccttgtctctactatcgtttccgtgaacagtacatataaatcagcggttttcctaccatccgttgttttccgaatcgatgcgcttctatgtacaaaagaagttaactcaatgattcttcaaaacctggttgatgagaatctccttacgttggcgttgagcagtccgacgctttgtagtttggatggagattctgacatattggaatttcaaggtgtgtagttcgattcttctctcaaaagtatttgaaaactgaatgtgtttcctgtatctatccaactaccacaaggggatgctgttcttaaacttatctcgaccgtctacctgtatgcaactcattagatttttgtttgaatggcagctcaacctctaattatctgagatatcctgttatgtttcatcttttaggtttgcgaccaacccaacctctcgacaaggtgatcttcacagtctgcgtagagccattatcgccaactccgcacttcgcatacaatgtatcaactccgggctagccccatatctacaggcaaggatcttcgcagcaaagacctgggtgccgcatggaatgatcgcctctgacacaaatggttcaaagctgttgacagctcagcgaaggatggatatcggagataaggtttgttgggtcttcttcaatgcacgatagaatttaggggcgcgagttaagtgtttgaaaatctctttcgaatcgtacacagcaactggccgatatggttgaggccatcttaggagcagcttggatcactggagatcttcccgtcgcatggcgagtggccaaagtgctcaacatcggcccatttccagccattcatgaatgggctgatttttctaggtactccgagattcctccgctggtccccccaatgatgcagaagactgtggagatcgtatcaagggatatccttggttatcaattccagaatcagggatttctgagtagtgctttggtaagtccatgcatttagttcttcttgctttcaaagacaagttcagaatatccaaacagacttgatttttgcgtttgatggggctgcgatagtgtcatacatctgcaaatcatgactttttccaacggttggaatttttgggtgatgctattctggatctgagtacgaatcaaacatcattgctttcatttactcgtacagtattttaattgacgaaaaatgtttggttttcttgttttttcttctcttttaaaacctatagtggtcatgcagcatatcaaagaaagatggccgcttatacggccggagtatattgtgatgttcaaggcaagttccatcttttttcccctttactgatagtctttgagagatcgagagctcatcttcgtttttgcgctattatgcagtcacacatggtgtcgaacaatgccatcagcgcgttctgtgtcgaatccggcttgtacaaaggtctcctgcaggaatcaggtcggatcgacaaggaaattcacaattacgcctcacgagctcaggccgcacgacaacgcgaagaacacgaggcaaaagtagaagatagaatgccaagaatctattgggcggatgaggaagctccgaaggtacattatagtcccggtcactacgcgcacagaaaggggtcaatactgaagatcttttctgtcgtttcgttctggatcaggtcacgagtgatgtagtagaagccttattgggagccttgatgcttgaagcaaaattcgactatcataccgtccaaaaaatattcttctttggagtcttccgaccgttcttagataaatatatccatgggtttgaatctttaccaattcgtacgtctcagaatgaagactttaggggtttactctccttgagactgacgagtcttgacttgtatgcaatggaacagaacccgctgcgatacttacgtcaatgcttcagcaaaaggttggttttccattgttatatttttgttttgtcatcaacctcgtcattctcacagttttgcacctcctattttctcttcaaacgatactaattggtaattcagggttgcaaagcttgggaattacgcaagacgttacttgatacaagtaatgcatctcctacgaaaaccgaaggcacgtttttctcttcctctttctcttcttggtctgctcacgaaacgttttatttacaccctctcttcctccgttctgactcgactgttatttgtagtgttcatccacgagacgatagtggcatgggcaatttgtgcgacaccccaaatgtctaatcggaaagcatgcgaacaagctctgaaagccatctcaaacgagatcagaggaattgatgttctatgtgattgttctcgagcaggcagttctaagagtaagtcgtctcctttcccaccacatatgttcaaaccctacctttcactggggaccagtagtgctgactactagacttcaaccgtttgaaaagaaccgggttcataaaacaccgtcaaagtcttcaattgacacgcatgaatatcaagcatagtcgcaatcatcatctatatctatgtctcactcgttgtctcattcgaatcgcgccgatgaatgcttttccatcttttagatatctacgtcttgagcctttcggttcatatgagatgcaacccctcatatctttgtccgaggatagtgtaaagaaagattgatcattgaagaatgaacaattcatcatcataaaaagaagtaaaagagaaggaaatccatctgcaaacaatattcacttataaaatttagctgaaaaagaaaactagttctgaaaactagcttcgaacggtatgataaaaagggaagagaatcgaaggagttgaacgccagaggaaaaattggatgaaacttgaagatgaattgtatgtagacattgaaggacatggtaaagagacgaagagaacatacgacgggacaatacaggggaggagttggcgcaagaagttgttggaagagggaacaaattcccagtagaagataaaaagaatacttgaacacggcggaggaaagatagaaggctgagacttatcgtcttactcccaatcactatcctcgctgtcgtcctccttccgctcagcagcagttgaagcaggagatgttggtgctctcacattcccgctcggctgactgacgatatcgtaactctcctctgagattctaggtgacgtgttcgtcgtactgggcgttgcttcctccttcctttgttcgaccgtttcagggacggaagcttgtgtaatgatggaaggggtcgaaggtccgggcgtggaagagttcgtgagttcaggggcaggaacaagagtggtatcggaaccagtggaaatggtggtgggggcagtgccggttgtgacttcctcgtcgtcccaggagaacgcttcgtcttcggcaggggtaacagcggtctcaagaacagtctttcggcgctcggcttcaacttcgatctaaacacataattataaagcggaagaggtaagcagatggcaaaacaaagttcgtatctacgtgggggtcagttgatatgacatacctggtgcactcggaagaagtatcgagtccagaaagcctctttgtccatgacagagggtactgtttcaaagttcgtcgaaggagagggtgtaagcgacagcacgttcgttcttgaaatgtactcgcgaataagaacagacgtacccaacgcatcccgagtggctttcagttcctctacgccttcttttttagtgggaccaagttctctccagatcagctctgtccaataatccccctcaataccaccttttacctcaacttcatctttcaaccaggccagccaagcctctcgaatgtccttcccagtctcttcacttccagcagggtcgatctgcaggagatccttgttggatctcaaagccttgagcagcgcttcttgcctcctagcccgcacatcggcaatcgacttgcccgtcagtttggaaacctgatcgtcggtctgagagtagaccggagtatgacccccatcgtaagtcgctatagtccacatgtcggatccatcccaagagacgccagcttggccatcgttcgtcggtgggacgatcttgacagcttcctggaagaacttccctgcgtcttgtaacaagttttccgattttttcagataatcttccgcgagcttctcagcatcggcaaggtgaagatcagactgaagcttttgaaacgaatttgtcaagttctgtcgaagggccggtagatcgagctgattcagtttcaagttcgggttagatgacagagtgtgggaaagagattgttgaaacgaagccaaggaaggtaacgatgtatgagtgactgttgtgccatccgggttggtctccgtagtagtcggcaaggaagactgcagttttgcaaacaacgattggaaagctacatttgcttggtgaccaaccgcatcgaccgacgaagcaatagagttatccggaagctctcttccctttcctttcacatctggcttagtagaacccgccgcggcttcactgataccaaggccaccgaaacccataccgatatcgcccatcatggcagacgaaacaaagtctgcgttgggatcaggtccaacggcggtatcgtttcgggcccgagcttccgactgaagccgttccatctctgcccttgcctgtgtcgccgcagagttgagatcctttcgaacagcactgatggtaggtgcaacctatcgttcccccaaagacaaagatcaaacgaagaatttgaacgtagaacgtgatgtcacatatgtaagcaaggaggaccctgtgaatgatcggcgtatgtacatgaagacaatgaagagaacagagggaaaaaaaggaattcgaacctgtttctgaacacctccccagaaagacttccaactacccataacctggcctacttcgttctccaatccttccttaaacgattccttctttcttggctcgttcaagaactgatcggtctctttcgttgatctcgccgagtcgtcctcggctccctttaaagaaggagaagagccagcaggggtggaagactcaacagctgctgatgcatcgtcagatacgctgtctattccggtagctgtggtaacgagagtgggatctgaaatggatgtagaattagatcctgttgaaagatctggggcggatgaatccatcttgtgagtcgtgtaaacaagtcgtgatgccgataacgatgatgatgctgatgatggtgatgatgatgggcgaaggagatgaacgattaggcgaaaaccggcggattcacaaaaaccgattaaaaggtgtttgttctacccacccgctcttctcgatatcacccttggctttgtcccgttgaagtactttccggtttccaatgctagctccttccttttcgtctgccttgcgatagagaatgagacttgtcattattattgcagaccatgagtaagaatgcagacataaaacatggcacgagaggaagaagctttaaatatgttgcttcagaccgagaccgatgagtgagagaagaaagtataaatgttgaaagcagagagaacggaagagaatatagaaaagaaagagagagtacgtgatgagacaaatgtaagagggggtatgaaaacatgttgtttggacgaggacaaccgaaggaaacaggaataccaagaaagaagaaagtgtatatttatatacggagacaaagtcccagtttgatagggcggagcgagcgatgcagatcaacaatggagagagaaaagaacacaaacgaaagaagcgaaaagacgaaagaggtggaacaaacagaacacacaacccaatgaggggaggcagaaaacatggcagctcaatgcgtcagagaagaggtcgataagaagaaagtgaattgaaaaagagaaagcgaaggaggtctccttcttttttgtttatttaggcagactcctcctcctcctcctttgtcttcgcgaactccttcttgagcttatccgcaggggccaccatcggttctccctctacgttgatcttcttggccacgtcctcgacatcgtcgtcgttgaacgccatggcggcaagcaactgagcgaatgacgaatacacctggggaatatccaccgcaaagtcatcaaggaactcggccgaggactccaggccagccttgaaagtgtccttcgagaccactgaatcggcagacaacttcttgaacaacttgatggtcaactcaaggtcggccttcttggcgtcaagggcgtaggtcacaatcttctcaacaaacgtcttggtatgttgcgagggcagctcggtaaactgcaaaacagcctcagagacgtcctgtttgagtaaatacagaaaaacaaaggagaggaacagatcagcatggactggagctgtgacaaccaagaaatgagacaaccaaaacgaaccttgatgtgatagaactcgtccatgttggacttgatcttctcggcagcagccttctcatccatctcgacagaagcagcggaggcagaagtctcctcgtccttgtcctccttcgaggcggatagctcggcatcggtcggtacagtcctgggggcgaggttcagtcgctttcgctgagatgtgggctcagcagcgggctcagtcgatccaacttcgtccttgctggttcgcctcaagaacggattcgggggcaaaccggcagggccaggggtggtggcagcagggtccatcgaagaatcctgagaaagcatagaaaacatgttgacgttgctgctcgacgagtttctcgacaatggcggggtctctcccatcttgggtcctcctcgcttgttgaacacagagccggtcgggccgaacgtcggtgcgcctccacctcgcttctcgatctttccaaagtttccaagatcgccgaccttacccaagtttctgggtggggcaacggtccaaccatcctgctgggggttgttaaaatcagttcggttctgtcctcgtcgagatccacctcgggaagagtttcctggcccgctcgacgatcgagccaacgaatcctgagcagccctcgcctgatccttggcggctttctctcgaatttgagcaagcgtctgaacaccctcggtagcgtttcgctcctgccagtgtcgatgtcggagctctccgacatcgagcaacatgaactgcattcgagacgaggtcgagctgctctgactgatgtgttgcattcgggcaaagtacaagtccatcgcgttcttcgccttgggggtgtcgagctgggacccaacggtggtcaacagcctgcagagggactccacatcctcctcctccgggttggcgacgttgttgaggagttgcttgatgcagacgtgcatgattctctcggtcaacatctccaacttgaaaagctctccgataagtcggacgagaccaagaccctgtcgcttggccttctgagcggcgtagtactcgtcagacatcaacgcagcctcctccttgggcttctccgaggcggccgtacccgtcttctcggcgttctcagcagcagcggcagcagaggcctcggcctcgtcgttcttatccttgatggccttgtcgtcgtcggccttggaggcggcggcagcagaggtgctctccctggcagcccaacctcgctcgaagtcctcctgacatcggttgaggaggtactttcggaacaacgttccaccaatcacgcactcgccctttgcgtccaacaccttctcatccgagatctcggaagacaagttgtccatcatctttcggcaaagtcgggcatacatgttcgaccagtgagcctcatcggtggccttctcgaacaccaacctgatgacctgtcggagcgttcggccgtcagtctcggtagaagacttgttggcccattcaatgatctgaccagaaatcgaagggaagttctccatcgtcaacttgttgagaagagccttgacctttcggtcgaccaaatcgggagtcatcgcctcagcacccttcttggatccagggatccatcggttagcagactcgacaagaggagcaacaggagtctctggaacggccgagataacaggggcagacgggaaactgggcatgtcgcttctgtttcgacctctctccgatcggactcgaccacccttcatcgaagggctagaaggcatcccaccggggaaaccaccgggaccaccagtgctcggctgcctcgacatcggagctcggaacgagtttccaccaacgagaggctggctgctcgcggcaaacctgtcggccgaggtcttgggaacaccaccgaatgaacccatacccatggagaatccagacgaaggagctcctctggtggtcgatgggaagttggcctgaggtcctgatcggacaccaggacctcgggaggatcgtcggtgacttccctggtcggtagcggcctccattccgatctgctcgagaggcgggagtgactcgggcttctccttgcagatctccatgaactggatgaggaactctcgatcgtatcggaacttaccggcgacgatggtggcgttgagagcctggttgggagatttgactccctcagggtaaatgatcgagctaggctcgctgatgaacttggcagcattgagagactgagcgacagcgacctgaggagcgacagaagcgtcctcagtgacgggctcggccttcgacttttcctcggtcgaagcatccaccggcttggaaggaagtccggcagaaggaggaggaacagagctcgaggaggcggaggtcgcgacagccttggattcctcgctcttggactcagcagcctgagcctgcttggactcctcagcggcctaagaggcacaacaacgtatgatacgtacaatgatacatgttagacagagaacaagaacgcgatgaaataaaaagcgaggcgactgaccttgtcctcagcggccttcgtctcggcagccttcttctcagcggcctccttctcttcggcggccttcttctcttcagcagccttcttctcctcggcagccttctcttcaatagccttttcttcggcctgcttcttctcctcggcctcttttgcggccttctcttcggcagccttcttctcttcggcagccttggcttcggcggccttatgctcttcagcctccttggctgccttctcctcagtctgcttcttctcttgctcagcggcctgagccttgagagactcttcctcagcagccttcttggcctcggcctcctagtttgatacaaaaggggagggggggggaagaggatgagatcgcggtgtcagaacgacggaacaaggaaacaagatgtacaacgatgcacactaaccttctgctcttgctccttcttctccttctcagcctgctccttggcggcggcggccttctttcgctcggctctctccttctcctcctgagcgtccatctgcttgaatttgttctcccgagcttcctcagccaaccgggcgttcctctgggactctgtctccaacctgacggtcactggaggtccaggcaacttggagatcgtgggggccggtgcggctggctttccttcggtagcagaggtcgaggatgaagatgaagatggcttgaccaaggatttgatatcagcggccgttccgtcggcgaacgcaaacttgaccgggttagtctttctgggtgcgaaagcaggggccattcctcgaagggagggcgagccaggaggtcctcccggtccaccgacaggcgacatgtgggaaccagaaggagagaacggggcggccgaagcagagaaggtggagttctgagctcggtggttaggtcccgagcctggggttccggaaccgttgttgttcacggcggcctgtcggatctgaggagtggaaggaccggagggagggagaccggaggcgttaggggaaggggacagaggcgcgttagcagcgccgtgaggagagtgaggcataggaggctgctgatgggggtggtagccgggccactgaggaggcataccctgataggagtttccgtactcgggcccaccatacatgtgttgagggtactgtgaatttgaaaaagaagggatgtatcagctacttgcgatctaacgaacagcgcatcttagaaccgacaaaaaaagaactgacgtagtatatcggggcctgtccagggtaggagcccatcatctggttctgttgaggaggaatctgagcgtttccgggtcgaggcgaagtgctatcgccagggggagctccaggtccgttaggtctgccattgttcggtcggttaccaccttggaacgatgggttttgctgcatgctaggcggtccaccggagatctgctggttcgaattcgaacctgacctagaggaagacgacgacgagtggtggatgtgaggaggtcggaggtgagagttttggttgggtccaccctgctgctgctgctgctggggatggtaagaagaaaacgagccagatgactgaggcaagctgttaagcggcggtcggttctggggctcgaacgaacctcgtcgggcatcagcagatccagaagatggggaagcggtgttgacagccgaggacgagtttgttgacgaaatagagggaggcgcggggctggacgcggtgggtgccgagctgggaggggctgctgaggaggaagacgagttttggaatagcttgtggatgtcaatcttggccttgggcttctgagcctcagtggaggcagaggcgggtgtcgaggcgggagccggagtggaagcggtggctggagtggtggctgaagtaggagtggcagtggaagcagaagcagatgtgtttgcaggagcagcagaaggagcagtcgacacaggagcagcaccagccacgggtttaggagcctgtctggcggcagccacggccgatccgttcggaggagcagtagcgacgacgctaccgaatgccttgaggctagctccgtttgtcagatgagaaccggtggcaggaggtttggccggagaagaactcaaaacggcggccgagtcgtcaatcgaaccaaagttgatacccgcactggggataccgactgaactggtagtggaggagcccttcttgttcacggcactggaagcggacactgatccgccagcggcggatggtgcttgaactcctctaccgacagacacaccttcactgatgggccgaccggatgcgaggagacttcctttcctagagtttgccgagccatttgactgttgagaattggcattgacaggagcggcttgcggtttgggagtggcagaaggggaggatgagggagaagactgggctgtggaagaggtggtggagatcggagggcctcgagaccaagctgactttattgcgggcgggggagctgacgatgaagggtttgaagatggtgctttgctcatttgatgagtggcgagtttggttttttgaaacgggagacagacagaggatgtgtgaggtgagggttttgacgaagaggaagagcgatctagattttcagattttccaattttcctcgggagaaaagtaagaaaagatcaagaggtcgtgttacagtaaagtagcccgactgaaggatcgaatagagtgatgtatgtctgttgaagagggaacgggaatgaaagacgaccagaagaaaaggtcaaggatgagaacgtttgtcaaatggcgagttccagttgggtggcaaaaacaagggagaaaaaaaatgagagaacgcgtaagatgtcaaaagatctctttgccatcattcttctcctctgccatcctctgtgatcgatcgaacgatggaaccaggctgtggtgtgtgggcaggaacaagtgtagttggaaacagagagaacggatagcaacagaacgaacctttataagagatctagatggaggccggagtgattagaaaagaaatataaaagatttctttttttttctttttttttcaagggcggaagagcaaagcaaaaaaaaaggattggttgattcgtttccagagtcgaaaaggcagaaagaacggaacaaacaagagaacgaagacgacaaagaaaaggatggagctactttctgtttgatatacgacgagctggagatcgattctcaatgtcggagagggatgtgtccgagtagaggggaactgggggttgggaggggaaagaggtggaaggaagaaaaaaaagaggaaaaagggcaggaacggcggaaagggtaatttttcttcccatcacttttcctattgtggtctgtagtgttgcttctattagttttcctaatgatcgtcctaatagcagttgttactcgtgccagatcgttctattacatattctctctaatcattttgcttgattatcatagtctgactctctattcaaaatcgagacagctcagactatatgctggttcccatatgttccgtccacatacattcgtatgctgaattcatccaaaagctacacatagtatctccataaggcctttgctcgtctcgtcagatcctggatcaacccaggctccttctgcatatctttgccagagtactgatccttgcggatgctctccaggatctctttgacgtcgtccatggaaccagatgcaacctcattcgtatgccacgatacgactagaggcgggcggaaagatgggatggatactttttccaaaggctcgctaagacgagcagagaccatgagacatatatgagttggccgtgggttggtttacaaggagaatccgtcgacagagagaacactcacctccagtcgactttgttcttcttgacttcatctgccacctttcctccacgctcagccaacgatctctctctttccttcttgattcggttacgctccttgatctcgagagcgttgatgatgctgcgtctctgggtttctgtcatacccatcggtggctcgatcacatcgagatcaaagtctgtcaagatcaagatagaatggtctttaaaatcgacgtagagcttctgagaattttggtgcaaaagaactcgagtgacacgctagtcgtgccactttcttactcacccacaggatatgggttgtccaccttgttgtacaattgagattttcgaagcatgatcaacgcctcgtacgaaattggtgcattcggattgtggcttttttttttttgtgttttcgattgttttgttttcgtatcccaaagccgcaagagttggcataagaaagacagtcatgttaaagtcgagacgtttcttgtgaactgagagcgccaccaagaaccagcagctacactcatagtaagagacaaaagaggcaaacatgagaacttacaacaatgtgatcacaaacctaggttttcgccagaacgccatgacgaatcaatctttttgtattttctttttcttattccttcggtttcacttcgtgatactgatgagttgatgctggattgaatcacgaactgccgacggtcaaatgtatgatgcgggttggatgtatgagtatgcgtttgtgtgtgtgtgtgtcagcgtgtgtatatataatcatgagacaacttgcaggcatggcaaacgaccggttagtcacctcacatcagacgtcggacttggcctaagatcatcaaccatctttgactatgtagtgacctctgccatgcgataaccctctctctctcactctctccgagcacctttacatagcccatcgatgacgtcctcgaactcctctacatatagtgccccctctacagagttccatatcatccacgcaacaaagccagaggatttcaagcgatgcatggatgtccgattgaaaggttcgtccccatctatccgtcgattatctcgtacccagccagagtcaaggaaaggctgaaaggactgctctgcttcgtttgatacagtctttgtcgatgaacaaggctatgatcccaagattgaacaggacgagtgattatttcgttattttccttttcttaattctgtacgagtcgtaactgtagatgatcgctcgctaagcttttctctctttcttgggctcgatcaaatagatacgatcatacttccgcccactttctcttggtccacacgcctacttcggaagcagtaggaaacgtcagattctatccaccttctaacaaggtgcgccatctcttgactttcttcccttctttcttcttcttctcaagatgcgtttcagcgctcgctgatagaaccactacggcttctttgaatctcaagctcggcaggctggccgtccttccagcattcagatcttacaaactaggagcaaagctcgtggatcacgttacactttacgcgatagaacaagctagacaaagaggcgagaaggaagcagtggtgatgtgtcattcgcaggtcagatcttgggaggtttaactatcaagtcaagctgagctgagccagactgtttttttcatttatccattcatcatctataggcacacgcgattgggttttacgagaaggtatttctcactttcttgggatcaaactgactcgctcatatttttctctctcccttctgacaacgctcttggtgcttcatcttcttctcttttgttttcttttttattttacctttctgggtatataaacagaaaggatatgtccctgtgggccctcggttttcagaggtatagcattgcttctttttcttcgtctcctcctcatcatcatatgcgctgtacacagcaagagactgactgaatcgagccaatttcttccccggctttctgcgtctttcctcgttcggtctctcccatcgaacttgatgcaggaggatacagagcatcaaaagatggttctcaccgttcgaatataaatctttgaatccccttgtatcatccttcctggttgagattcagaactgagagaaacaaaaccggccgctgtcgtcaatgcggacgagaacgtcatcttgaaataatgaacaatgaaatggcacgcaaggaaagagaacaagtcgtagtgaaagagatagaaagagtgtgaagatatcgaatgtcgtttaaaactggactgtaatcaaggttcaatgcataaaagaaagaaagggccgtaagggaaagagacaatgaagaaaagattgacgtccactcgcaagaggaacgagaagaaagagcagaagaggtaaagacgcatcaagccaaacctccctcatcaccgatcgtcttcttgatcctcaacaggatttccgtcttccagttgtcaagttttgtgacctggtcgtactcgaccacatgagcggtgaaggcttcgacatcgccgtcaccgtatgcgatcacgatgttgttgaggaaccgagcttctctagtagaggggaatgtgacatcttcaggagggacgtacacaacggaaacagagataaaacagtgttagaattgtatccttgtatttgcaatcagacaaaaggacaagatgggacaaaccttgttgggcaaacttatcgagcaggttacgagccagcacgacatcttcagctcccagcgcactggttgatcggaaacaaatagctcaattagcctgacgaatcgttcgcgatctctggtcgaaagggagctgaagggaaaacgaaccaaagaccagctttgagccagatctccttgacgctgtactttgtcagtgggctgcttaaactccagtttccgacctggacaaacgtatcgaccgcccgtttgtagtctccaagtgatccagagatctctgctgcttccttcagaatagcgtttcccgtgctgtgaatgacccaagaacgtacacaggaaagttcagcgtggtcaaacatggtgccaacaagtgatagagggagagacagagaactcacgcctgagcatcctccatctggtaccattctcccgccttttcgaacgcgtccctagcggcgggtagatccgactcttttaggatgttgccgacttctttctgtcgatcggcagcttgtcggaatcgtccttgctcagtgagaagggtgattgcttgagtcagcgcgttgacagcgtccgagacggaggatactgaggtggattgcttgaacctgaggaggatgagaaggggtagggtgacgtcaagataggaaggggggggacacaacatgccctcggaggaggttctagagtgatacggggaggagtaagaggaacatacgatttggatgcgttccagaaagctgctatagcgtcgtccttctcgttcgccttgagtctgcattctccctccctgagcgacagtaggatggattgggtcgataagcaaggagacgagaactgattagagcgacaagcacctgggctgatcatgattgtcaactcacttgtcgaaagctcgtccactagaatcccagtttttttcaagcttgaacgcgttggccgcttgttggaactgtggtgatgtttccgcgacgaaatcagattgatagaagttcaacgtcgaatcagctggacgaccgcttagggtcgagtcgaaagaaagaaagaaaaaaaaactccatgagaactaacaagatcggcggcttcctcgaactttgttgaagaagaagaaaaccagcctgtggaagaagaagccttcttgttggcctttgccaagagatctaccgaagagggagccatgctgtatgtgtatatgtatgatggagctgtgagatgtgtgagagctgatgcttgatggatgggtaggttgaaccagaagtaggagaaggacaaacttcgtcatagcatctttcttgcacagctttcgttgttttctctttccccccttggctttgagcgttcggactcttgactctcatctggtgtttgatatccgcatatccattctctgccaaggcatccgatacacacacacacacacacacacaatggctgatcaaccggtagcttcttcttctcgacttcctccagttctcatcccgttccaaccaccaggtgagatggtcgtgtgtcttgaacttgtatcagcgtactactgaccgttgatggttgtctgacgatctttcgatcttgttcattcgctatctcaactcgtatctcattccttgcagaccctgggccaccagctcatttgacaggctcggttgacctgctgacacatctgtcgctccggacgtcgtacgatacgttcgtccggccgtactttcgaaatcccaaaccgctggtcggccaacagctcgacgagaagggtaaatccaaagagtcggggctgacggcgaggaaggaggcggtgatggatttgaagaagatgaaggacaactatgaagatctcgtgccggagtgtgtcgttctcggtttgtctctttcttttttttgcttcttcttctttctatcggggagctcgagtttctcgttggatcacgcgtataggttcgagttgctgaggttttgagggtttccttcccgagggggttttgctttctctttgatgggggcgcttcggatcattctcaccacatctcaggtaatcacccgatcatccagatcccaccgtcgtcgtttcaccggctggtgtttgaatcaactgacgaccaagggaacgctctgcctacccaggagatcaagaagaggtcgaaagcagaattagaacaggctggttggtggttggctcctggggacctcgaagaggtacgcccaggctattcatcttttacatgtgtgagtccaagtagatcgttggactgatgttgatttggtatcttttctttttctttggtgtttgtcgaaacgttaaacaactcgaatcgaaacgggatgatcaggcaaaagacccagctttgttcgttcgacaacccagacctgagaagagaaaggtacgacggtcaccctttttgatgtatcacccagtgtcaaatctaaccttgactctacgcttttcttaatacacacacgcacacgaacgagcagaaagcgaaacgtcctagaccgatagacgacatcgggctgggtccatcgtccctcaacccactcctgtcgggggacgttccgtctccggctcattctcatctctcgcacgggcatggtcacggatcgggtgtctcgcctggccagggtggatctattaaacgaagacgggatgtaggtttttttttttttcttcttctttttcttcttcttctcatttgcgaagaaggaaatctttgactttcttgatttcccccctcagagtgtctgtgtttccttgcttgttctgacgatgacaacctttttgtttcattctgaccacccgacgaacctgcagtcaaccgctcctacgccaggaggcaagacgccttcgtcctcccagtcgcatccccactcgggctcacatccagatgggtacgggggatcaaacaaactccacgggtccgggaacgggaagcggacgccggtgcccgtcttgaacgggccgacacccggttcgacgaacgacgacgacggcaggacccccgggggtggctccggacggaccccgggctcgttcccggcagatcaccagtcaaactcgagcttccagtcttattcccgttcgtattcgaaccaatacggccgatgagatgggctttttttcgtcgttctctgcttgcagtgtgtgtgtgtgcgtgtgacggaagaaagatgaggaacaatggatcatataagcagtggcaaacgggggaaaagaaaaggcagacaaacaaaaagaagaaggaaaaaagaaaaagaaacagaagacaacacgacacgacacgacagataacaacacgacatggacgaaaagacaaaagaataggaaaaaagagagggagaaaacgatgtgtgtgtgagagagagagagagagcagagaaagttattttatgcgcattcgatggatgagtgatagaagcatagattagagaatgagagagaggtaagagggcgaagaggggagcgggatgatttaatagtcaaccaacacaagaagggggggtttattttcaagggttttcttttagaaagatgttttcagtttcaaagatgagggcaaaggaagaaaagaaaagacggatacagggggtgttgtgagagagaagaaagagagggaagaagaaaaagaaaggaagaaaaaaaaaagaaaaaaaaagagaaagagatataaaggattggaaggattcatagatttcaacgagacctcctcctttcctcgcttcccctccttctttacattggttggtttgcaaaagggcatcatccacagggccgggtgatattaaatgtgattatcttttcattctcttcgatccatccttcgacacaagcgcaaaacagagtctaattctcgacagcggcgagagcgtcgagatccttctttgcttgcaacgcggccaacgcggctccgacaccactaccgtccttggcgaggacgagtctgatcttgctggcgtattcctctccgagaagagcggcgaggtaagaattgacgcgctcctggaaatgggggtacaactcggccacactgcgagagggagggagggaggaaaggaggaaggaaagggatgagcaaccaggaacaaaaaaaggattgagctagattaatgatcacaaaacacagagcgaacgaaccttccatcgactccgacgtcgagaaggtcgacgttcttgacgtcctctgcggtctctccttgggtgtggaggacgatacaggcgatggcacaagcactcaaggcggcggctctgctaccgacggcctggacggcccagaggacaagttcgacatcctgctgggagatgtgctttgcctttacgccgagatactttgtgatgagttccttgatagcctgctgggctggggtgagatcggaggaggaggttgactcctttttgggggcaatatcagcggcggcctcgacaaaggagaggaaggatgtgtcgattccgtagtgggcgttcaactcgggggttgagtaacccgagaacaagagggacgagtcgataaagtggagcaagatgtttcgggtgatctctccgaggtacattccagagatgagcttttcgaacgcctgcttgtggctgtgggtaagtttgagagggatggggtgtcagaacgggatgggagagggaaggacaaggacgaggtcgaggtcaaggtcaaggtcaagaagaaagaaagaaagagaggacgtacgggttgatggacaatcggtcgagcgctccgtcaaagagagtgatgggcaagacggccctcgagttgtccaacgctccccactcggtgttgatgaccatcttgctgccgaccttggcggtctgttccttgatgtaggactctccgagctttgtgatcttggagaggtcctcgagataggctccgttcgttccggttccaaagattgctccgatgagggccggtccgtgctggtaggaagaggagagcatggttccgacggtctgtttgatggtaagtgagagggtgggagaggaaaagtttaagagggcaagagagcaggacggggaagaaaaacagaacaaggcaagagagcaggacgaccgatcagagatgatagagaagatgatcaaaacgagaggatactaacgtcgttcacaagagcactgcatcggacgtgaatgtgctttcggtcgagactgtcctggagaagtttgacgacgtcgtttccgatggcgttggtggcagagaaaccctttgtccaggtgaggatggttccggcatccagagcggtctgctcgacggggaaactggaggagggagaagaaagtaaagaggcaaaaagatcagaggggggagcgaacagagaaagcaagaccgccgggaaggaaacgtcaggcgatgggcagtttgatggaaacagagagaccaacctgaaggtgaaaccgagatgaaggaccttgccagagtcggattcggttccaatctctgtgaggaaggagtcgacggactcggcgatgtagtctgtgtgtgcgtgcaacatgtatcacctatcatcagcttggctttctcattcctcttggcaaacgaatgaatgaagaccgaccaaagagatcccgggcgtctccccgcttgagatcgtcggagaccttgtacttttgctgcttgatggtgaacttgtgggagccaagaagtctgacctcgcacactcgcctagggaagggaagggaagagggaagaaagaaagaaaaagaagaagaaaaaaaagagagcgtatctcattctcttcagtattcccggttcactcaacaagaaggtgagctcgaaaccgaccactcacaggttcgttcctccgaggtcgagagcgaggaatgttctgttcacaccaggggggcaaccaaacagacgggtgagtgagagtgaaccatacagacaagggggggggcaagcaagggaagagatgtgatggtcccaagcgggaggggggagcgggagggaggtgaagaagaagaaggaaaaaaaagaagaagggaaaaaaaggaggaaggaaaaaaaaaaaaagaacgacgaacccttcttcgtttccgtcgggaacaccggtgatgtaactggggatcatggcgacatccttgccgtatgatgtgaggcctgagaatgcccgggggggagaacaaacaggacgagcaagacggacgagagatggtcagtaccatccggcagaagaacaagaagaagaagaaaaaaaagcggcaatgcaaagaagagatggagagatcaagctcaagaacgatggcttgccgaacaacattcaaccacacagcacaccactgaacaacagactaaccttgggagaactctgctctgaaggccttgacgatctgttgaagcttgggggtctcgaggaagaacgaaggttccaatgcctgaacggcctgtggtaacctcggttttgtcgacacggcagcggaggcggcagtgggggccatggcgtgggggtcgagtgagctagtttaccgggggggaactggatggacgtgatagagaaagcgagggggactgttcgagagcaagagcaagagcaaggagattgtatggacgagagggttgatgggggggagcgaacgaaagcagagggaatcgatgaggtcaacgg

SEQ ID NO: 1686 - DNA, 1735 bp, Xanthophyllomyces dendrorhous
gagactttcactcgctgctctctccggtgtgtttgtcgggatgcctccagtctgtacagtctcgggaacgtctctctcccctagcctggtgattgatcaaagctggctctggccacaggatctcatgaagctagtgcgcgtggttgctcagtgtttcattcttacttctctctctctctctcgctcttgccttgctcgcgccctctttctcttgaaccttcctgagcgtgttctcaagtcagcccatgcacaacactgagtggctcatcctgctcctcacacttgtctgtcacagcaaggaaaagaaaggaaaggaaaaaaagaaaagaaaagaacgaaaaaaaaaaaaaaaaaaaaaaagatccatgtcgatacaatcaccattcaacaccagctcactctgttctttcctatctttctcatcatacctactcctccatctcccccagtttaaagctcgctagggccacgaccaccagccgccgctaccactgccgcctcctcctcctcaagtgctctcagtttggccaactcggcctccaactcatctctctcggcctgggcgagagcctgttcgttcgcatccgcctgaacggccaagtaagccaaccgacgctcgttcaacacgtacttgatccgagccatcgacgtttggatctgtgaacgtgcagatagcaaggagttagcataccggtcattctttctttttcattctcgcttttttttccccctctctcaatccgttggtccctctgcctccttctctacatcacatcatctcccaaaacacacacacacactcaccttcattcgttgcttggtcgtgcccagagcaagaccagcccggaccccacgccgacgcatctcttctcgctgggtgtagaatatgtttttctcccggagcaacaagaaccacaaggtgtgaagctcctggaacgactttatccggagttcactcgtcaaatacggtcgacctaggaaaccaagacagaagcaaagccacacacaaaagcagacaaacagatatttagaatcaacccagagctcattcattcttcctttcctctctttctcccacatacaaagaaaacctcccaaacagacagacaaacaaacaaacataccggaccgctgctggttctgactcattcgttccacactaagcaccttcccagtcgtctcgtccttcctgaaaaacgcccagagcgggtgagccggatcgacctcggtgtcgtccagatactgtctgaccaccggttgcttcggggtcggaggaacgtgaggcagtaacgacggagccaacagcttgccctttgcatcataaaactcgggcctcttcgacgacggtccactcggcctcggcaccacaaacgtcgacccagatccagacccagccccaacgtcggacgagccagagccgatagcgtctgcgtagagagtcagaccggtcgagaaccgagctcgacctacagaccatgcgtttttcgatccgaccgctttaagagtagagaacatgctgaagagagtgggcgtgtgtgggtgccagtattttgggggtgcttgaacaaacgtggggatgctctcgactggtcctagaacaacctcctggaaagcagcaaagacctggcttgaatgatctcgaaagggtgcgtcgaaagaacgaaggaaggtggaagttgtgggcgaaaagaaaatcttgttggaaattcaaataaaatacagatcatcatttccg

SEQ ID NO: 1687 - DNA, 2278 bp, Xanthophyllomyces dendrorhous
gcatcaacagtgtcccccctcacagatgggatcgttcccgcccagctcgatagatatcccaccgccgtcaagaggaatcgcatcgctaacagtccagaccccatcgtcttcaccatcgttctttcccgagaatacagcccctcccaacagcgcatccacagctccctctccgaaacaccataccaaacccagtcgatggagctcggcagagttcatcgtgtatgagctcgccgtcgcagtcggcctggctctccttgtgtctgtcggagtcggtctaggatctggttggtagatcgtttctctcgactctattgcatgtgtcttttccttccttttctttcgttcttccctcactctttcctcccttgcccttctgtgtgaacgacggtcgatgcgagacctgggaaagaacgatacaagacatctcgttcagaaagctcactcacctccgtgtgcgcgccggctcaccgctgtctctcttcttcctttgttcttcccaccgcttgcgctcgacgttcttaaccccagccagtcatccgaactacggccaatactcctaccggttgaggaaaggatggatctttggtcggctcatggtccgtccttcttcctttgggccgctctgcattccactcgcttctcaaccagcttcccttgatgcgttcccttgtaggatatgtcggatcatcaatactcgacgttccactcaaacctacctgccctcctaggactctcctcgtccttcctcctcctccggtacatttccgtgttcctctcggccgaccgatcgaccttcctcaccctcttcgccctcggatcgctcaccgtgatgcatggtctgggtgtgctcaagatccttctcatcgtcctcgtcaactatgctctcagcctatcggtcgcaggcacaagatgggcggtctgggtggcctggctgtttgtcggtcttgtcctcgtggggaacgagtggtcagaaggttggagtcgtctttctctggtgaggccgttcaacattgctttttctctctgttttcttctttctctctctccctctctctctctccttctccctctctctctccttctcttctccttcaaggactcgtttgactgaaagcgcgatcaagaacggatacatgggcctgatccccagatggcatatctcgttcaacatcaccgcgctcagactcttgtctttcaacctcgaccaccactgggccctccagacgctccgtgagatcggaccgaccgaccgagccggatctctagaggcagaccaaacagaccaatcgtcctaccctacagaaagagagcgcgcgtcgagctcaagagagttgacggtctaccgatcggtcggtgcttatctggcctacgtgctatacactccgctttacatcgccggaccgatcatcacgttcaataacttccaataccaggtagcctcgttttctttgtgttcttgctcgtgctcctgcctgttgatcctggccgctgacagatagacacgcttcgatccttccagactcgtcggccgccggtgataccgagacggacgatctggagttatgctctccggtttgtgatcgcgttcctatcgatggaactcatcctccactggatatacgtcgtcgctctgaaagactcgaaagcgtggagagggctggggccaggtgaacttgtcacacttggtttttggaacctcatcatcgtctggctcaaggtgggtgccagccatgacaacctctctctggtcgagtcgggctcaggctgacggtcggttctttcggatttgtttgcattttgtttcgtctcgcctcgtctacacaaacaaagctcctgatcccgtggaggttcttccggttgtgggcgctgctggatgggatagacccaccggaaaacatggtgcgttgtatggcaaacaattattcgtgcgctggtttctggagaagttggcacaggagttacaacctctggatcgtccggttcgtcttttccttttcgtgtcttttccttattcttctcggggaagagcaggctcgatctctgctgaaatgtatctcgctcggaatatcatagatacatatacgtccctctaggaggaaagaaccgaccggtcagagcgacgcttatcgtctttacctttgtcgccctgtggcacgacttgtcgttcacccttctcacctggggttggttggtctccctggtcgtcatcccagagttggtcgccggtagggtcttgccttcttctttggtaagagtctagtctctctctctctctctc

SEQ ID NO: 1688 - DNA, 2040 bp, Xanthophyllomyces dendrorhous
agtctctctctctctctctctctctctctctctttcagtttctttttccttcttctcatccgtttgtctctctctttctctgtggttggacttgtgcactgtctcttggttactgtgatggggctcttgacaatctgaatcgaacacaacaacaacgacgaaaaagtacggcgagacccgttggtaccgacacctgaaagccctcggaggggtcctcaacatcctgacgatgacaagcgcgaacctgctcgggttcgtgctcggccccagcgggatccaagaactcctcttcggcatccggcagagcagctctggtctgggggccggtctggccggcctcgccggcgtgtttgccgccgtgcagctcatgatggagtacaggcaagaggagagaaggagagggatctggagaaagtattgatataatgtatcctttcctcttttcggggtgtagatggagacgtaaaaacgcaacagacggtcgtccttcatcatgtttgtttgtcttgctttgtttgtttttctttttccttcctaattcaccccctttctctcttcgggttttgtctggcgtgtgtcttgtccatcttttccctttttttattttcctctcctcagcttctactctggctttcctttgtttcgccattctttgtttcgtgtgacagtagagccgtccgagattcaggtgttcgccaacggtcaatgtcacaccctgccatccgggccaccagaaacggtcgaatgggaagcgtctcaaaggaaaacgaaagagcagagaacagagagaaaggccgtcgaagccgaagccttgaaggcaagagatacaacagagaaccgtagtctttcatgattcacaaaggagagagagagagagaggaaagagccgtggatggagggaggatcaaaaaagtacagaggaaagagttttaatggagaccggctggagagaaagaatgaaagtgtgtatgtgtgaggaaaaagagatggggatcgatagtcagtttctcttcattaacagagtatactgaacgaacgaataaagtgatagactcaccctcaggggtctgattggttcggaagagccaagaggaaaggaaagaaccaagacagacaagacttcagtctctgcagcaaacaagttgagagaaaaagaaaagaaaacacacgttgatgatgtagtccacagctggaagagagagaaagcacgggtcggtcgtgatcagcacctggcagacacatgagagatacagcgctctggccagagaaaagagtagaaaggacataccctgtcgaacagttcggatctcatcggcctcggcgtcagggatcctgtgataagcacgatgggccaagagcaaggcctccgatcagtaaatcaaaagtaaaagaacaagacgaacaagcactcggacgtgtcgaaagatgaacggaaagaaaggcaggacgtactcgatgaaaaagtcctcctcgatggccatgatgacctcgacggcatccaaagagtcgagaccgaggtcctcggtaaaggaggaatcaaggttgagctgatcgagatagagagaaggcaacaagaacgagttgtatgagttatcggatgttctcaaaccccgtggagttttccatctacaactgtttcttctttgagccttcccccccccccttcgttccaaagccatgtggtgtcttgtccaccctcccgttcgatcgccaacagaagtaccccactgtaagaaagagaagatactgttctcaccttgtcctggttgaccttgtcgaacgtcctaaagatgtcaaggatcctcctttcgatgttctcctttgtgagagaaaggtctggtccgtgccctccggcgtaagatcgagcaaagagcaaggtggacggccgagccaccacactagccggtctagtggcaagaagagagaacgtcctgggagtcacaggagcagctcggagtgatcgaatagcgaatctggagaacatatcggatgtcgggctgagtgtcgagggtgatgatggctgatggggatgagaaggct

SEQ ID NO: 1689 - DNA, 34336 bp, Xanthophyllomyces dendrorhous
ccactctcaccatcaccattaccatcaccatcgggtttgttgggtatcgctctgctcgtttgcgctgcgctatgaaccgctcatcaatacggatatacggacagagtgctcggggtgtgtccgcaccgattcacctcccgtcactctacaggcgatcgttccattcctcaccgcgctcgttctcgagatcacctcctccaaagaccctctaccaggtccttggcttggaacgatcggcagacaaaaaggtcatcaaggaaaagttctatgaggttcgtcgttctgtctctttgttctttctctgttcatcaggctctgcagccgtggtctccgatcctagggttgcaacactcgatcatggagctatagtttccgatctagtgctctgaaagcaagcgctaactcgacatcccttctatcgttctcttatcatcatatcgactaccatctctcttggccttctgttctgtcaaaccgtcgggtatattcaccttctgcgtaaaatcccgcctggcagctctccaaaaagtaccatcctgatctacgaccgaacgacgaaagcgcgaaacaaacgtatctagatatttcttccgcttatgatgtcttgggaaacgagtctaagcggtcagtatattttatcttttctttcccatcgaaccccattctctttttgtctctgtttttttttccttctttttcttcttcttcttcttcttcttctccttctccttctccttcttctgaggttcaatcgacggccgatgaggcaaagaagagggcggtttaaaaaaaacctggggctccctccttcacctttgctagctgattcgtcgagcaaggaaacgccttggatgactgacgcctcgcttgggtttgaccttttctgcgctcgcatcctatcagaaagcagtacgacctcacactatcacccgtgccgacctatcagaaccctcaaacctctagctcccactacccgtcctcatcccgaaacggtcggccctcaagctgggttcatccctcaaccaggacggcgcctcgaccacgatcgtcgacagcgtcaaacccgtcggctcattggccgttgaaccaccggagaccccgtcaaccgttctcacctccaccgggaaacacgtcccatttcggtccgtacgttaacccaaattcttatagctcgcctttcgacaggtacggctttgacgactcgagccggccgatgtaccgaacacggtcggctcctggcgaaggatacagagaaggacatgacgggaaaaagattataaacgaaaaggatctttccgggttgaccagagccttcggcgtcggcttgatggtcagtatcgctttcggcataggcgccggcttctcaggagcagccaggtcggacaatgggtccagaaagtagtcttcttgtcgtcttttcttttctcttttctcttttctctttctttctttctttctttctttctttcgctccctcctcaattttgaataacaagtaaaataaactgttgtagtcttaggtagtcagtcgttagatttcctttttccccccccaaaccaaaacgatagatggaacagaagagaaatctcgtgctgaatgttcgcacgatccggtcgagacttgccagggctttctctttctccttttctttcgccttcgccttttctcgaaaccccatttaagaaagttgaccaaaattacattccagctcataagcaaaacgaagaaatccgaactctttccccgatcctctcaacctctacacacacattaaaagaaaacatatacacaacaccggcctgtctaatcccggatgatctcccaaccgagtttctttccttcccagaagggaacgacttcgccgccatcaaacgcaaacctcttgacggcatcctcatccttctcatccgtcacctttctcaacgtgatctggtcgagtccctcgaggggtagaccatagaaggccctgccgtgaagactggcgaaaccctgcaacttgtcgagcgcagagaaagattccaacaggttggcaaccaaaggcaagaggataggagaggtgtacacgcctgccgcgcaacccacgctcgggctagaagtcgtctttgaatgagcaggatggggcgcagaatctgatccgaggaaaaatcggggatggccggaggcgatgacgtcccggagagcttttcggtcggttgggtactttgcaactggcttgcaaaagttgaacggttgaccggcccagtcatccacgaccaaggttaaatggtgaggggtgatcgagcatcctaccgtatcaccgcattgcttgacctgtgtcaagaaaaaaaaacccacagtgaaaagttgggtgagacgatgcgcgctaacaaaggcgaaacgaaaagtaaaggaagaacgacaacgttcccacgaacagcagcgacggcagcagcggtagtagcgtgttccaacacgatcttcaactttgggaaggccttgtgaatcttgaagaggtgagccaaaaacgtctcctcggcgttcaacacgcatataccctggtttgttcaacgccagcgaacggattcagccttatctgcctccctgtgcacctcgcaatgacggagaagctctaagtataaaaagaacatgctgacccgatcgtgatcactgggaacttctccatgcaagttcaaaaccatgccgacctgttccatcgccccaaagacatcgtagtaactctcgtaatcctcaatgccaccatccgaattggtggtcactccacgggggtaagatttgactcctctgatcccggccgcgtgggcctttcggatctcttcaggtgtaatggacgggtgaaggtaaagagtcataaggaactcgacatccggagcgagcgtctggaggtcggaacggtaggctagcgctcgggcggtcgtcgttatcggcggtgtcaagttgggctgagcggcaaggcgttcggcaatagaataggaagggaaagcgttgtttcaataagaacaatagattcaagcatacgaatagacaacccgttctgtcagcctttcgatcaacagctagtcaagcatgtatttagatggtcaacccatccttccaaaaggacggagagcctaaaagaaggaggccaactgagaaatccaactactgaccatcacgtacgcaacatcgattcctcctgccttgacgtggggcgtgacgagcttggagacagcaccttccctcagatgaacgtgcatgtccaccggggatggaacagagatggtggtcatgacgagaagaatacaacgaagggcggtgagaagcaacgagggtgatggtacgtcggatggtgttgtaggatcatttttaaaaaagagaaaatagaaaagaaaaaaaaccgccagcacatttctttctttttcacatctaaccatcacccacagagatcgatctcttcgtcttctcttccttttctttgtcttctttctctcccagtcactcagattagcatcatggcagacaagaggaaagcgctcgttttcaacatctgtgaatttctcagaacatccattcaggacggctcgatcagatcggacgatgtcgagggtgtcgaagtggctagtcagtctttctcccgtttctctctttacatcttccaagctcgttcacgctttaactcttggttcttacgacctcagttgaatgtatcggtgaggctttcggagtaaacgccgaggctgccgctgaccaagagcagtactccattaagccgaccactctgctcagtatctttgacgtcttcttaaaaaccagggagaagagcaaggtacgccgcttctcttcgagatgctcaaccgaacagttcatctcgagtcgaacgtaactaatattgctcttgatctacaggcctcgtctgctcctgctccagccgccactcctgctgcttctgcttcttcctcggcttcctctccgtcagcagaggacaagaccaaggccgaggcactcaagacagagggaaactcgctcatgacctcaaagtcatactcccaggccatcgcaaaatacaccgaggccatcgctctcaacggtaccaacccggtctacttttccaaccgagccgctgcttacagctcggctggtgaccaccaaaaggcagttgaggactcggagaaggctttgaaggtcgatccgtcgttcgtcaaggcttactcccgacttgggtgagtacaccgacttcattctttgttctgtgtgtccggcgcatgatgactgacacaacatcatgctcgcctttcttctcaaccagtcacgcgcagtactcgctctctcagttccccaaggctgtggagacttaccgaaaaggactccttctcgatccgaccaacaccaacttgaaggccgctttgaacaacgctcaggctcgatgcccttcatcttcttccgactctgaggatgatgaggttgctgcccctgctcctcgaaccggcggcgctggtgccggtgctggaggaatgcctgacctgagcagcctgatgggtatgcttggtggcggtggcggcggagggggaggaggaggaatgcctgatctcggttcgttgttgaagaaccctcagatgatggcgatggctcagcagatgatggccaacggaggattagagaagatgatggccaaccctgctatcagaggaatgttagtagcatatatatattctccctatcggcactgtctacgagccacttgctgatgatattttctttgttccgtagggctgagaggatgcagagtggaggtggacccccttcgatggccgagatgatgaacgacccttcactcaaggaggctgccgctcagttcggcgctggtcaaccttaaaaacagaatctttcttttccctctcttgtcctttttttcctttttttttccttggacgaatacacctgtagcctttgtcttccctctacctcttttatcccacatttgatgtacttgcccttttgaaatggttcatgtgtgtcccggttgcgcgtaatgtagatggtatctggcaaaagcagtgttgacgcgtcgaaaatgacaaaaagtgagacgatcatctttgtcggagggtcgaccgatcagaacgaaagaacatgacgccaagtttcatccattcctcatcttcaccagcccaactctactgatacatccgcccagaatgggttaccctgagtccgaacgccatcagcaagacggacagtctggtaaagacagactgtatatcatcatcaccggtgcgaattctgggatcggtctaggaatcgctacacgaattctcttccagctcgcttttacctcttcttccacggctcctcctccagattcactaccccaacaagcccttcttcagttcacatctccagacaccggttcatcagatttatcatgtccttttgtgaacaactcaggaatcacgctgatcttggcgtgtcggtcaaagtcgagagccttggaagctcgaggaatcttgttcactaggctgagagccgaatgcagaaacagaggactcaaggactctgagggagaaaagatcgtgaacaaggtcgagatcgtttgggaggctctggatctcagcgagatgagaagtgtcagtacgtttgtagacaacgtgaaaacaaagtgagtgattggtcttccatccgagccaaccttgttcaagaggtctaatcatgagcgtacttctatcatggttctgtttctccttcacgacccccaaaaaatgaatcacggacaaagctatccatatgtcactcatttgttcaacaacgccggtgtgggcgcttgggcaggtatccactggccaagcgccttcttcgaatgtctgaccgatccgatcaagggtatgaccgatccagagttcaaaaagcaatatcaaggttggaagagtgagaaggatgggcttggctgggtttggcaatgtaacgtgttttcgcattggtgtattgttagtagccgaacggttcttcgcaatctgttggctctgttgaaacgtttggtttctctgcccgtcctgacccaaactgcttgaccctccaccttctctttcaatcaagacgaaagcactgttaccgcacatccaacggtctccgtttcatagtccccggatcatctggacatcgtctctgctcggttctaacgcgcccaagctaaacttatcggaccttcaatgtattgagtccctcagaagttacgaagaaagcaaacgtcaagtcgatctgctctgtgcgtcactcgacagagaacttgcgagtcaaccgttaggcatcagatgtataaccggtgatccggccgtcacggctacagagattttcagacctcaacttggattttggttgtatcaagcgatgatgtttgcgttctactttgcaagtcctatcctttcttttttttcctcctctctgtgagccccctgctaaccatctgcagggtacgcacggacttcctgttgatcaaatcctctctcccttgaaccgtgttctacaggttcggctggtgtgcaattcacagaaccacccaatctcacctatgaacggcacgatcacatttgtccatcttgctctcttgtctgcctccttgatccctactccttcctcctctttcccttcatcctctacgtccaaagctgagtctccgacaacaccaaccgatccaccgcatacccaacaggcattcaagttccggagtcaggccgacagatggggtaatccatatgtgtctgtcgtacagttcgaatgggacgaagtggaggccggtaagttagtggactacatggagaacttgaggcaagtatggggcaaggctttgggagggttagggtaccaatcttgagatcctctttctctccttatatctcgagccgttcttcgatgctcgttttgaatattgtataaattgagaatgtacacaaatcaggtctcgttcaatacaggtgatcatccatcaaatacaaaccaagcaatgccatacaggtacaggtgagaacacaacagaaagaacaaagacaggcagagacaggcaagaacgaagagacttggttcgttcgctttgaggagaccaagcatttaaagcttagctttggcactcttcaagacactgtccaatttggtctattgttttcataaggtaactgtcagcaatgtctcggcgctacacttgaaataaaaggtgaacacaagggtcgatgttgatccttacagagagcatgatgtttcctttgattttgagctgtgaaatatcaaggtgatctcaacgtcagtctcataactggtaagcgaaaaggactccaagatgtccaacagtcaactgacctttccctatagtaccgattcatgatttgagatgacacaacgtttaaacgcatcagcttgtgagcatgtttgatcaagacatcacgatagtctacttacgctcatgaatgcctgagagacgatcaacccggaagcaaaaatcctgttggttaacgaacgatgacagcgtgggatgaaagcgggagaaaacgaaccttttgagcactattcaagattggttttgagtcaaggcaagggtcaaggttgtcagctttctctcacgcaacaggtcattcgttttgatcaagaacgaacttgagcgttccatcagcctgttcaattcagaagggtgatcagatgccagttctaatgcccattctaaatcagacaaagaataggcaacataccaagctagtgaagacggcatcgtccataaagatgattacatctgatatcacaacgaattcaaatgatcagccgatgcgcgctctattgaaacctacagagagacaatgaggtcgtttgatatgatgaaacacgactatcgacctaccaggtttgcccttaggccccttgacgacatcgccgtccttcttgagatcaatcgtccagatagcttctttacctgcatttttgatgtttaattggaagattccgtttgtctgaatgatcaagatacccaggtcacgttcttgttgaatcgatgtatctagtgcctgggagagcagaatggggcacatagaaggaacagaccttcttgatggttgtcttcttctcctgctctgacattttagaaaggccgtctccaagggcctagttttattcgattagagagatctcagcacatgttcaataggtggacatgaatgatggagcgaatcaagacaaaggtataacgaacggtcaggatatcagccgccttgaatccctcctcctgtacgcccgatcgcatttatccatcattcgttcgtccattcgttcgagtcatatcgtaaaattcttcatagtaagtatgattcgactagcacatggaaagcgaacaatcatctaccttaagatcgggagatccactagacttcccatcagtccgctgggatcccattgtatcagaagggttggataccatattgcctttttccgaagaggacgtgttagagacaggaagaggttcgttaggagagtcttttgtctgaggaacaggttgagatccagcagaggccatttgagaggatgtatataagagtttctgttagtgaaagtcgaaatgagtgtttgtacttttcctttgctctctccatcggacgagcatctttaggaagcgagctctccggttaaagatgttaaccggactgggagtcacgtgcgtcatcattcaagtaagtgcacgcttcatcaaagtcttcatatatataatgtaacatgcacagagaaacagatggacgacagaatcaaccgactcgagaagcactagcttgataagcagactaatgaattatagagggatgagaacaaggtcaacatccgtccagagtaagaagaatcgaaagaatcgagtgacagtggaacataccctaatctcctcgagactgatgctactcttctcgcacatcgaccggaagattccatcagggttaagatacaagttgacaggtgtatcaaactcgacgatgcttccttgatccatcacgcaaatccgatctgtaggaatgtatgtggagatatagcagatcagacgaggtgttctccggtttcaagtataaggaagagatggacggaccgtagttgagaatagttctcaaccgatgcgcaatacaaagaatcgttttgtctctacatgattttatcaagagtgtagaacgtgggttagaaatccaatagcaacaagagacggttgaagttgaaacacgaacttgaactctttcgcgatggtttcctgaattttagaatctgtttccatatctacggaagcggtggcttcgtccaatacgatgacctgatccgcaccgaacgatgaatgaaggtcaaatctctgaactgacaattacccacaggatatgacaaagaaagatgtgactgaccttggcatcctttgtcaacgctctagcaagtgacaccaacgacctttcacccacactcagattcaacccttcgtcctcgacaaccgtctccaacgtaaacttttgactggatgtatttcccgaatcggtttctgtcaagtaagctcgtttcatagcgtcccaaagtctatcatccggataaatcccgaatggatccaagttcgatcggattgtgcctacaaagtcagaagaatcaggcataagaaacagataagcctcgaagtgatcatgtttacagtcgacacataccgctaaacagaaggggttcttgtggaatgatagatagccctttacgcaagttagataaccccaactttgagatatccactccgtcgacttcaatccggcctttgctaatctcaacaagtcggaagagtgcctgcatgatggttgattttccagctcccgttcgaccccttttaggatgtgaagaacccacgtagcaaaagagaaatcagatgagccgggcatgggtaagagttagaagaaagaccaacaaccacgtacacgactccgatcttttctcctcccttgacttccatagtgaatcctttcaagacttcaggaagaccaggccggtagctcatatgaaccctaatcggtttgacacaaaccaagtaggacagtatgtttcaattttcttacaactgaaagccttggtcttctttatactgatggaacttactgccggaaggagatcttcccctcttgaggccaagaagcgggtggtgtcgtctcagggatatcatgcggagcttctatttgtagctcatcagcataatgcagaatctagtcgatgaaccgaaatccatttgaggtcaacatcttttgataaagaaacacagtgaacaaaaaagaacttgaaaagcttgactaactcgttcgacggaggtagagtcattctccacctcggcgacttgactttagtccatggtgaaccacaaaaagtttatcagatatacagtcatatcctgcgctaaatatcaaatcaaaagtaaacataccggacgagccaagagaacgcctgaacgatcgagatcacataaccaagtgccaaaccagcttcggcggcagatatatcatgaagggtaatcgagagaatcgagcagacgagaaccaataggttccctagagcatcgatcctaactccaagccatcgttgggataaaattgtcatgtagtacgcctgccacatcagaaagatgaatggtttatcgagtcgttcgggtgatcagcgctatgaggtcattatgagagttagaacagaacaacccaggctcttactcggttctcataatcgatcatgacatgattctcccgaatgaagcgagggattctaaacaagtcggatcatcagataaagcagttttgacaaattcagaaatagcttggatatcaaccataaccttaaggaggcttgggcttactctccatatgctcgaatggttgataatccattcagagactctccaaaatgagaatagatggacgatcgaaggatactgtccaacctcttgagctcacgagcagtccgccgatagaaagctaagatggttcaagcgaacaggcttagatgtctttcgatgggaatgcatagcggtgtagaggaaaaggaagactacacaccggcaccaaggaaaagacagtagaatacaggtacacatgcgataaggaagtctaagaacgaaacgaagccggtcagtacatcagtattcgcgcaaagaaaagaggaagatagtctctgccgtacagggttggacaacagcaatcagaatgattgaacctatagatcaagctccgtacgtcagtaaaagcaaatgaaaatcatatttcaaagaaacttcatacccatgatttgggagagtgtgatgatgaccattcggaaaccttcaggaagttgattatcaacgttatccatatcttttccgaaccggttttggattcgtccctgcggttttggcaagatgtgagtggacggataataatcagaagcagattcacaaagtattatattcaagaagactaaccaaaggagttgtatcgaaaaagctttggggggccttcatgactcttgcaagagcttgacggtgaagcgacacagacgcatagaaagtgacgaactaaacggccattgtccaacagagatgatcagactcattttgggcgctaccgaccaaacagaacatgaatataatcgacagtttcactcacagcaaataccgctcccataaggaatgtactgtatgagagaaagttgtatgagtactcctctcaagacatttcggtacataagaagatggagtgaaccaaaactcacaagacggcagaagctacagcgagtgttccatataaagtcatatagattcctatgggaaagccatacttgccctctattgattcgtaatcaaagattccaatccctgcagcatcagcaaccaacaatcccaacgcatctcgaaagaagataataacataagaacggaccttgccaccagatcaggacataagatgtcatgaccgttgccacttgagacagacacatcgtgatgagcaacatcgggactaggattactcctcttccagctttgaaataattcttatacactctcccaccaacagcaccggtgtatctttcttcggttgttatgagtttgtctccctgtttggtaaatctggatcgatcctcaggtgcagatacaggttcgggtatatgtggtttagtttcctcgacatcttcactacaacagaaagaacaagggtatatatgagtattggaacttgaggggcgccttatcagaagagagagaaagagagaagagtaacacagacactacatcttctattttctgttcatcgggttcctctacatttccgaaatccttcatcaacctagagaagctgccttcttgtgcgatcaacttctcataaggcccttgttccgcaaattggccgttatttatacaaatgatgtggtcaacgaaagcaagaaaatgaagttgatgagtgaccagaatcctggtctttccttgaagtgcgccgtcgatcgcattatagaatagagacttcccgacgtgagcatcgacagctggcagtaagtatcaagtgcatgaaatttaggacccctatctatcgtaggtatgatggtttatcgagcagagggagagcacgcaccgctcaacgggtcgtcaagaaggacgatgtcggcatcaaaataaatcatccgagcgatcgatacccgctgcttctgacctccagacctacatcgatcggtaggtttgaacaatagtcgtttttagttgttgttgttgttgttgttgttgttttcaaatcagtaagggcgcggaaacagaaaggaaaagagaccaaagaagaccaacaagttaattcctttctccccgatagcagtggcatctccacctgacaagatctccaagtccgcctccaagcttgcggcccgaacagcggcccaatacctttcctcatcccatggttgtccgaacaagatgttttctctgatcgttgcgttctatttattttttcaagatatgacttatttagcgctgtgctgaaggaaaagatagcatatgaatggtagatacctggatccaagcagtttgagggcaatatccaattgaaccggagaacgtgatggttccagcggctagaagatagataatgggttctcttaagacttcgtatgacaatatgatgagcataagaaagttcaacgatcaatgagacgtactctttctcatttctcctatgagcgcctgcaacaacgaagatttaccggagcttatcaagatataagcatccagccaggtgaccccagcaagttaccaaatggagtcaaatcgtgcttggtgatatcaaaaagaattgagcgctgaggaaagaaagaaagaaaagaacgtacccgacagctcctacaacagccacaagttgccctctctttattctcatctcgacgttgttcagtccgaaaggtttttccttatctcgtccattgtcctcttctcctccttccttagtttcggaaccggctggaccaacacctgcaccagaaacgcctccttgagtctttcgtttcccaatctttgactttttatttttctttgttccttcttccaatggagcagccgcatcccactcgaacgaagctccagaaacgtttattgcgtattctgaatttggttcgatgatctgatcatccgacagtgttttcgcaaggaacagctgtttgttagatgtatcaattccaacccgatagaaacatgagtcagaaccctatccagtcaaatatttaagatagcagtcaacaaagaaaggaggagaacggacagtttcgagtcgaccaaaggcatgaactgcatctgtggctgaactaagagccataggaagcatcgataatggaagtctcagtaactggaacagagccagactggcaaagacgtctccgatattaaggccgccgtgagttgctccatagatcaagaatgatataacagaactcaggacagctagattagaggtagtgagaaaagtgtttgatgttcgaattagacttcaggtttgtatgataaaacacgatggcagggagaaaacaaaagagagcgacgtacgaagacagacagctaaagctgtattggcagatcggaccaagaggaggttcttgatgtacccaagctcctgcgttcggatgtgattcagtctatccagatagggaagctcccaagctgtttttgaatgcactgcgtatgagaagtcttgcaaatagactagatgaaggggcagaaaggaatggatagacgaaccaaagaatttgatcaacttcattccgttcaagagttcagacaacaacttggacctttgatccgtccaaatcattgctttaagtcgttgactaaataagactttcattgctttagtctgcagaggagctgtagtagcgcccattcattaggccgtcagctgtcgttcctctttgaaagcataatgagcgacgcttagatcactgaaaggtgacgaactgataacgacaaagaaaacaaatccgagaacggctgcccatcctagattgaggcatagaaggatcagacagatacacgcctgaatgggcgagacgattatgagatggaagaatccagcagcgaaatcgatcctcgacctaaacgtcagaatacagagggaaagacaaaagctagaacgttagcattgaaaagaggtaattcatcggaacgagaagaaaagagttgcatacacgtcagtcgagatgtggttgattaactttccgtgtcctaagccgtccaccctctccttgcctgtcagcttgagtcccttctcatagatgcaagaaatcaatgcccctcggagcaagactcccgttcctgtggatctatagaagaactgtaaggaaaattcatacgaggggaaaggtcagtcgagaggaaactggggatgggaaggagagttgggagctacaaacttggtggttgcataacgaggccaagagaatcattccagagagaccgatggcagcgcctacaccacggccgacattaggtggagcctgaccattagctctggctgtagaagattgtttgataaagttgatgatgtatttgatgagcagcggagtcaagatctgattacaatctccaagcactagcaacgcggcaagagtggagcgggaaaagggagttccgaggtaaacaagaatcttttggtcagccagggagaggcgaaatgctctagtgcgttgatcagaagaaggtcaaactgactcacgtttgtaggctcctccggtccagtaccacttgaagatgacctcgttacaggcatacattagactgggccgtttcctgccggactttgttctccattcttcttcactggccttggtgatcatccaacagacacgtctaaagacgctgggcttgagctctccgttggcaagcatggtgttgtacgcgtcggcctctctaactcgtctctccctgtgagcggaacagaagagtgatcaagccgggttaggattagacaaaagcacaacaatgtgtctggtagttcattgaaacacaaagaaacccttaccaagcggccataagtttatcactcagaatcttggaatctgcaaaatccttatcgagaacccatagatcggtgtcttgtagtggccgttgggagcctaggaacatcatcggctgtggccaggtaaagaaatgcctggagatgatgcctgcttgaaactcgggtgaccggggcgcgtcgtccatcgtacgagggggatgaggaggaggagtcggtttcgaaaaaggaatgaacgatttcctaagcacacaaagacaaaacacaaccgtaagcctggatttatctggaaagagaaaagaacagataacgaggaggcactgaccaagtgactttcaagtcctccactccacggccatactctttgggctcttgatcgcccttggcatcatcaaactcgtgtttttctaaactggacgggtcactcagaatacccttctcgatatctcgctcggtctgtttcgcgggtgcggaggtgggaagggtgactgaactatctggattagagaccggaggaggagggatatacgttggtgcgtcgaacgttctgtgaaagcgggaagagatgtgggagaaatatcagcatagcttcctactctcggcccaacatcgatcggacagaaagagcatgaaggcggagaagaccgaacggcgctgtcgatacagaacacaaatgaaaaggcgaggtgaaagagaaaaaagtggagaaggagaagaaacccatagacatctgactcacaacggtttgtccacgcctttttccacagtctccccatcagcaatctctctagccagactgagatcgggtccccttgcagtgtcgaattgtccgttcagtacgattctttcgaggtcttgtggtgaggtaactatcgaatcggtaccagtcgatcggaaagaaggatctgaattatcatgagagtgcgccatgtagatacgtttgtgctcgatcgagaaagcagacaaaatgtgagcaagatataactcttttccttaagaacaacaatcgaaccgggtgaatcgaggaaaaaagaggatgaatgaatggtgaggagaaaaaagaaagaacaagagacgattagttatattgcttaccgaggcttgttcggtcaagtccgacgatgaacgattagaatctatcgcccatactctcactcttactgtctgtttttctgtctttctttctctttctctccagttttgaatcaatcagcttgatacattgtatctggtgtatgtccaccgtcaccgacatccattcattctctagcgtctgttgtcaaactgtgtctttgaccgtccgaattgttgagcatcctctctggtcaaaacgccggtcggggaaattctttacagtgatggccggaaaatgagagcgatcgttaattaggtaatcaacatatattacataagcacatttaaccctagcattcatccttctacccatactctccttccatccatctgccagagaaaatcctgaatagaacagaacaaacaacagcgagggatccttcgtccatcaacttcgcccactcaattgtatgtccataagttgaacagatcatgagagttcatgcttgtacttgtactaaagctcttgttctttctgctgcttccgctgatttcgctctgtttaactgctcgttcggcacggccagtcgcggttccatctaacgtcttacaaatacccctcgcgtaccctctccccctttcttttgtctcgtccaacagatgagagactccaaccatacgttccctacacagaacagggcgtgtgtatgtattactagtgcgttgtatgatcgtagaggtaagtatttcttctcctctcttctttcttcctaggtgtacgcggcttgttcttccttcttcccaacaaatctccttcaacttggatagtcttcttccggtagagtgaaacaaggagagagaaagagagcagccacgcaatacacatcttatgagaccgtctccagggctagcattcaccagagtggtctctgtctttccttcatactcatccttctaaagagggactgcccttgtcatcgagaaacaagattcagatccggtcatccaatctctcacgctcatctgagtcaaatcaacgtgcccctttcatcttgttcgcgtcgttgcatcggacgttgttccatacctatcctcttgcacctaatcttttccattctcttgcattcgtcacgtttgtcggagtgaaattatgagtttgaactgatcttatacacacgctttcccccccttgttcggtcgcccgaccttgaaaccaaaccagccctggatacaacatcggccctacctctcctcaattctctcacccatctcacatacctgacctcaacatctccccgaatcagagaaatccttaccctcgacggcggactcgaacgacttcttcatatcctccgaaattcttcgatccctcgacctctaccaccgcctcctgatctctacggcctctccctccatccagccatcccagcctccactggactgctctccccggatcgagcaattgcctaccggttctcactcgcctttcaatgtgttagcaatattggtgtgagagggagtgaagccatccggaccagagtggtccaggctggggtgctcgacattgtcgcgcaggtattggagatctggttgaaatctaagggaatgtctatcgaggccggttcgtctggcacaggtgctccagcaggttcccatgtatcgagcagacgtaaaccagtgatccctccttcctccaccaccactaataacaacaccacaacatccggcctgttcgaaagtggccacgaatctagggtggctcgaggcacgaccgacacggcctcagtaccaaatgcctcgtcatcgttgacgaccgctcccaccgctgggagaactctagacatggcccctagtcgatatcatacccactccttacaaaccagtctgatcactacgtccgaacaagatctctcatctcgtgctcatcatccgcgtccctctcaccaccaccaccaccatcatcatcatcatccaacccaagttaatcagcatgttgcccctggcgacagacagccatccgccctgacggccccgacctccctatatggtgcctctagatcagatcacgacctctcaaatcccatccagcccgtcgcttcttcatcctcttatccatccggggcgacttccatgtccatgcccagctctttcaccaactctggtgacgaagaaacctcggatgtgaacgaaggagagagtagtggagcatctccaacgacatatgctgccgtcgactctgaaaccggccgagaagatcttgaggaatcggagataatggatgtcgagatggccttccaactggctgtctcggacgaggaaaccgcccgtctcacagctatagccagtgctgcactccaacggttctctggtgatatctcattccgagcccccgtccccggaccagggactatcagcccaatgggcgagccgtcaggatccgacaacttggccttcagacgatcagatcaacaagtggaaacagagagtcctacacctagaatctttcagggaactctccttccatccggcatgaccgtagaacccatcgttggctccatatcggctgattcaagtcgacggccatctcctacgagatcactcagtaatagtgcaaacacatccgccgactcatcccctagcatcccatctgcagccacagtcatccctattgagccagccggacgagtgaccacagctcgacacaacacattgagagctccgacaagaccgcctttcaacaaccaacattccgacgtgagctcggctggaggaagcaacgtgtcgaccccgatgggaacccctactgggacggccaatcgagaacgaagcgacacccttatcggtcgacctactctcgccccccgacgtaggaatcgaagggaaagagtggccacgcctggaaacgaaagcggcacgacaggcggagaggaagaggacgccgacgaagctgatgagggagagttagtaggtgacggagcaggggctcgaccgattggacagacaggaatcgacggggctgttggcggagccggagccgcgttagaggtaggtattgttcaagaggaagacggagcaacagacattgagtcgggcctggttgacggagatatgttgaatcagaatgtcgatcttcagatgggagctcctccaggagcaccgggagcagtcactcctcggacggccgccgagatgacacctaggcagccgtttttaccgatgacggatccccaagtgggtgttggagcagcaggagttcccggaggaaatgtcggtggcgcaaccccgctggttcgaccaactcaggccttgggaggaccccacggaggaactcttctaggaggtgtcaatttgaacccacctggggtcagtctggctggatctccaatccaaaacacgatcggtggcgctcagaatatgccagggatgacggcgccagccgtcgtcgcgctcgctaccgcccaggcgacccagcgaactcttcgggacctcagtatggagaccggaccatccaccggttcaaatgagcactgctacagggacgacgacgtcttgctttctctccaactcttagcctatctttcaaagtatccgcacgtcagacaggcgtttcatcgaccaagagaaccgttccacgcgaacctgtctctcaagcttgcaccgggtgaagcgccacttccgatgcggcctcctctgtcattcacaccaaacatcttttcactcgtcgaacgattcacattcaaaccatcggcgacggacccaaatacacccatcctgcctgaagagatcgtctactgggcaggggtcatcatgcgaaacgcttgcaggaaggacgaaggacgaggtgggatcagacagtgtgccaacatgagttgtggcaagtgggagagtagcccaagacagtttgcgaaatgtaggagatgtaggaaggcaaagtactgctcaaaagaatgtcagagcaaagcttggtctgaaggccatcgattttggtgctcgtgagttcttgttcattcacatttgagatctgggctggtctttgttctttgactgatgctgacttctggactggttctcgaatatccaacgggaccatcatctcaacgatagccaacgaggcgagactggtgatcgtgcagaccccagtcaagaatcctctgatccggtctcttcccgtggagacagacaccaagggactataccaccccctcctgtccaataccaccaccctgcccttcaccaccaacacgccggtggtcccgaggcaagtccgactgtaggacttgttcatcctcgaccgcctgctcatacgaggacccgaacccggacgaacaccaacccgacgatcactcttccttcgctcagaattccagctcgaactcaggggatggatgtcgatgtggacactgctgaggcagatgccgacatagatcctaggacgatgcctgtaccacctacacctaggcctcaacctatcgggcggacggacggaccttctttacctggaggccatccttccgttccgttcgctcgagccagaacagatggacttgattcccctctgtcaacgtctgagccaggaaacggttcatcaaccgcggcctctacaaccgtcccagcggctcctacgctctcaaggtttcctcttcctcagtggggcttggacgtagcaggtggcctgttcagccgccctgagcaaccaatgagatcgtccactttgccggctgatctcggccagagagcttctcattcttcttccagcttcgttcctcctccaactagtacaacggctggttctaatcagagttcttccagctccaacaacccaaacatcaactctcggatacgtgctcttcctcatataaccaatgcttcactcactgcatcgtcaacctccttgttcgcccatccagccaattcaacttccaataccggctcggtctccaacttgtctcttacggcggcttctgccggtgcaaactctggatcgacgtcttctacatcggcattctctagggcgttccatttcgtagacaggctcggcttgggagggaataatcccgatcgaacatctcacgttcctggtgctagcgccgatggtgtgcagggcgaaagaggaatagaacaaacaccgttcggacaagcgccttcagcacctcaggtccatcatcgacggctcttcttcagagggtccaacggtcccggtggtcttggtggagagttaggaggggtaagcagaacgggacatgatagtgagatgtcgggttaatgatctttccggaagcgttctttcttcttccttcttcatttctttgtctgttttcttcaaaccaagagtcatatcaagttgtatataagtcaaatcaaaccctcgcgagcagaaccatggggatttcaaccccttcttcccatgaatatagtctctcaagaagtcgagcagcctttctctctaaatcgtaaaccaacgtcaagtcttgccaacgctctcattcctttccgtcctattgtgatccctattatatcaatggatcctttgcatccgatcatctctacctttccttgttctcaaggttcttcttttcttctgtgcttgaatttgatacactcgcttataataattccattccgaacatgccaaagtaatccttcttttccttatgtttataactcctagtgatttttttcttcatgaatttattcacaagacactcgttctaggatttccacagaataacaaatgagtggatgaatgagcaaacgattgtgagctcgagtggaccgagaaagagagagagacagaggatgtaacacgtctctttcggcaagtgctagctctagatcttttcattccttgagtcgtgtctcctatcttctatctttcaatttcctagttgcattgtgataaattccaatgtatataattttcttctctccgttctttttttgttctttgggctagtttgatttagattattcatctctgacaggttttaaagtggctgcctgggcgtctctagcggatctgagggaggcaggaatacaaagtaggatggaagaaggaagaaaagatgtgagtatcgataaacacggacgcaaagaacgatatcctagaagagatgaaaggagaaaactcacttcacaaactcggtgaaccaccttctaaagttctttgcgtccaacgttcgaagttggttcaaaaagtcagctgctgtctcgggcggacagttgatcgatgggaagaatacaccgcctagtctatcgaaagcctcctgtcctcgagcggcaacgactgatcggaaaagattgacaacctcggacataacctaagttcgtacggatcagaagagtgagacagtagatacatggaaaaagaatacacatgagaagcaacatacaagctgggcctgtccgtccttgatcctgaaagcagggttagaaggcacctcaaaacagagagggatcaatcgatcatagatgtatccttcaaatccagggataacttgagtcgtaggcaacggtccggccacattacttcctaccccctgagttccggcaagtgtcactcgggcggccgaggggttcgtagcccaggcgatcgtcactctagataagatgccgaaggctaatttttgaagtaccgggtctccgaactcggatgcgaatccaatcacgttgttcaagatattttctaattcaggcttgttagctttcaaaacgttgagaagagggaccataacaaagatgtatcagcgtaaagaaaccagtaaaaaaacagatgtctcatcatagaaacacatacttggcgaaaggaaaacggcatctagtcgagcacccatgatggacgcgatgaaactgagataagcggctcgaagagcattgtgagagagctcgtcgtccgttccgctaacgggttcagccaagatttggaacaccttttgaatcaccggaaggaccaagccatccagaacatcgaacaagttatcctgaagaccatcatcaacgtttaaactctgattagtgacacagtgtctagcgattggtcattgcaaacagtagatataactgtaccttcaacttgtgcaacacaagacccaaaaatcctaggaactcgacaagttcgctgggctcaaactgggtgacgatacccttgacgaacagcgcgacgtactccaacacccgttgactggcagtagtaactattcgagcgaaagagaaccgagcctggtaaacatgcaaggaaagactgtcagaacacatgttcgagcaacctggctctacagatttagctgggcattaagttatgaacaatttggactcacagcatcacgaatcactttgatagtgttcattctttcaagcacagccaaaattgcttcggtcgattgcttgaacacagcgatccacggcggaggtgcggcagccaaggcggcatcggatggttcaggaaagcctttagcaatgtttcccatggccatcatagagtggtgcaccagaaggatcgatgcgatatcgtcgggaccagaggcagcgatttgaagattggaagagatgagggctagtaatggattgatagcggcctatgaaggatgcatttagtagagagaagagaagaagtaatgagccaaaatcgttacatatcgacaaacatgagctagtatcatacctgtaagaaagccaactgctcgttgggagagtctttgaggacggcaataaggattccaacggtttcaaacaagtagagctgagcatcgaaagcggaagcggtcagagtggccttgaccaaaagatcctcctctggggactcccgagctggaattactggcttgatcaccagcaaatcctagaaagttgatcggtgagaatgtgagagcgtggagttaagtatggaggaactcattgtcttttctaagcgcaatctggaaaacaaaatggctacttacgctcattgattctagaatagaaggaaccaaagttgagtttaacgaagatttgacgtcccgaacaaacttgtggaacagatagaaggcacgctcctggacggcaggtttttcgttatggattcctctgtagaaagcgcataggagagaagaaatacttagcttccgagctagttcgaagacggagccaaatagtaaaccaaaggtaacaagaagttcagagacgtacctagtatccaacaaggaacctaaagtgggctgaatacaatcaattctcatcttgaaaaactctgcatatcgcgaggcacattcgaagaactgcaacgggactgctggatgagggtaactcgagatgtttgactcgactgtgctaatcaaaatttgtccctgcaacgttagagggagcgacatgtagtctacattcactttgggtgtcgaggcgccagagtcggtcatcccgtctgacgaagaaaaggaggcttttcgggttttagtgctagaagcaatcgccgcctgaacgtctggaggaatctctacgaaagctgcacgacccgccactgatatgagagtaaaaaccgaaccaggggttgaatcagctcttcattcatgtaaaatctttatcatcaagtctatacgtacctcgagtcacactaaactcgctccagctatataccaagaagagcgccagctcggcctgctgccatgtcacacctccagccccttgggactggaaagtctggagggtcgagagaatgaagttcgaaacgcttccgacgaaaaggtccggatcgatattcgcgatagcttccacagcggttttgagttgcttcagacatgggaaacacgcattgaagaaagacaagtcgtgggtgttagtcaattaatgagaaagagcataagaaatagagagaaaagcttgttaccttccgcatggtctggaagttgttgacctcctcagggtctacatctccgtcttctcctcctagactccaatcagcatcccgtccccactccattttcttcataatgacattcaacagagacgtaaagaacgctcgtttcgaaggcgacaagttcagagcctctcccttctttgcgcgcttgttctacagaaatatttatatatgatgtagacatgatgagcgatcatagaacatatcggaggtcgcagaaggaaggaactgactcgtcttaggatatcatccaacattccaaacacggctgaactggtatcagtgctgacgtcccccaaaaagttcaagaatagcggcagactgagttccaacatggcttctgcctcaacttttgtcttgtcttctgcaagggcttcaggcggaacaatctttcctagttcgattccaaagttgttcaacagcttggctgttcgttctctaaactcatcaacctctccgccatcacctgcgccggcccgagtactttcttcgagcgggctaagggcgttaacgatagaaaggaagttaagaagctggatcttctctcccggatctttcattcctttgagcgtaattcgagagagaacatcaagggaaagtagacggaaggggaaatgagagtgctgaagcagtcggttaaggagatggagggagtggggagtcacggtcatggtaatatccaaccaagctttatattcaaaatgacagtcgttacaaatcgtgaacatcgtgcgagattttaggtggctgggaccacaactgagctaaaaacgaggagaacggcgagggaacaagtactcacggacgtagcctccataagccttcactgcccattcgacgacttctgcccaaccttgtccttcaccaccatccattcgccctaatgcctcttcccaaacagtcaagcaagcgtcgtgcatggccggtgcctctctttccctcatttcgtccctcaacttggcgtcccgctcatttctctcctgcgtccaagctcgagcgctcttcaaaagtgtatcatgtgcttcctggttgatctccacaatggtgtgcaagacgaggagggtggtatgtgggttcacttgaggctttaccaggattagcagggttgagagaagggaaggggttgaggaagggagaggaggatactggagagtcggataggacgagatgaagaggagggcgagggtatgggacactttgttccggagcagggattgaactatagtttattttgtgccagaagtaaaaaaggtaagcatgagaatgtaggcagcaagaaggaagccaggtaactagaaggattgcagccacttaccaggaccaacttcagcagctccgttgacaaactcggtctgaacataatcaaggaaagcttgctggatggcagctcgtgattctaacgacagcgcatccgttctaaaaaggagggacaaaaccatcgcgataactttttcaatacgagacaacgggccacaagggaggaaaacagaaagagaaccgactcactttggtttatctcctagtagttggtccatgacttggagactaagaactctagcctcgggtgagcacttctggtttccatcttttccaacttcagaacttgatggtgcccctgcaccttttagaaagatggatagagccaactgaacgacgaaagggacaaggacaagaacaagaaccaaagagcagtgaaagaagcgccctcatatcagtatgcttgcttaaagagtggctgatagaaatctctatgatgactgggattgagtcatcattgaagagagagccaaatattgggtcgtccgacaggaacgatatagagcatatggacatcggttgcctacgctcgcaaagtaccgatagcaaaccgagacagaccgaagagaaagaaacttaccggccaccattgatcacaatgtatcactacgtctcgaagaaaatcgtttgcctgttgcctgagagattgatctggcgaagaagcaatttctacagcgtacaagagctgcttgtcgtccatgatatgtgtgtatgtgtgtgagtgaatgtgggtatgtgtagacttttgtagaagattgtctgttgcgactattttgtttttatcctctgttttactggagaaaacccctactcttccgaaaacagagacaacacgacttcaacagagaatcggagaagccgagaaaggaagggaaagaaaagaaaagaagcgaagcgaaagaagaaaggaaacaaggaagagagagtgaagaaacggtgtttgtgggtggaagagagaaagagaaaaagagaaattctattttcttacgttttcttctaatcccacccggtcgttttccttgtgttcgtcctatttccatcacaacatctctcttctactttccttctttccttctcacatgtatggtcgtgaacgagagctagacagtaattgaatgccttaagcaattacggtcaaggcgcatacatgtgtatatttcataactatcgaacatgtctttacagtgtacaaccggtcgattctgtatatgtttccttgtatatcccacagacctgaattctttttggcttccggataacaagagcccaggcggttcatcctagaaggatatcgatagtgtattgctcatacacggatcaatcgaatgggtaaagggcaaaccttgacaagcactttatggtgttcatgccgaaccgagagagtgcttggccactttagaatgggcgactagtccaatgacaacgcaagacacggtgaagccgatactttatgagagattcagtatgtatatggtccatatgagatgggtatcaagtagagaagagttcgaaacctgttggctcaagtgaccctcgaaatagacaacgtctgaatgaggtcaaacgacgtacaactttgcgaacgtctgacgggatatctgacgttcctcctctgatgttcgagcagacgcaaatatggctagattggaacagaaggcgatatctgattaggatagcatacctcaaaaatggacatagaaaggcatgccaccaacctctgagatttggaaaggaagacatcctggatgttgtacttcttttaaactatgatagccagtttgtacagtgttaggaggctacacatagcctcgaggcgtgcctaaacctcacgtgcttttttgccacacgtgactcatcatcaaagcgcgtctttcgtgcgcttccttcgtctgtccttttttttcttcttcttacctgctcttcacctcggaacttcttgcatctttcagcatagatacacgttacaacacttcttgtcaatcaacaaatatgacttctacacctcccaacggtccttctcgaagcaggttcgcctccagagctcctatggatatccttaccgaggagctcgacggccgagttctctttgctattcctaagaaaggtcagtcctgccttaagttgcacccacgttgttttctcattagctcgtctcgaacgcgtctttgaacttttattcctcaacatttctatctcctaatcaacaggacggcttcacgagaagtgcatggagctcttgaagggtacgcgttactttccttcctctttcttgcagtgtccaaccagcttactgtctatcactcttaaaaggtgccgacatcaagttcagtagaggacaccgactggatgtctgcctcgttcagaaccaccccatcgctctgtatgtgtgttgttctgagtcagactcacactcccatcgttactttgccatgtcttttctcaccttctcccatcgtcatgatttgccttggtccatagcgtgttccttccagcttcggacatccctcggttcgtcgccctcggaaacgtttccctaggaatcactggtcaggatgtcatccttgagtcaactttggcttctcaaattaccgagctcctcccgctcgactttggaaaatgtgctttgcaggttcaggttccggtggcctcgccttaccagtcgctcgaacagttggccggtaaaaggattgtcacctcttttgaagtcatcgctggtgagctcttcaagggtgtcgatgagaaagctcaggctgaggatggagcaaagacgagcgtggagtacattggaggtagtgtagaggctgcttgtgctttgggagtggccgacggtatcgtcgacttggttggtcagtcctctatgcatctttcttacctttctcgtccttcagtagttatgttagcttttttgctcaagagaagaattggaaatctttattgcaccccttcctgctctgtcttcctcagaatctggagacaccatgcgagctgccggtctccacgccatccacacaatccttcaatccgaagccgtcctcatcacttcctcaacccctcacccaactcttgactcggatcttctctcgtccgtgacctcgctcgtccgcactcggctggctggtgtaattgccgctcaacaaaacgtgctctgcacctacaacatccctcgatccaagcttccccaggctatgaccgtcacccccggtcgaagggcaccaacgatcagttcccttgagaccgaaggttgggttgccgtcagcgtgttggtcaagcggaaagggatggccgaggtcatggacaggttgacccatgttggagcggaggatatcttggttaccaagttggataactgccgtgtttaaaagagaacgaagaaaagggacatgaacgaaaaggcagattgtaatagatggttttggcctgattccgactcatcatctggtgaagattatcacgaaaacgcagaacgaatactgcaaacgtagcttcttgagcgtggttatctcaaggagatagaacgaggaaagagagaaaaaaatctgaaagcggacgtgatcgacgcgactgttttcttaatgaagcgaattaaaaacgcggaaaaaaacaaactcgtcagctgaacctcccaatacaaccattctctcctccgtcctgcttcatccttgattcagtcaattccttcttctaagagagggaaggatataccctcttgtttttttatcatggatacctatcgcccatcttggatgacagacgagctagaagaagaatggccagcctcggagcacactccttctcccccctcttccggatcatcttcctctcgacctgcacctcttggttctcttcctctcccgcaaacatttcaagctcaacttatgccttcgacctctctattctctccaagtttaatctcgcctctgaaggatccagaacctgtatcatccgtgacatctgttcaagccccgggaacattcattgtcagaacggatatggaagctcaaggaccgtccacacctataggtccgttgtcaaagctcaaaggagctatcacaccaggcggtcatcaaggcggaggaggaggattaggaatcattaacagttttttctcaccaatcgctctcgagtcaatgttcgagcctccttcaccgagctctggatcggaagatgatcatattcggaacgcgaacaggtctacttctcagacacctgaactgaatagctttcagcaaacatcgtcaactaatcagtcacaaccacaaactcaacagcaacggatatcttcgttcgatatgacgtatccaatatcaatctcttcctcttcctctccagcaaaggaagagatcgtaaattcattcgctgaacaaccaatacctagttcacctacgcattcattctctccttcgccttcaccctcgcctctttctcgaattcctccaagtaataatcaattatatcatgtacctcagcgtccatccaggctagcaaaaggattcactccggaagatatgacagcatcgacgatcgatcctcacgatatgtctcgtgtggaagagacggggtatgacgatgaagtgaaggaggatttaatcgagaagggagacgtagtcgatgtaggcgaggtagagcggacaccaagcgctgacaatgacttgaaacagacagttagttctccgttgtatattcctgctttatagtcctttcaatgaagtcctttgtctgatctcatctcgagtatcttcttttgctccttccttctctgtctagcatgtagacaacagacatccagattcgttcaattcattcaacacaatcttgtccttggatgaccgttcgccggataatgggaacgaaactaccctcagctattcttctaagagcgatgaggatgatatcgaaacacaagcagaccgacccgaggaccaaattgctcaaccgacatcgactatcaatccaacgacaatcgcgtcttcctatcctaatacttcacgaacatgtgacgccaaagcctacggcccacctctctcacccttctctccgttctcccccgttaaacagtcagacgtcagctcggaaccaaagaaactccaactgtttcaaccccaattcgatacattcactagggaattcatgagcgccatcgtagacaatatcaatgcttccaccagcacttcgtcctcttcttcttccttcggcgcatccatgtcatcgtctcctcaaccacatgcaggctcaacgacatcttcaacagaggacgtccagtcgatatccatcctatcagacgaggtctccctccggtcctctaaaagaataagattatcacctccgaaagcagagggaggaaggatcccatccggctcatctacatatagtctagagagacttcgaaaatcaaagtcctcggcagccactataaatagagattgggatagagaagccaaggagatgatgatcagggtcagagagctggataaagcacaagtggaatcagataaagagttgggtttaattgagaaggaacagaagtcggaggagaaattgagaagagaaaatggaaaggtgtcatgggatcatgagagcaagtctgatcttgattcagagacgaagcaagatggtgaggcaaacagtaatgatgccgtgcaagaatcccaggaaaagagccccacaggagaacacggttgtgagtcgctataaacttttctcatatctgttcagattctggccatagaacatttctctccttaagtaaactgagtctttcttatgcttcctcaatttaattcaaaagttgccgaacaagcctcaaaacctatccctgcttctacatctccttcgtactcaccgaaaaggtcgcttgcatcttctacaaaatcttctgaatcgcgcgatcggctcaaccaccctcctcttgatgatgacactgtcttcaaatcaagcgcttcttcatcagatactgttagaactcacaaatcggtcggatcgtcaggattaggcgaatcgaaaacggtggatggaaagccctcattcgaggacctgcgctcaaagaaaagaagtccgatgaagcttttgaaaaggttaagcgcagcagataaagtggagaaggatttaataaagggagagaaggatttaggttctgtgattgagagatcacaggctaggttagctgtgagtattgtggaatttctccgtgtcaatctccgggatttctttgttttgtgtaaatcctgacacgtatatgttggcatccagcaacgacggggggaggtatcacagtcttcagtcctggagcttcctcgtgtcggaacaggcattccgtctagacctacctctcgacattcaagcgccaccctgtcaacacgcgctacccaagaatctacattacatacaaatccttctactcaatctacctcttccacccgagatatgaatactatcgagctctcctctgctgtccgaatgacgactgtccagcccattgtttactcgttagaagaaggtcagaagaaggagggagtcggcttggaggagaacaaagggctgagtgttctaccagaggagacagagattgactctattgaagggccattgtcgaatttgcggcgctctattatgggtgttgagtctcgagcgcctcaccccccgctatcgaacctagcagcctcgccttctcgaagaccgttcagtcgatcgatatctatcaattccaactctttcgacacctctgattccccggtagacgaccaggatggcttcaatatggaagaagtcgctgcttcattaaagacgtttcaaatcccatcttcatccttgttgtcttcgtcctcttcttcaggctcatcatctaaagcgagcacgcccacatcgtctccacctcatcaacgaccgcctctgctccatcatgcggctaccgcacctgtaccactcttgtctattcatgccacgcctttgcctgtaagaggtcaacgtgaaagaggcctatctactggaggcttacgtccattcatcacgccagtgtctgtgctcaagaagccgtctcctcaaggacaactgggttcagcgacgcctggttcggttcctcacggtcgaagcgttagtttctctgatggaaggaagactggaaagttgaaggaccctcaagtgcaaaagatcgagctttcttggaatgagaaagtgggagacgtgtctggggatgaggcagggccagaggcctccgcgggaacttcgatgcgtacgcatagaattcagaacttactggacgatttatgggatgactccgattctgcagagagcggtgagtttgttatgtttcctagatttatcctttgcgaacataggttggttgggaactgaaactatccgattaatacatctttttcttggtcagacgtcgttcacgacacgccttcgaaaattagtcaatccagttctacccttccgtaccgttcccgatcaaatggtttaaatcaagattcagaaatacccgacctcactcgtctctcactcgctcctacgtctcgctcattccattataatggtcggaagaacaaaccaggagacgca

SEQ ID NO: 1690 - DNA, 7452 bp, Xanthophyllomyces dendrorhous
cgtttctcaccgagtgctcttttggcgctacgagggatcgtttggttgagatcatcacggacgtccattcgtttgtgtcccattgggatgagatgacgtctatcgatatcgaggggaaacaggccggaagcgtagctcggatgaaggagtttttgccgaaacttcttgaggccaacctgtgggtcttgacgcatccttcttcttctcttctggattagacatctgatatcgcgctcttgtcttgtttgtcgttttcctcttgaacggggtgaatagaaatcgaaatgacttgacgtatctgacaggagtgccgtcctccgtggagacactgagagctgcacacaaccagttcgtcgctcctctccgatgatttcttctcgatgaatactaatggctgtgtccacccgactcctctctttgtctatgaaaaccagactaagcagtctgaccgctgtagctcatcttatgaaccttcaatatcttgacttgagttacaaccagcttgattccgttcaccgtgaggcaatcttcgtatttttcttgaaggggtttcctcctcgacgtaaacttattcttgctttcaattttgatgaacagaacttacttgtcttcgtcaccttcgagagatcaaactcgatcacaacaatatatccgacctgacgcctctttttgccatcgacaacctgatcaacataagcgcggccaagaatcagctgtctttgatcacctttccctcttcaacatggtaagcattagaattcaactgagtaataacctttctttttcgacggctcatcgtcctttctttcatcatcgtcatatctctcggccaaacaaggtctcgtttggaatctcttgatttgggacgtaacagaattgaatcaatcttcggcctagagtctctctcgagcttgagatctctgatacttggtgagttacttggacaaatagcagtactgattttagacttgcgcccttacaacatcactttgttctctcttttcttctgcagatggaaataagttacgaacgctcgagccttctggacaaattcgaaagctccgaagcctgaaagtgagcgacaacaagttgacgcaattggacattggtcaattcccacaactcagaattctctacgcggatgacaaccggttgaagcgtatcaatcgatcggccaggagcacaaagcttgaaagattgagtctgaggaaccaggagggcagtcacctgttcgtttgatgttcctccttcgctcatatgttccgtcatcatgaaatccttcgctgatcaatgtcttctgctgaatgttctggggactagctctctttctgctgttgagttgaaagaagtcaagcggttgtttgtttcgagtgggttagatttaaaacaaatgttttctctggacagaacactgacagttagatcttgtttggtctcacagacaacccgatcacccccagcttcttcaatcagcgatgtccaaacctgatctaccttgaaatggcgtcttgcatgctctcggccttgccggatgggttctcatcttttgtacccaatatccggaaccttaacctgaactacaactttctaagcgacttagttcctctgcgaggtctacagagtctgaccaagttgagtgtggttaaatctagattggacgctacaaagccagtagtccgagtggtccgaacgcttcctaatctacaaatgctcgatatccggttcgtttaaacttcgagtctcttctcatctagtatgaactgggttgtgttgccagctattatcttctaaccatctatttttgtgatttacaattccttcatagaatgaacccatgtactcttgcactttacttgcctattatgaccgaggctctctctgtcggttctgaaaccaacacgggtctcccatcgctttctacatcaatagaacggacgtccccagaatcggcaggctgttcaccttcttgggccgaactcgatactgctttcagacgatcactcccggacgattggtatgtccgtcgactggctcatcggggactgatcatgcagacgtgcccccgggtgtctaccctggatggggttatcatctcggacggcgaacgggcaaaggcaaatgagttattcgagacgatccgaagaaaatcggaatcttgataaatgcttgttcttagtcttctatccttcacttgaccttcgcttccttttcttttctttgatcgacatgtacaagtccagtttccggtgcaatttctgctctctttcgtgatgatttcccctttctttttgttctctacgctcagactcacgaagctatattttatcggctcttctctttatccttgatatcaccaccggtcagaaatgactaaatatatacccaactcgagacttttttgatgagcccttcgaatactgtgcctctgagaactattcaagacgtaagagatatcaatcaaattgaacgtcgaacgcgtcagagaagagttctttttgaattcaccgagggacgtgctcattttcgagatgggcattattcccttcatcccgcgtcgacgcgttgacgcgccttcgactagtcactcactctctctcgcttctctttctttcgtttcaccttcttctttttcccctttttacaccttcgttcttctccctttcttcgtctatccctttatgctccattgccatctgctcttactcacacttggcttcaagttctaatagctaatcaagactgaacacaatgtcgatactgatgttgaaagacgctagaccttggtcatataagcaagagagatgatcaggaacaagaacctaatgaacactaaccgactgaacgccctgaagctggagaacccgcagctgactactaatcaggcaccaggaacagtccaatcttgttcctgacctgtcagaacgctcacccgactgccgaaagctgcctctactgtctgactctcgctcaaggagcgtacgctgtagaactctctccgcatcagatgaaagaccggtcagactgattggattttttcttccccttgggatatcacttataagatggaacctgtctttcttttcctgtctcttcttcttctctttcctcatccagctgtatctcttccatctctaacttcctcatccaccattagttccctcaagtccaccctgtccaatattaccgtgtctctattgcgacacaccatcaaccaagacccggacgcaccattcccaatttatcttcctgtccacatttcctttcccaccctcacttttattcagcgcgcatatagtcatgtctgccgaagacgtcaactggcaatctacaaacaactgtacctcccagatgatcaaccatgatcaactagaggattgcttttccagatacctcgagtcagctttttcttttgattagaccacaactcttcgtcgagatttctaacgaactctgttaaatcaatacgttcatttagatcaaaatacaactgggatgacgagtctgatactggatactctatctcagatttcccgtatggttcctacgaacaaggatacgaacaagaccgcgagtatgaacagtcctaccaagcgtacccctttttattggaatccttcacccagggaaacatcgaggatgacacttcggagagctcgagcgagaatgcgagcttttcatcgctggacgaagttgccacttatgagtgagtgaccctctcaatgtttcatccctctctggttctagatcagtcagctgaacagcgtttccgaattttctccttctctttctactaccagtactgcttctgcgtcgtctcttgatgactgttcttaccaatatgagcacatatatgcacaccctcctgctcctcctagcttcagctccagtcccatcgaagaagccgaacagatctcgtacagctctcttcttgtgtctccaagaaaggcaccagcgtacgagagcgccccttcgccaagctactcggacacttcagccgagtctacccaagagatgcaattcaacacagttgattctgagttgtatgaaaactcgtggcctggttccctggaggataaagactcatccgtcgatcatccttccgcccagaaaagatctcgtgcggccagaaagactggtagcaggtatctacctatgaacaccaccgcagctttaaatgtatgtctggccaattaaatgtcttctcctcaagctgtcctcgtcactaacttagattcgatcttggtcgattatcctgacaggattggtatgtgagcagtactcataagtaccctcctcgagagctcaagattaagtggtgtgaggagactgggttaagccgaacccaactcgatgtacgtattggtcgccgcattctttgccctatttataaatcaactttagctaacgggatgttttgtttgtgcgcttcaacacacttcaacctggatttcttgctcctcttcaggattggttcattaaccgacgtcggagggacaaagatttctgcaagcaacccaagagcatcaaaaggagtgtaccacgtggtagtactgctgcaggtgagcctaaatccgaatcatcagcgtggtatatagtttatctggaggaatgcttattcttaaattccctttctctcctggctcgacagacaaagctttctcgggtttgaagcatcgatcaaatgcaagtcgcatgaagtgaggcatagagttaatagctaaaccttgatcgcatccggcgcagagcacatgttgtctttcctatctcttctatcgttctctgcttttctttctaatctactcttctcatttcttcactcggttttctgttatcttctttctgtctcttcttattcttcatctatctgatttgttatctatctttgatcttttttatatcgaatgccatgccgcatctccaccagtcgtatagatacttctttccttctctctttcatccatttctaccgccttatactgtttcctgatattttataccgcctcgttttttttatcgtcatgtcgttgtctttatgatgtaacatcgacctatagagtctgaattagcttgagtgcgattagggaaacgagacaggtggatactgtaagtcatctaaactcgagacttgtagagatgttcgaaacgagactgatctgccctccgcatcaaacggaaccagggaccgcttcgtcttctaacatcattttctctattatttcataatctctcggaaactagcatttgtatgatctttcatgtgaaagaaaacgagaaaccttgcttgcaatgcattctgttcgcttgtggactgcgaatgaaacgcgtgcgcacgttaaggaggacacactagtcgttggaagaacgtgcaccttcaaccagattgtattggatttaatagacatgaaatccaagaagggttgggcgaggatgttttttgtttccaaaaagaggttggttgagatgtttgagataaagaatttactcgtcatcctcaacggcctcctcttcctcctcctcttcctcctcctcctcctcctcctcttcctcctcctcctgctgggtctcccaaacagaggtggcgattcggtccaaatccctcataccgtcctgggagattcgtcgacctccatcagggtgggactcgaggacaccgatcttctcgagggactggcagacacctcgctggatggcaccagaggcgtcaccgtggtgggagggtcgggatcctcgtcggttctttcctccgtggagcttggtaagagcaccgataccaacgtgctttcggaggtagatgtgtcgggcgacggcggctgtaggagaaaagaggttggttagtatgacacgagtgaagaacggtgatgtagcgggaaaaaagaaagggaaaaggaaggtcgccacgaattgccttactgtctctctttttacagaggaaagttcaaaccaagttcatgtcccctccaacagcttctgtgaatttactcaccagcccggacgtagtaccaatcagggtcgtagggagccaactccttgtaagctccggtcttgacgatatcaacccagttggggatctcgagtttaccggatcgcttcaagtgggaagagtaagcggagataaagtcctcggcggctggagaaaagggagaaagagacaaacccgttcaaattgaagaaaaaaagcagcacgcagtttcgttagcctctatttctcttaatccattctcgttcgcggaatctctactaaaatcaaaagcaaacaagtagaaggaacatacagatatcacggacaccaggcatattgataaattgagtcgaaagaggtaaaagaccttgacgaaacggctggcggaaggagtgcttgagggagaacaaaaagacggggacaaaaagagaaggagagaaaagtttgctgaatgggccggagcttgaatgctaaggctgacaacaagctcacattgagacttgttgagactgatgaagaaattattaaacacccaccgcgtgacaccgccctgtaagcttttgcctggtcttgaatctcctctttgttttcaccattgttcatgtattcttacccagacatccatcgtattgattttcatctgagaggttgaggggaaaagctgacatgtgttgaacgcacaaactgattcgttctaccaaaagaacagctgtgtcgttattgttgtatcgtttcgttattttcttttctcttcggtatcatcagatccattcatgttttcatataccaccgcatcctcccttagacagtgccctcttcttgctcataccggtagtgaagagggtgattgaggccttgcgaagatcacatttatcgagttgctattagtagaacccgtgtcttctgtcccgtgaagaacttgggtgggaaacgcttcccgacatctctctttgtctcctctttccttttgttctccattctcttaatcatgtccgtctgtgtattttatcctatgtgtttcctcttgaaccgtcgtttcgatcaaattcccgatgtctgcaacctatcaagctgacaagatgcacgtttgagttgctcgtacttcctccagaatcgaacaagaacgcgtatctatgtatcgagagctcgatgccttcatgtacatatcgccgttggcgatgtagatggaaccgcagaaagagggaaaggatcggacgacgctcaccagcatctgaactcgatgtggtcacagaataacggcaagaaaagaagcaacctgcctctagatacaatacagaaatcgtcagggggtttttcatcgctcgttagaaagcttgtagtcattctgcccgatgaaataattagaaaacaagtcgaaaaaagactacaacagtgaagaatgattcctagtcaccagatatatcacgtgactgccaaaagattttctcacttgtgatattccaaatttctagtcgctccttctctcccttccc

SEQ ID NO: 1691 - DNA, 2943 bp, Xanthophyllomyces dendrorhous
tccttgaagcaggtctcactctagcttgacgtcaaaaagatgcccggactttcccacgttctttacgaggccgcctctggttacgccctcttctctgtctcccttcacgatgacatcgccaactctaccaagcagttccaggactctattgccgaccttcacaagtttggaaagatggtccagttgacctcattcgctcctttcagctctgccggtcacgctttggagaatgccaacgatgtttccgagggtaggttttctttgctttactattcactcggttatctattttgccctcctgcctcttcctttttttctccttcaatttccgtcctctttttctcctacttcagactccggccgtcttgatatcaatcgcttgaacagcatatctgatccatttgctctttacgcctcttatgtggtactataacaggtattcttaacccccatctcgcctccctcctcgagttgaacctttccaagtcttccgccaaagcctcgtcctcttccgcctccgagaacattcttcttggtgttgaagagaagaacttggctgggtctatcaaggctgagctcggtatcgagtgtgaggctggtcaggccgctttggaattgattcgaggtgtccgattgcatgccgagaagatgttgaagggtatggaggccggcgatgttgtcagagctcagcttggtttgggtcactcttactcccgagccaaggtgaaggtacgtgaaaagccttgttctttatttcttttacattctttcctctattctgcgcttagcctttcctcaagagtttactgacctgcgccgcgatgtttaatcattcgatgcccttctccagttcaacgtcaaccgatccgataacatgatcatccaggccatcgccctttccgaccagctcgacaaggacgtaaacacctttgccatgcgagtccgagagtggtacggatggcacttccccgagcttgtcaagattgtccccgataaccaccagtacgcccaacttgcaaagttcatcggcgataagtctcgattgtccgagtccgacctcgaggaaatgcaggagattctcgatgatgatgagacccgagctcgaaacgttcttgacggtgcccgagcctctatgggatctgatatctccccaatcgatttgatcaacatttccaactttgctgatcgagtcgtcaacctttcatcctaccgaaaggccctaaaggcatacttgatcgagaagatgcacctcgttgctcctaacttgtctgctttgctcggagagactatcggtgcccggttgatctcccacgctggttctctcaccaacttggcaaagtacccagcctcgaccgtccagatcttgggagccgagaaggctttgttccgagctctcaagaccaagggaaacactcccaagtacggattgatctaccactccaccttcatcggcagagccggtaccaagcacaagggacgtatttctcgattccttgccaacaagtgttctattgccgcccgaatcgattgcttctctggtgagtgaatttagcacaagtattttccctaaaaaacgtcttatattaacaaaagtctctttcaccttactctccgcgcccgcaccgtctttatagacacccctactaacaagtttggagaggcccttcgagcccaagttgaggagcgattggctttctacgaggtcggttctctcagatcaatatctattcgcacaatcacaaggttgacgtggcgtcccttttcttcccactttcttttacacagtccggaaccgccgtgtccaagaactctgacgccatgaagaaggctttggatgctattgctctggacggagatgatgatgatgatgaggaggtcgacgaggccgaggccgaggtagagatggtcgaggctgctgctcagctcgaggccgatgagaagaagcgagcaaagaaggagaagaaagctggaaaggttgagctccctgtattggaggaagtcaaggctttggtcggtggatccctacctgagggttcgatcgagaccgtcgtcaaggctgagaagaaggacaagaagaagaagagaaaggtatgtcggtgtttttcttgactgcgcttagatttctcctctcgagaggtacatgcaacagactttgttaacccatcgatctgttttatgcccggtcattctactttccttctctttctcatagtccgaggttgctgacgagtcggcaatggatatcgacgctcctgctacccctgctgatggtgaggagaagaagaagaagaagaagcgtgtgtctgaagtcgtacgtccagccaagcttgtcttcttttctttcatactgcgcgcttataacttaataaacgatccttggtcttctgtttccatcgtctaggtcgctcctgccgctgaggataccccctcaaagaaggagaagaaggaaaagaaggagaagaaggagaagaagtccaagtcgtcggcatagacagatcgatcgatcttcttttctttccagccctttgatcgtatccatcctccaaaaacgctttctttcgcgtctcttccacaccatcctcatcttgccttcccatacgttctgatcgcccaccgaggtctttgttctctgttcactcatcaattttcactctttctatatctctttgccttcatatgttttcaactttcttcgattacctgtttcccttatacaatatatggctttggctactataacgcaaccttaaccgatggtggtcgatacatgatccttttggacttgggtgccctcagatcacagaccaccaaatccccatgggtcatgggtttagtctgtgccagcctcagcctcaatagcgacagcgtcaaagcccggcattctcgccccctcgttcttctcctggtgcagggctaggtgcaacatgttgcgtgacgcattga

SEQ ID NO: 1692 - DNA, 4279 bp, Xanthophyllomyces dendrorhous
gcgtgacgcattgacatctctgttccaccaagtctgagagcaagcatcaaagagacaaagagacaaagccgaacgtcgtcagcttcctcgctctgtctgtgagctcagagacttcctctctcgtggtggctaaatatgcttgagagaacgtcatcaggacaagatgtcgatcgcttgtgtacctgctcgagttttgccctgaactcaaccggctgtgcctgcgaacctccctttgacggctgaacacctgtcgaccgctgttcctgtttctttcctgtcaacgctcgttcctgtcgatgctcatcttctgctcctggctcatctgtgcgctcgagagctttcccatataagttcatccttgatacaatgttaccattcctttgtcttcatcttcttcatcacatctgcaagcgcacatgatcgcatcgtatagaatgtcccacactcgaaacaaagcacaagtccctccgagtgacgtgtgtttctttatgaggtctagtacacttgaggtatcaacccagtcgagcagtgtcgatagacagttttcgactctaacccagagcgttgagatcagcagccagtatttgactttcatggttgtcgagtatgtatcatcacatgcgcattcatgggatgatcgtagccacctgcgacacactgtcacccaaagacgtaccaacaacacaccgatcacagtcatcactatcagtcctgatcgaatgactcgtcgggaggacgagatcgacaagattctggctttcttttctcagcatgacatttcctggtggtccttcggcatccaagacaaggatcaacccagactcaaagcgcggctagtccctgtcagcacgcatgtccccgttgtacggcaacagatgttgcatgggcgcttgacagcatcgggaacgtccaaatatatggtctgtttcaaccgtacggtagcgtcatacaagaagctatcaaacgtgttctcaagtgtgaacgacaactcacctgagggccacgaggatgatgacgacgacgacgctgaccttggagttgaggttggagttgatcttgtagttgaagttgaagttgatcttggagttgacgataaagctgatttcgagtacgaacatgaagatgagaacgatgataaagtccctcttctcgtcccactggctcctttggtcccactccctcctcccaacagtccacttcaacttgccgcaacgtccaagttgcaccagttccagagttccgtccagcaccatatcgaagctcgccaaatcgagcgcgtcgtcgtgctcggccggacatctaccttctccaccaagcaagtctcgttggacgcccaagtaggtcttctacaacatatgctaggcgacttcgaaggagatacccgtatgctggagtgcaacggagtctctgcatacgagcatgactatctgctcgaagcatgcaaaagagacgagaaggtatgtttctgcctgtcctacctttatccgagtctaagcttcatgctgatctgccttccacttgatgtcgtaatccagactctggtccttgcgacctcgattgatcgcgcctgccggaacccagctttcatcgaagatatcctcggatcactcgatgtgatgacattcatccattgtgataccggggcgaactgtcgaccgctcgcggatgagtggctgaacactctagacgaaagcgaccaacagacctggaggcccatcctcgagaggcaattgtctcacaccacctcagtcaagacagcagggatcactttcccatatctctgaaatacaccatctgtcagccttagggagcaactcaagtctagggtaaccaaagactcagcgttctgttcctcacgaggatcctcacatcatttctcgtggcctcctctccttcctggcttgaccagctacactagacgcaggattggcttcgacgacgatagggtggaactgtggaaacagatccatcaggagtacacaggatacacgctcgacatttactatgagaacaaaggacgggcttgcgcatgccatggagatgtctgcagagacgattgcctttgtgattgcagtccttgtcaaaaacgagccacaacgggatgtgtctgtcgtcttcaagagcgttgcgattgttggatcatcgacttctgtcgatgtccaatctgtgacccggacacagaggaaaggaggctcaaggcagaggagaaagcagagaagtggaggctgaaggcaaagcagaggaagcctgagctagagaaggagatagagcggaggaggagcagaggaggagcagaggaagccgaaggcagacgagtggaagcttgaggtagagaggatgcggagggaattgaaaaagcagtttcaggcgcagaagtattccagggtccaacaattgatggcagctgcaaagctagtcgaccgacaacaggtagcggcagatatagatgcaatcatcgcggaagctgcaggtaaagtagcggccatcgtggaacgcaacgagacatatactgcggtctatcagaggacggtcatagtcgcgcggtagaagatctacgaaggaatatcttgtcggataaagactttcgcagagagggctgcccaacgaatgtcggatccggtcgtgcgacggcaagggattgcagtcgtgcgggacaggacgattctagagactcccatgcggctgagtctggaggctctgaagcaggagacattggagcggaagagactgtggagtgagatggagtgtatggagaaaccatatgacgtcagatgagttggatggaagatggacagagggacaacgactgaccaggctggtagcttgtgtagagatcaagcagctgctggacgaggagaagggatggagggtcgaagagaggcagttgcgagagatatgtgactttttgggggcagcagacgcaaagtcagaggcggattcggccaatgtgatgctgaaagagaaagggcgagagctgcacttgatgtcgatcaagtatagggaggaagaagagaaacggactagggagaaacggcagagagaagattacgtccagatcgcttcattccttctactgacttggcggctgtcttttcctcactcttcctacgtaggttggatgagcagctgggtgagtctccttggtggcggtctatccgacagaagaccacagcggaatgtccagagcctgaagtgtaaagtctattggagattgaattcgatgagtgataaagtctatgaacgagacagactgggatcagcaagaatcgagtcagtcatgatatgtttcggggacaacgttgacatccagccgagcgttttggattaagggggagcagaagctcagatcggaagtccgatgtaagttgggttgaagcgagaacgggctgtcatccagaagacgccgaaagacttgaatcgtctgttagaaaatcgaggcgaggttgtgatgaactcgatgagattggactacatttgaagtgcgatcgacatcctggtctagtccggcacaacgggtcaacttctcttgtctttagccgggcacttcatctcaacagtttactttaatcttagtcgcccatctaccatcagcactggcaaaggattgctcgatagttgagaggaaagtggaggcgcattgttcgaacctactatagtcaaagagagagagaggaagagagtggggtgatgatggtcgatggatttggttgatcatatccacaataccataatagttcaacaatcccagactatatcgagatttggtggttcgtgatctgagggcacaccagtccaaaaggaccacgtatcgactgccatcggttgagattacttccagtaaccagatcgatatagcttctatatagacaaaaaaacatggatgatgagtgaagccaaggcacagggacgcctggagtatctaaaatgcggatcctgtacgcgaactacgtctgtacgaagcagaggatcgaaactcagactgccagctcgatggtcagcatgctgagtccgttgctccgagcacgggaggatcctctggatcttcccatctgctctctgtgagttgtccatgttggaaagtgataagcctctcagttacattcaaggtcattgctacactgagatatacttacaggccaaacctggctgaagtttcggtggcttcataaaggacacaatttgggccggccgtcagaaacttgctgcgtgtcaggatccgggttcagagggtaacgggaaggttacaagaatgtaaccaggcagggaatagggctggcaa

SEQ ID NO: 1693 - DNA, 4438 bp, Xanthophyllomyces dendrorhous
  misc_feature (3903)..(3912): n is a, c, g, or t
agcggcagaagcaggagaagcaagagaagcaggagaagatcatcggggtgtaacaatgaggtcacatccctgacagatagggataaataaccatctgacctttgttgagtcgtctgacttttcacacgcgtgctctcgttcaccaaacactcttcgatcgactcctgattctcgtgttgtagcggataacttcaagactcgtcgttcaggtgagtacagacatggcgttgttaatatttttgagggaatcctcctgtcgagatgaagagtgaggagaaagatatggtgtacagagattctgatgtttttaaaactctttttttcttttacttttctcttgggttttgcttttgaaacgttctgctcggtctctcgaaacggctgcgaaacttgaatttttgactcttccctgccttccgcactccgtccttccttgttctctctggaaaccgaccaacaacaaatctccttatccgcctatctgaatcgatctgttgaaccattttctcggccctctcaaaactcatccaaaaaacccaccaccttctctgtcttgttcccacactccagcatgtcctccgtcaaagccaccaaaggaaagggtgaatacttgttttttttttcaagtccgaaagatctcgggctttgcaggagaacatttcgaaccggacaacgaaagggagcaggaagaaaacagaagtcacaggcatagagcgagtccaaaggtggtgcaggaggtttttccagagagcagggcaggaattcttgttggacagagcgaaaggaagagatcaaaggggttcgaacatgcaactgggattgaaagaacagacgtccaaaagtcgaacggtcctccagcatcatgcatatccttcatcctttcggccaacactcttttctccatgcaccaactctatcctcccttgttcttcggtgtctccagctccgtcaaatgttcttctgctagccgaaaatcaatcccgactattcctccaagccaatcctactctttcaaaggttgatactgatcatttccaattcttttctgatctaggtcccgccgcctcggctgatgttaaggccaaggccgccaagaaggctgccctcaagggtactcagtctacttccaccaggaaggtccgaacttcggtctctttccaccgacccaagactctccgacttccccgagctcccaagtacccccgaaagtcggtccctcacgcccctcgaatggatgagttccgaactatcatccaccccttggctaccgagtccgccatgaagaagattgaggagcacaacacccttgtgttcatcgtcgatgtcaagtccaacaagcgacagatcaaggacgccgtcaagaagctctacgaggtcgagaccgtccacatcaacaccttgatcacccccgccggaaggaagaaggcttacgtccgacttacccccgaccacgacgctcttgacgttgccaacgttcgttcctatcctctttatctttaattcttctgcagtatttgcatcggctgttgacgcgtactttcttgcgtttctttcacgaatggtactcgcttgtcgctttaccataatatagaaggccggctacatctaatcgactccatcccttggatcggttcagttgtttggtttgcatcgggtttcagagtttgacgaccttgagactcgaagacgtttggatgcatgtatgaaattctcaaattcatgcgatagagaaaaatgagaagatttcagttggttgtgcttcgctcatcttgccaaatggaatacattctcgcacacacacatcatgaacttggagagctgatccaattcaaatataagaatgtgatcctctacaaagaaaagaaaactttcttgcacaaaaccgaccatctccttctgtcaaatccatcgcgaactgcaagatttgttgaatttatgacgactctgatatttcgtagccttcgacttaagagtacagtctttgtttcagtccttatgtactttgtcccttcctcgccccaatagaatctgggaagatagttttcggccacttctcgctctcgtagaactgatttccaacagaatactctctcgaatagtgtacgtttcctttctggaaggaaaaattcgacctgtgagacgtataaccctaacgcctcccataaccctaatattccgctttgccggccttcatcgttgctcaatcaacgagagatattcagtgagatgacatctgccagttactcggaaagcgtctatgcctaacgcttccgatcgagatcaagatccagaggccgatcttttccgccggttcgccgctcttaagaatgtaggatctcttggagccctcatggactcttcagtctcggccgattcacggactttgccgacagttaatagcgaggacgatggcgttgacgacctggatgatgaagtaaccctgctttcctcctcttacctgagagaagagggtaagaagcagagcagatattgatgtcaatccttctatctggtctccttctcaacaggtggaggcttacctagcggcgttttctcaagatcatacatcgggtgacttggacatatcagtttctgaatcaaaaccggttattattgacgcgacggaagttccagaatcgttagaaaaggaaactcgacgcgtcctgcgtgatgcacaactatggatatctgagagctcaaaaggagacgaagaagatagtaacgatggagatgaagatgtggatgatgggttggacgaggacgctatcgttagcaaagcgaaggatgaagtcacaatcgagcgggatctcatcccattagggacatcttcctcacgttctcctcttcctgatgatgctcaaccttcttctttggatgagacagctgacattgggagagaacaaagctccctatctttgaccaacattcttgcttctctctcttcgcccaccattttgccaccaccaccagccacatcgcctttatcaactctcttggatcctacactttccaccgctttctctagacttctcgctcttcaaccctcatccgcccccccgacagatccaaagaagaagtctcttgaaaccccgagcctgaagccaagtggaagccaaccaaaacccttcgacttggagggctggagggccgctagggattctgaagtcgattcatggtgttgtacgcttgcgcgctcctgctttgtctcgcgcgttccgatgttcacaagcatgcgttatctgatacttttcattctttctcgtttttcttccttcttggattcctcaatatttcaggtatctgctcagcggacgcgtcattggtctgtccagggtgtgatggagacctgtattgcgcaccttgctttagggaaggtcatctggatgaatcaggggaggagatgaaaagacatcgacctaggaaatatgtgtggaaggcttcatgatataaagactctttccttttatcctcaactcttgaaagcccttcttccatccctgcttccattttcgtgtcgtgtcttgtcttgtcttgtcttcatctcagcattcattcttcaagtacatcacatcatgaagaggctcaaagggtccaggggaaagtcactcgatccgtcttctagggcttattccccagatctcccagaagtcacgggcatccaacactcgaccaagtcgaccagtcggtcgaggtagaactggttcggattcttctctcataagctctctgacccatctcctagattcagcttctggatcgagaggaagggacgaggctaggtcccacctgtatatgttggtccggacgaaagacaagattgaatatatgctctacatcaaggataaaatggggaagagagaaggagagggggggggaagaagaaaaaaaaaaaaagaaagaaannnnnnnnnngaaaggacgtaccaatcatacactctagtgtcacagatgatgaaacgtctagccgaagatgaatctggcttaggcaggagatctagatcctggacgagccggacgatgcaatgtgagacgtcatctccatggactacaggttcgactatcatcagtatgtgatccttcccacagtgaggaaaggcaggcagaggtaaggacggaaggaacttactgagatggactcctcccttctttctcaaagcctctttatcgtccgcaacccgcgcgatccaatttctcaccagtctttccccaccaaacagaccggcaaggttcaacactacagtctcgtgcccgtcgatagaaagattaagaaactcagtctcggcttgaccgcgcgcgttcgttggattcggaggagagtttcgatcaaagatctggggtcgatcagtcgagaccaacgttgggtcggacttgtttacatggagcatgacgaaaagcgagaaagcaggatgagcattcgacgaccttttttttttttttt

SEQ ID NO: 1694 - DNA, 8283 bp, Xanthophyllomyces dendrorhous
tttttttttttttttttgggagaaatgaaagaaaagaagagatgagaaggtcataccgtccagatccctgtgctacccaaattaacccaggtcactttctcttttgtctccatcttcttctcacctccccaagcctcttcccacccgtcaatcagctttttcccggacccacccactagaggaaacgtcaccaagaccactcttgcctttggtaacttcctgaatgattctcccacggtcttctttgaatcttccggatcaaacttgaacttctgaagaggataatccacaggaaccgatggatagtgagtctccccagatcgggtggtagcgacatatgttaattttgaggaagccaggagtggaagaagaaactgagagagccagccggcgccgaggatgaggatatcgacttgagaaggcagatgcttggagtatatggatacagccgtcattctagagaaggatccgttcttgttgatatgttctcttcttgactctctggttgagaattgtctgttggattcgatctttcaattatgtattcaaaggttgggacgaagatggaacgaaacgggaacgcatcatcgatcgtagctgactaagccgcggatgacaacataaattcgctcttcttctgcctcttacgtccttttccgatcatttgtttcctctaccgagaggtgtatagaaaaccggaggagagagctcaaagataaagtcgtttgaaaacgtatcgtatacaattaatggtatctagttttgcaagcctccatatcactacccactgcgtctgcccttctctgcatcagacaaccaaattacattcgaagcattcttgacacttccgaccgacagcgagcgaacaagaaagcgatagggacaatcgaggcgataaatatgtcgatcgattgatctcaacctcaaggacccggtccggtcttgaccttcgagtccggttttgtcccttggcctgagggaccttgaccaagtcgagcggacgaagccagaggaggcagtcgaggaacggcagcagcagcagcagaagcggccggggcagtattattgattgaagttaaagaagaggaagaagatgccgcagaagaaccggtactagtgctcgttccggacccgttccctgcctgcactttactcaagattcctgcaagaccactcaactgcgccgggctcagcgtccctaagatcaaattgaacgcaatgttgaccccatcaaccctcagattccacaccagactaggtgcatccggagctgaatttgttcgaggaatgattcctaggttcattagggtcggtagcgtcgacgcaggcaaagacaacggaacgggcgcgtggagatcgatgtgggatgccccggaagtggaactgggtgtagttgtaggcacggacggacgggtgttcgaagcagaaggtaggggacgggaagagatgctgagattcgctgatgaaggtcgaacctgggatgatgatgaggcggaagactgtatcggtggacggtaggttgggtacccaggccgttgggctggcggtctgcctggcgttccaacagatggaggacggtacatcccagagttcagcggcctagccatgttcactccgttcacactctgagccgagatagggactcgttgttgaagaggagcgcctcgattggtatagttggccggagggcgagcagaacctgtctgaagcggtggccgattaagggtctgctgaggaggtggcagcggtggtggcggaggagctcggagggcagctagttctcgtttcaattcattcagtcggttgatagcagccgactgttcagaggtagccgagcgcagaccagtcttgagatgatagatttgacggagttcgtccgctatcgctgctcggccaagaggaatagcctgcaaggatggggaagcgtgctgaggaaaaaaggccatggtagaaggtgaaacaaagaccgtcagccattatcttgcatggggcgtgcatctctgagtgtaggtctatcggaagctaaacgactcacctggccttctctacgcttcagcgagacaaaccgtttctccaactctcgttttctctttgcaaacctcacggcttctttcaaagatacacgtacatgtccgcgtccacgccaggcatcatttgatcagtcaacctcgaaagaagaagaaaaggaaaaaaacgagaaaaacaagacatctcggcaaggaaaagacgtgagcactgttgatacatacctgtaatatctgcttctggtgtgctagaggcaacatcgtcccactgccaatctgtcgctctagccttgcccttctgatcggttcccgacgacggcggcggtggcggaaaggatagatcctgatcagggatctgccagatgtgatacgggagaagccgctggatcacatcgcacacatcctcaaaggggctgacatcagggtggagagtcatgtactggtcgtgtgagagcgcgacggtaaccctattaaagcagaaaagaggcaagacggagaggaggagaatgacgacaaacagatcagacatcaatccttgttcatcgatacgagatgggctgagttatcaaatgcggcctgagccagggaccgaccttcttctcagagattcagcgacagaacgctcctcgaacgatcgctcctctttcggagcaaccattttggggccaggtccaggcgtaccagcagacccacctgtcactctcactgcagatgatgacggagtcgcgttcgacacgctagggttagagggaccagatgagcctctgttgactggaagggttcctgctgttctattgagagcggatgagctgactgcaggatgggatgggactggccgacccgatgaggcagttgtatccttcacctgggatggctgtggacgaacagctgaggacgtggaagaggaaggtgtggcaggtgatgacgattctaggtatattggacgaacagcatggacggatgaatggataggtgtatgtgaggatgaagaatgaacgggatggattgatgaactcgctgtctttgtcgtcgtcgaggatggaagagttgagcgagctgaagaagacatgctccttcgagtcgggtggggattgttgtgtctgtactgggcgaggcgaagcggcgaaagaatctttttttttcctccctgtcttttccttgacgaggcagaaattcgctggccacgcggctggcagattttgtattgctttttcttcagcattagaatttcgtgtaatgcactctctagtatgtttttcatttttcactgagactccaactcataccgcatatagctatgcaagatacagccgtgtcgtatacattgtatacagtcctcacagtctgatgtttacgttcgcaccaggacatatacacaagcatgacatggaaggtcatttatctaacgagaggtgtacaactacaggaatggagagtgtttacatatattatggaatagccaaaggaaatgtgaagagagtacaagaccatgcgccctacttggacgacgagaatttggtcacagacttggttccctccgagatggcgtgcttggagagctctccggggaggatcaatcgaacggcagtctggatttctcgggaagagatcgtcgactttttgttgtacgaagccaacttgctggcctcaccggcgactcgctcaaagatgtcgttgacgaaagagttgaggatagacatggccttgttggagataccagtgtcggggtggacctgcttgaggaccttgtagatgtacgacgagtaggtctcgactcgctgtagtcatgaataagagcaaagcccaagtcagtttttggccctccagatgtaagagcacaaagctcgacgtgcatcgactgaccttcttgttcttcttggacttggcgccctcagccttaggagccttggaagtggtggactttttggcaggcgccttggaggcgggagctttggaagcaggagccttagaggcagctgaggaatggacaaaagacgcgtcagagtggcgagttaaaagaggagacatgcgaaacagggtagactaacgggctttggaagcggtagaagcaggtccggccattttgatagagatagatgagtgaggaagagtttgagagggtagtgcaaagtaagcttggaatggttccggtgtgatggatgaggggaaatgaacaaaggaaatcgaagaggatttgacgtatttatacaatcgcctgaaactaaaaaggccacgttgcaaaaattgacatacatcgattttctcaccttcaaaaattccacgtcactcgaaaacttgggatatccctctaaggggatcaaaaatccattctgtatagctttgatctattcagaaattttatgtaggtagggtgaatattttctgtcgcttcattcatggttgccacgcgcgtttcaggatctacgcgactaaaatttcggggcgacgtgtttttttctgacgcgcgacgcctggcttttctctgtcaagttgaaactatataaaccttgtagcaacttgacgtcaatcaatccctttcctccatcaaatcattcctaattcccatcactcacaacctctactctcaaccacccccgaaacctaacttaatcactatcatgttcgtataacactcaccagtcttaaacacatccatctggacttgacgaactgacccatctgactttcttaacacaggtctggaaagtctgccggaggaaagtctggaggaaaggccggaggagtcgatgctgacaagaagaccctttcccgatctgccaaggctggacttcagttccctgttggtcgaatccaccgacgtacgttcacatgttttgagttctgtcgtccaaaaggtcttcgcttacctgatcactccctcttttagacctcaagaagggaaactacgcccagcgagtcggagccggtgctcccgtgtaccttgccgccgttcttgagtacctctctgccgagatcctcgagctggctggtaacgccgcccgagacaacaagaagtcccgaatcatcccccgacacttgcagctcgccatccgaaacgatgaggagcttaacaagcttctcggacacgtcaccatctcccagggtggtgtgcttccttccatccagcccgagttgctcccggcaaagtctggaaagcccaagaaggccgctgcctcccaggaggtttaaacaagaaaaaaagacttttctcgtgtactctttctgctcttcttcctttttggatcttgctctttctttagactttctgtgtaatacttgtactgatacaatcccccatatcatgcccaacttatgtctaaaacaacaccagaaaaccttgttcaaagccacaagatatatcatcatctaacgtgcaactcgtaaaaactaactgaacaatctagatttacccgttctcttatgcgatcaaatcctgtctaccaactgatacagccctttcgagctaactcctatttcatacccatctacttactgacaagcacgacgtctgtccagacttgctcgacccaacctttgacgcgttctaaagaacctactagatccttgattcccctttctaaagcctccccttcgaatccttttacctcgattctctccttttcctcgctcctgacatggttctctccgcttggctgtacgacctccctcccggtgcgcattatacttaccaagcctgtcgacgaaccacccactgccaaaggcggctctaaacaaagttcaacagctagtgttaaccgagagagtaacaaaccccaaactgggtcttctgttctcaacactctatcgatagccgaccggagattcttgctcgtcagttcgtcaggaggagtagggtaggatgatagtagaagggcatggatgtcggagagtgaagtatgggcggctgaggaaggcgtgacgaggtccgaaagaaggagatcaaacgtctttgcagagatcgacctggctggtgatggtgatggcgtttctgatgcagaagccgaaccggaaggcgcaggaggctgtttgtttgaagccggaaggagagccatcaggcacgccgtgatcactagcgcttgaatttggttctgcaatctgaataacgtttgagaaacaccgacgaagatcaccggaagttgatgcgctggtgcaggggcaactcgaggttcagaagatgacaacccattactactttgagccgaagaagaagagatcgcaggagggagagggagcgcaggaagagcgattggctcggaagaggtaatcactttgaggagcgtctttgtccaggtgttaggccctgtccaagtagagaaagttgacctgatctgatcaagagggagcagagagataatctcggttcgttcgttcgtttgcgcggcagcccggattaaggatggaatggcagagggaggaacggctagcagctggaacgatgtgagatccgactgtgagtgttggaaatataaatgcatcgtgagaacgagtatcgattcagtcaagacactcattacagcaaaatagttagaaagtgagaacgaaatcgggacaaaactgaccttcataagctctgccagatctaaaaccccctgcatgacagctagtaccgtcttggtcgcgtccttgtcgaaagaagaaggctttgagtcagtcgccgaagcgagtaacgaccgaagcttttgaatctcatcgtctcgagcaggtgcacaccgctgggctagttggttcaactgccatcgatgacatacgcgttcaggcagagacgaggtcaaaaagaagaaattggtaactatgtgtacaaacatctcaataaagagataccgcagcgagaggactgaccaaagttactagcgcttgactgaatacagcccgatcccaggccactccaggttcgggaacagggaagagatccttgatcatatgtggtggaagtagacctgatagtgtgttggtcaaatctgattgaagcaacgacaggcggatggcaggagaaggcccagaagaatgtagcttattagctgcctggtggtcaacaatccatccgataggatatttcagcatacataattatatagactgatggccatagtatgtagtcttataacttacatcatcccaaaatgctttcttcatcatcgcagtcactctctcctccatagtgacaggtccagaggtcccatcggccaagctcgcgctcaatcgtttccgcttcttctctttagcctcgttcggctgggaaagaagagacgtaagattcttccccggaggaagaactgtttccggagcgagcgctagagtcgaaaggagggagacgcgatggagagttgcaactggagaagacagctgactcgatggagcaggcgaccttgctaaggattcaagaatcaacggaagaagagcgggtggcacgatctcagacgcttccttttctattgtcggagtcgatgctgatgtttgcagagacgtattcaaaagactgttgctcggcagagagccttgatcttggattagaggtttctctatgcctgacatcggtgtcaactctgttgttgagaaagcctctctatctgtgttgttctgtccatccgctatatccatggctttttgatcctctgggtctttgatgacaatctctacctgagtcttgacttgatcctgttcaaccaaccctttcatctcttccctggcatcgctcagaatctgatctagcttaggcttgtcttgttcctgaagactggctcgaactttgatcaacgtattctgtagatctacccattcggttgtcggtgaaggtgaatcaagtgcggcagactgaagcacggtcaacgccgaggagagctcagtagaaagagctgaaggaggcaggttggaagcgagcgtctggagggcgagccaagtctgggaagtcagattgaccatgactctagatggctgatatgcagactaagagaagaaacaaagagaaatcgacgagtgtgtgtgaagtggatgagtatttggttgagctagatctccaaaacccggacggtcaagattacttgaacccgaaagtgtcttgctggcatccaaccatcacaactttcaaggctctcgttcagcccggattgttgttgtattctcaacaccgactctgttttcctttagatatcgtatctgaatatatcggagggctcatactcaggtatgctcattcgctcgagtgtcttcagctgtcgttgatagctgacaaacaccggggctttctttggcctttctttct

SEQ ID NO: 1695 - DNA, 19082 bp, Xanthophyllomyces dendrorhous
ttctttggcctttctttcttcagcctgtgcccaaacccctcgtttttcttgtctcatactccttctcctctttcctctacatattaaggtcaaggtatctcgtacttcgacctcgcaaaactcatggttggctcttcaaaagatcaagcatccgattttgtcgccagcgaacaaaccaatactgcctccacctccagcacagggtctacaacagcaaccaagagcccttcaatgctctcctcctctcttcgacctcgtacactagagagtcctatggatctcgccgagagaaatgacgggagttatgccagcagggaggtactagaccatcgaccgatcgcaaacggacatgagagaaagaggagtttgactcgaaaggttgaaggctcaaggttgcatgagagcatgcggatggtgaacgctaagagctcgtggctagacaaagtgttactcagcggaaaagataggaagagctttttgctgttgatattgctttgtaagtctttctgtgttgtgctgctatcgggtctggtagataggctaacatcgatacttgttttgttcagatctcttgcaaggaatcccgataggtatagcgcctctttcccttcagttgttgtcatcatccggtgttctgggtagccatttcatgaaggctggcttattcaaagaaaaaaatgactctaactctcacgtctgcatctctgtgtgcttcgctgttatcgcaaacaggtctgacgtttggaactttgccgttcctcttaaagcccaaattgtcatactctcagttagctttgctctctctctcaacatacccctattctcttaagctactctggtcgcccatcgtcgactcatgtttctcagccaaagtcggaaggagaaaaagttggattttgccagtccaaatgataatggggttttccatgtggtggttaggcacaagaattaacgagtggttggaacgggttcgtccggctcttccttgggccaagttttgtttctaatttctagttgatgaaaaacgccatatgaatttaacaacaaatatgtttctcctgtttcgttttctgtaaaccatataggaggttccaaatgtgactttccttaccttcatcttcgtgtccctaatctttttcgccgctacccaagacattgcagtcgatggctgggcgctcactttgctttcccacgagaatctttcgtatgctagtaccgcgcagacgatcggtttgaacagtggatacttccttagtttcactgtcttcctagctttcaattcggtcgaattcgggtttgttcaggcctcatctgtatgtttcgttgcttctgacaatccactaaatccgaattgtttggaaataatacacagaaacaaatatttcaggtccacccccttagaaactccgctgattacgttaggcggatatctcaagttttggagtttgatctattttgcagtcaccgtgtggctattcaagttccagaaagaggttcgtctgttttcttgcttattacgcaaaatcaatcagatgccacttctgacgattgcatcaccttgtatttgcggcgtctcataggacccggtatcggatgatgatcctgacatggacatcaagaaggtgtataaagtcatgtacagcattgtcaaactcaaacgtaagcaacacactggataaagattctatttgcaaatgtatatttaacttcacgtggatcttctatatgaataccttcttctcagacgttcaatcatttatcatccttcatttggtggccaagatcgggttcatggccaacgatgcggtcacatccttaaagttgctcgaaaagggcttcttaaaggaggacatggccgttgctgtgttgattgactttcctttccaaattatcggtggatggtgcgttaaattcacttctcgccgggtcgaacgtgttctgaataaaaggggttcttaatgttacgttcaaatacagggtggccgcctcttggtcccaaggcacgaagcctttgaatccttgggtatctgctttctctgtccgacttttctttggattattggcaatggcactggtatatggtttccctactacaaccccgattccctcgacctattttattcttgtcattctgtttacggtcatcggatcctttaccaggttcgctccttactcaaatactgtctcgcttaactcatctcaatcccctttgggatgttgttgcggccttaagatttcttcatactaattcggataatcgtcaatatctttatgaatcatagcacggttcaattcgtgggaatctctgcattccatacccaaattgctgatccgattatcggaggaacgtatatgactgttcgttgtttgctctttcctcaactggcatgcacatctatttgatatctaactcaacgattggtttcccacgttcaacccattcccaatcaagcttctgaacacagttagcaacctgggtggtacctggcccaagcctatcgtcttacaaggtgcgccaaagacttactctcgtctgaacctcttgttctcgcttcttacttgttaatatggatattttacttacaacttgattttggtcatcgtggtgcacgacaggtgtcgactactttagcacggcaacctgccggatcaaagatgatgtcgttcttaaaggtgagcttctccccatatatttcaatttttcttcgtcatagacaccaaggaaggaggcgttactaaccttaagcctatgctgtcatgtgtcccgttctcgatttacaacctgattaaaaagcatcggaatgcgtatctgaacatggcaaagcggcctgtacggccttaggaggtgtatgcaccattgaacgggacggatactatgtcgtctctgcactctgcgtctcacttggagcaattcttttagtaggctatgttattcctaccgcaagaaaacttcaaggtccgtcttcttttcttcttgctctcatttctgccctggtttcctcttggaacgatagattctgacgaaaaaacatccaattcgtttctcggttctgaacagctctaccccagaacgcatggaaagtaccgatccctcagtaattccttcctggagaggaaattccttagaagataaccaaagagagagagggagagagagagaaaagcgggaggctttgacagccgaatttgtactcatccaagtctctgactttattgattggaaacgctatcgttttgtgtttgtgcgcgtgtaaggaatagaatgattggcgtagaacatgccgcaatatggttatagactctcttcgtactttcccgtgttcctgtctttcttgaagaatgagacatctatctgtgaagtaagatcagggttgcattcgataagatgagctcggagatgcgcttctcaagtagatagtagaggtgttcataagaggaagagcgatagagaacgcaaacagggtcaagacatacataccaagaagagaagaaaaatcgtaaccaaagacatgaaccagagactgttagagaagaaaaagagggtaccgatggagatagcgagaaaaaatgttgaaccgaggtgttgaatgggtggcgaaggaaaaggaggttgtttgtcaatatagtgctacagtggagtggaaggtggagagatcagactagagaggcaggatgcaagaaaaagaggcgaggcgtaggcgggagagaacaagaaaatgatattatgtaaagaagaaagaaaagtacacaaaaggccctatggaggaagacataggaggatagagtaaggggcatggcaatgatttccaaccacccgaccttttaaagatccattccagctttgactccggcctcatcatgctcgtcatcactatcacctcccaatgagcccatgtcactcatctcgctgtcgctatcgctttcttcctcgctctcgtcctcatccccatcttcatcctcctcctcatcgtcctcgcctttcatcctaggaactttgtcggaagtggcgtatcgagaaacgtagtccttgactcggttgttgtaggatggagggtctcgcatgagtagcgtggccgcttcattgttgagtgggtcagaaggatttgggtaccggaggagttggggcaagaaggattcgaaaatgttcaacatatctgtcgttcgtaatgtcataagaagaacagagaacgtcaaggtcaaccaaggaacacatacagcgtggactcatggggacgtaccaaacatcggagaccatgtttggttaatgactggtatgcaagaaaaggatcgttagacaactctgttcataacgctaagtagtcaaataaaggtcgcaccatctagacaaaccgacccgctcctgaaagggtcaagaacagtagaccggtgtgtaaggatggcgatcgatgagtatacttccaaactatgtatccaatagtaataaataaaaaggagactcacatttcgtcgatgtttgggtgaaaaatcttgttcatgaatccaattgacggagacttgtacgggtattgatccggaagttcgacatgaatcttccaaatcccgtgctcaaaaggggctataagaaggttccgaaaattgtaagatcagctagcatctgaaatagtgtatgaatttaaaaatgcgtactatctgtaggtccatgaaagcggacaaagaattcctatagaggtatcacagcggatagacccaaaaaagcatcagacccgggaggtaccttgtcaatagataagacaaaacgggaaccgacctgcatgctgtcattgacgagcgttacatcgtagtcactcatcagcaatttcatcacatctgtttcgatcctacgtttcggagagctagaaacgaagaaaggatttggtatcgtatgatacgttaaagagttagtcatcgaggttcgacccgggtagaagcggcaatttcaggtcggaaggaagaggttcaatagagctcctataggaataggagctgatcttgatcaacggcttctaagctgtctaccggaccgaaccagtgtacatgtcatccgagtatacatgcacagagagtctgtccatgtgaagatagaatgccgaacaggagagggcgggaagatagacatacctcatcttgcgtttctttgcagggggcacgccacaagaacggatgtttatagaagaagaaattgttggatagatatgatctgagaggtcgaattaccgatgcgaacttgaacagatgatcagagattccgaagatgatgtcgacagatgagggaccttcaagggttgagtagttggtgatggcgatgctgatgagcaaaggatagtcagaagtgaggccgacaggatgatagatgtggttcatcccgatggtaacgaaatgcattgctgtgtagatcacgtgaggtgcgataattgcacttagcagataaataaatatacttgaattatctgttaccatcgttcgtaaccaacgcgtaaaattccatctcttccctccttcctcacttttcaacgttatactcttagccttcctctccaaacagttcaccctcttacctgtgcatacacccatccagttatctttataccctcatgtggagaccggcaactcagcaatctggcacaaatgacgttcctctaggtgggaaccgtcgtagatttggtgctcctccagaggatgatcaacatcgtggaggtcaggctcctgctcctgcttacggagcaagtcctcctagatcaggttcaaactatggtcaaccccctcatcaagataaccggggttcgtatggagatcgacagcagggatatgctcctcctggttctggtggatacccaggtgggggaggggcaggagggtacgattcaagaggtccgccaggtggcggaggctatgatgctcacagaggaagagacgattatgacgcgaggcctcctccgggacacggctcgccaccagctccctctgctattctgaccgagctatcagacaccaagagagagcgagagggagaagacggaggtacgtctatcttttttccatccatctgtccatctgtccatatgccatatattctctaactcactttataccttgaacttgttcacgcgccttgtctactcttccacgtcttgattccagacgctcctcgaaaacgacgatcccgatggggtgatgctgccgccaatcctaacccgacccttcccaccatgatcaatgctaacgtctctcaggctgagttggacgcgtacgcgacccgaatgcgtgtcgaagagatcaataacaagcttcgatcaggagatatcgtgcctcctgaaagacaaaggttcgtttttttatgagtctgattcagatcatacattggctcatcaaatcttgtacaaaaacatctcctgtctgcccattcccacgtacaatacaggtctccttcccctcctcccacatacgatgctcagggtcgacgaaccaacacccgagaggttcgataccgtcgaaagttggaggatgagcgggtccggctagtcgaccgagccatcaagctcgacccggcttatcgaccgccgaccgagtaccatgctcagaagcgaaacaaccgaccccaagacaaggtctacattcctgtcaaagagtttcccgaggttaacttcttcggtctcctggttggaccccgaggaaactcgctcaagaagatggaacgagaaagtggggcaaagatttcgattcgaggaaagggaagtgtcaaggatggaaagggtcggccagagaacacagcagatgacgcggaggatgatctgcactgtttaatcacaggagaggacatggataaagtcagagcatgtgtgaatttgatcaacaacgttatcgctaccgtaagtgtctatatattctcacttgcgcctttttcggtcttatcctcttgagctacttgttaaaatcatcttctcttcctcacggccatatctaaaaacgcaggctgcttccacccccgaaggccagaacgaccacaagcgaaaccagcttcgagaacttgcggctttgaatggaacgcttcgagacgacgaaaaccaagtttgtcagaactgtggaaaccttggtcacaaggtgagtctttttcctcctagtcttggttctcactatgctgatcgtacttcttgtatctctgccatacacctagaaatgggactgccccgagcagcgcaactacaatgccaacattacttgtcacaattgtggatctcagggtcacatggctcgagattgtcgagcacctcgaggtgtacgaggagcccctggtggacctggagcgcctggaggtcctggtggaggacactttgacgcagagtatgcttctctgatgaatgagctcggagaaggaggcggagtggccgccaagggtggaccggcaggaatgatcgagggaggaccggctggtggaggacaaagacctccttgggcggccggaggaaacgttggaggtcctccaggagaagactccggcgcgccgagattggccccttggagagacccaaagaactggctgggacctgttcgtatagcttctttgatcagtttatcaaattctctatatcaaggtctcttattgacacttgacccttttttttcctcctccgacctcactcaggctcagcgaaaccaccacggacctccaggccagcactttggaggcggaggacacggaggataccaaggctacaatcagcagcagcagcagcagcagcagcaacaacacgcaccttatcagcaacaacacgcaccttatcagcaacagcaacattatcagcagcccgctcaccagatgggccacgcaggtatgcccgctggcggaccgcctggcatggggggataccctggctatacccctcaggcggctcctgtcgctgctgctaccgctgccacgccatgggcaaccgccagtccgacagctgccgccgtcggatctcctgctcagccctcggcgtatgagtcttattatgcttcgctagccgctaatggcggctcgggcgttggggctgcgtcaatcgtgccgccatctggcgccccggccgcttgagaccaatgaaaaacgtgctcggttggatgaggacaaggggtaggactcatgaacagggacagaggcacaggctgctgatcttggtttcgaccttcagagacggcgcttatggctcatcgtaccttcctctttgtcctatcccctcatcttctcctaacgcttgttcttgtgctctcgtcgtctctttgtgattcttctatgcttgtaggtctctactttctcttgagcactctgacgcgacccgttcttctttctctgcttcttgaccttttctctacatcttgacctcttgggctgtcttctgatcggtttttcttaccctccttgcatctcctgtctctgctttcttacctcacatcttatccctgctgcgcttgtctcgcctgcctcacctgcttgctcaatcaacagatgtctcatccttctgtttctgaacaaaaccctcttcgcttccatgatttcagtcctccaaccgtcttatgcctcaatctggacctctctcatatctcgccctttcaccatttcaccatccagatgatacttctgctttcttattcctcttactaaaaagaatctcgtcatgatccccttgactagcaactacagactcggcttgtccatcatgttttgatttctgtgagtggtgtctattgacttttccataaatcgagaagtagattagccgttttttttactgatatttctttctcgtatttgggcatacctgctatggcgatccgtgttattgcacctaccggatgattcgatctccacggaatcgatgcacacacaacaggacgttctcttgtgttcgcgtgctcttacccggcttgatctgaagacttgtggagatgatcgcgctcacggggtcccttcttttggcctcttttcgtctttgaagaagaagactcgtcagggttgttctgaccttgtcgaattcacccctttttccttcctctgcattctccatccttctcacccattgtctttttctaatttaccttcccctttttatctattcgttcctctcttgtcatcttttcgtttatctctttgtgatcgtctgcttgtattgagaaagatgatagtgtcggccatacccaaggaaggcttctggtcctgttatcaaaatagaagaaaaaaaaccacatatgtatatactctacgagatgagtgattcaaagggcctgccatccatatgtccagaaaaacctctagctgagaacgtttgattgattaagtatcttgagtttgtcgataagatagccccaagtccggaatcgggatgaacaaatggacaagcgagcggatatacaagggagagaacaagactgaggtgatagacgtctatcttcacctaacctaggacgtccagcccgttctttgatttcttcttactaggtttctttgagaatttgcgccagtcgttaacctgttatagaaatttccccctttcttcattagcttcatgtatcacaacagagaggaatgatgaaaggaagtgagtaaagaaatgtacggacacgagcgtctcgattatctatgcgcgtcgtcagaaaagcagaacaattgaggttggacaatcaaaagcgggtcatcatcggaaaagcacagaagaaggaagaaaaatacgaaccttcccacgccttgtcatcctcgatttttcgttttctctttgcaatctcttcttcctttttctgtgcttctaaaccttcgtttgccaaagtgtttttaattgctctgtttatggaagagaagtggaagaagattaaaaacatgcaagagcgcagagtgcagagaagtgtcagaacttggggtttatcatatgtgaattttgaaagaaggtaacaagtgggagagtctgagacacaccttcttcgagcaacctcttcatcaatcaggatcatgcggacttcttgaaggatttgagacctccaatccgtaggtaacatcggatcgctgaagtcgccaccgagacggaataggcaagtaatgcatggcatgagtttccagacttgactcttatccggtgagatgcttgaattgaatcgacacgtatataagaagaacaggaaggagaagaaccaagacctactcgtccgtagtagtaggcggtaaaggaggttcgaactgagccaggagacctcttcgagcatagagcacgattcgatcgatatcctccctaggctctttgtttgacaacgattgttcggcctagaaatcagaatgaggaagcgcagagatcagagcgatgcataatgatgatatgttcaaatgatactgaccttctttaaccagtcaaaggcctgggaatcgatgtgacacaaaagagttcggaaatcaattgatcgtccactccagatgattctagtacaccgccagacagatcagaatggaagagcgtaacataattttaacgtacttcgactcctcgctcatgcttgaacttatcaggatggatcagaagactcttcttcctgtattgtttcttaacatcgttctccgttgcgttgaaaggtaggtcgagcacgtcgaacggactacgatgaagagccgaccgtggcatgaaaaaggatcagtccggaacaatgttgacggagtttgacacagatcatatctacttgagcttgaaggacttcatcactcgttccacctaaaaaagcgaaacaagacatcggattggtattcgaatttgaacagaaggatcagtaacataaactcatcactcataaatagacctataacggactgacctcgagttctttgataaagttgctcgcctccactgctatctctctatcgttcgtagacatagtggaaggaatcgtatagggacgaagatacgagaatgtgcagatagactagctactcggacgatggttgctgggatgatccggggatgattaatccgcctgactgcacgtggcgtcttttgtctcttgatcaactgctctcctctcaacgtcgaccaacgactccgtttacgtctcatcgaggtctcttcctcttcctccctctcctcggcgtaggacggacacaagttggacaagtaaaggatcttgctctatttccttgtctggttgaaaaaatcggccggagacagaagagagcatttggcaggcgagtgaattctctttgttacaccattcccatgcacacgctcatgccggcgatccactcacccctccctttgtccttcggcttaaccgatcttgactatgtaggccagcttttacatcggaatccctaccctagtaaggtgtcgatagcgtccatacatctgaagttctggaggttatctcaaccaggtctgtccttagtatcttcagttaacccctcaaaagttttctgacactcgtcccggttctatcctcatcttacaatcatcggatcaaactgcttacaatccctctctcaaattgcccttgtcgtaataaaaaaacatacggactaatactgaatggccgcgatgaacatcattgatccaactctaccactcattctcggatatcataaagtacaattatccgccaatgtctaatgagtttatggatgaacacaccttcgtgaaggcgctcttcgacttcaagtcatcaggatcttccggcttgagttttcacgaaggtgatatcattcaaatatataccaaatcagagtcgggatggtgggacggggtttgtgatggtcagagagggtatgtttttctatctggagactttcatcatctgatatatcaattcgtttatcaaattcccttctatcttacacccttcttttagctggctgccttccaattacgtgatggcgcttaccgatgaagaaaccaatagagaaattctgcgagtggagcgggcgggtcttgtcgcctctagacaagagctttcggacttatccgttcggaaagtagagtcgagagacgcggaacgagaacggcaggacaaacatgaagcagatgatgtgaatgatctctgggttccgagagtaagtccctcgctctgggtactcctgtctaagttgatcgtgcgctcagagctgatttttggaaaaacacatcttcaacagatatcttcaggaggtcaagtaagcttacattgtttggtgctctttatcaacaatgttatctgttttgctgacatcatatcaatttatgatctgtggcttctcaggtgtattacttcaatactaaaactttcgcaacacgacaagaccttccttcggccgacccttcttcggacgtagacgcaggcgatgctgaaggcgatgaccacttggtgacatccaccgtaaatggccgtcatcgatcttctggctcttcagcgggttcatctcctttcagtcctgcacaacccaaggcccgtcaattctctgaatcgccaaagcaaagtagttaccgtgccttcaattttaatgctccactcggtacttctctttctacgacagaccgcttagaggatactttgctccccagtcctgttctctcgatcgagtcatctcctgtcctctcagatcctggagttttcccatcctcgatttccctcgggccgtctccctattcttctaagaatgtcatacctagaaccaccagttccggaaacctttcaaggtgggattctcttgggaaaagattcacgcgtgaaagctttgttctgcgcaggaaggctagctcgggatcgtctaaatcttcccgagctcaggccatctctgacgtggctctaaagatccgagacaccatcaaatcttttaaagactcgatcgatagttttagcgagagcatgctcttcgcagacagaattggccatgcaggaagtgctgtcaaggaagctcacagtgcggtcggtttccaactgaacttgatcaccactgccattcgtgacctagtatatatttcaggagtgttttccgtggggtcttcgagctcaacgtcctcgtcctccaccgacctatccaagaacaccgaggccattcaaagatcttatctcaaagtccaatatgccttctcccgactgcttctctcaactcaaacgtaccttcgcatcctggagtgcgttggcgtaacctctttagcagatcaaatatctagctcgaaagtaaagactgatgcggaagacgtggagaggttggtggttgcgtttggattacaggcagagcttacaaggaacatgcttgaaaagaccgatgactacgaggcgaacattcgccgtggtaatgcttgggtagaatctgtcggattggatcgtctaccaggcggccaaaacgggttcttatctgacgctagatcgagcggaactcttagacctttcgcaaccgaagctaccgatccagtaactcaccaggttcagcaggcgtgccagcaggctttcggcagactagtggagatgtctcctctttccgtctcgttgaaggatggccaagagatagtcatggatgtcttgacgcgtgtcaacatagttctacggcacgttcgaagctttgatatagcaaatgcgatcgatctcgatggagaagacccggctacacctggagtgaaggatagtgcctatggagcgcttgtccaagatgccaatatccacctgcttcagttcgagcgctcgaccaattctcttacaaatgcttatggccaagcgctcgcttacttcggagcgcttcccatcgccgagctttcaagccatctgtctgtcctccagcaattggccaatctgtccttgaacgctttccagtctctctgcgaggtcgcattctttcaagttcaggccgtaaaaggtgggatcgccggccggatcggcaatcagcagagaagccgtacgtctaggattttatccagtggtaatcaaagtcaggtgggcggatcatccagcctctctcgaagctcatccttatctcagttgggcgaagctgctctcaaccctacgccgaggaacgattctaaggctgtcagtgttgattctgaagatgataatcgagctcaatcaacaccagtcgctgcgctaggatttggaagaaaaggtgatcggctcaacgacaccgacgaagatagagacgtagtggtttcgatcccgacttcagcaagctcactctcgctgagtggacgagcaaggacaggatcgatcagtgcactttctttcgtttcgtcagtaccatcagtaccatctacaccatcgactcctttggaagatacagacgggagggagagttggctgataagtaaatcagaacagttcgatccgtcgagattgcgacagaatagcagcgatacttgtaggttaacatcttgtagagaagatgatacgatataatgcggctggaacttgtcgtctgatactgatgctgattctgctggcttaatcatctttcgactcatctgcagccaatagcgatattcattttagcgttccaagaacgaaaaggattgctatagcgctttctccggccgagtcgggacaggaagatacaccttggtacctaggttgcgactgggatcctgaggatgtagtcctcggtgatggtgacaaggatttagtgaaaggggctaccttagatgcattgatcgtcaagttgacgtctcacctaggagataagcacagtaagttgtttcgttcctccatcctttgttctgacgaacaaatggcaagcctgttctaacagccgtgtccattgggatcgctctatctcttgtctaaacttttcaggccatgaatatcgagaaactttccttatgacctacaaatcgttcaccagcccctcaacacttatggagaaactagctgctcgattctatatctcacctccagatagtttaacggttgaagaacttgggcgttggagaaatgagaagcagcggctcatatggctcaagtgagtctttggtcctgttcctgttcgcaagtttttgtaaggtaggaactaggcatcaatggctgacggtgtctttattctcttacacttttacaaagggtcatcaatgttttgaaatgctgggttaccgagagctttatagacgcggacgaacacgcaacgataaggatgatcgaagctttcgtagatggtctcccggatactgtcaaagtgcgagaatccgggggtctggttcgcattcttcagaacagagttagttttttctcttagttcttcagagaattctcgcctgtctagagggaaaggacagcttatctttccgtcttgtttcctggattgtatagagaatcgataatgcttatggcggactcaattcacgaaaggcaactgtggtgaagaatgattcgactccggctccaatcttaccgaaacacaagatcatcagggtgacagacatggatccgcttgaggtggctagacagctcactatcttggatgctcagctgtttggtaaaatccgaccagtggagcttctcatgaaagcttggtcggatatgtcggattccaaaaaagctcccaatgttaaagcctgcattcgatttagcaataatgtgagttcttctgatgtcctgagcatagctttagcttgaaggaactctgtctgctgcgtctgctcgattacacttgcttatgggtttcaacatccctccttaggtatcgaaatgggtccaggtgtcactcctgtctgaatatctacccaagtaccgggcccagatcatgaaagctttcatccaaatcgcaaacgtaagcttcgctagttttttttaaatcttttgttttgttataactagacagacgtttttgacctctgttcatgcattcaatcttctcccgtgggtatctgtgtgtttttccctttgtttattggatacttcgaagtgttgcttgtcaatcaacaacttcagttgtatggcttctattatcgccggtctggtatcatctccgatctctcgtctgaagcgaactatcgagcttcttagctccaagaccattgctacgagggacgccttgatcaaactagtggactcagagcgaaacttcggggcctacaaagaacgactagcaaaatccaacggacctgctgtccctttccttggtgtgttcttcttgttctcagaagtaggattatatacgttttattcttagtgacgacattgacattgcgtttatatgttattgatacaaggcgtttatctcacctacctaacattcatcgaggatggcaatcaaaatttcctaccgggaaacaaaaagctgatcaactttagcaaacgaacaatgaccgcttgcataatgaaggaaattcaatcctttcagcttggaagatacaagtaagtttggcaatgaatatttaattgccgcgtccatttttcttgagttgtttttgactgacctgagattgtcctctttcttgaaacacagttttgcattggcacccccaatccaggcttatcttcatgaacacctagcggcggatcatcatgtcagatctgatcagcaactttacgagcgtagtaaagctctagagcctagagagcaggagatggaacgacttactcggtgagcttaggactggtctgaatttgtttccataaaacaaaaatacctatttattcggcattttcctacttcgaatttatgcagactcttccaagagagcggcttcctctaaaagcctaattgacttctccattctcgtagatcgtgaacgattatcgcttcgcctccaagtttccctttcttctttcttctttttttgcttgatttgatttacctgtgctgctttctttcctaactatcttgatagttgcttctcaatctctcaagaacagctggtggtcttttcttcagcttgtggatggtcttctttgcttcctatttcatactgctttctgctcaatttttgcttaaaacacgcttgcttctctgccttctcttcgttatgcttactttagttgcttcttgttgtttatataattatgatgatgactgctctttctgataattatcaaatcattgatgaagaaacatcatttctgtgtatgaaactaggttgaaatgacaatcgtcttcgatatcatttgaatagaaaatgaagagatcaggatatttggttctcaccgccacctttgaaattatcccggacctctctcatgacttgggttcacggaaaggaaggcgacgatatcgttttcaaccctccgttgatcctcgtacgacaagtaagaattctcttgctatatgaattttcttgtctgaatgtccggctggttgatcaagaatgctggcatatcaacaaaaagtcttttcagatgaaaattgattgctaaatttgatctcgtcatctgggtcatgtcttgatattttctcatagcgatggattttggagaagctgaggaaagagagtgtgacttcagtgttggacataggttgtggcgaaggtacatattctggtattctgcttccaatctcatcaacgaaatccagttgcagattgacttgttgatccttttttgctggtttggacgatgtggttggataggtaacttgcttcaagctgttagtgactatcagtatctgtccttccagtgttgttgtattttatagaagaaagaacttattgatatcatgacgtttgactccagctctctttcccagctcctacaattccagagccttgcattcgggaagacacatgttcatccgaagaagatgagccagaacccccgagtttacatcttaaagttagtatctatcttccgttatagacatataatgccagggaaacaacaattatagatctttccctgcggcgaccaaatgaccgatcatttcaatttctggttataagaaaatcgcaggtttggacataagcgaacaggagctgaatagagcttcagagcggatctttcctctgattgatgattcatcagacagcccaattcgcaaaagatggacagatctagagataaagtttttcctgggagatcttaccgttgtaagtcccatctttggttagaggaactcttactgatctgataagcattcttattcatgttgttgcttcttcctgtgaagttcgatccagaactagaaggatatgaagccattgtcgcgtcagaagttgtagagcaccttccacaaccgatgttgagcgcactcggtcctgtgctccttggaaagtataaaccccgtctgttattaatcaccactcctagtaagttagagcatagcttgtttgatgattttctttgactgagccgacgaaatggaaagttcagattttagcttcaacgttcgcttcaaccgggacggagagaacaagagaggatatccagatccgacaggaaggacagacaggattttcaggcaagtttgactggtgtcagcgctataagagatttgtgtatttatcaccttcactgtaatctatgtgccagacatgatgatcatcaggtaagacaatacttatctgtctcaagccatcctccgtcattgagtttgctgtaagacttttctcttctcttgtcgctcagttcgaatggacaccggaagaattctcgtcctgggctacgtccctagcccacgaatacggatatatattggagaaaagcgctatcggttcacctacatctcctcttccgcctccatctgaatcagctacgtacgctgtccattgttgtgtcttccgactcgatcccacttctcctcaacaccagagcccaccatcgtcttcttcctcaagcgcgcgtccaataacacccagttgtaacaaagaaaatcatcgactcctcagatccacccttattcgagccacatctctcatcgggctggggattgactttgaagatattcgagaaaccgttagagatctgatgtcatgttggggtagaacagttattctcgtgagtgaattgtggccagagttgggagtcctatgtggtggatcaaagagagtcttggttcaggtttgtttcaatctatgctttgctcttcctgttcttttcttcctttctcaaatcttatcattgaagacgtgatgtggtcccgatcaactggtacatccacaggcgcttggtggatggggtaatgttcccccgcc

SEQ ID NO: 1696 - DNA, 44131 bp, Xanthophyllomyces dendrorhous
ccttccttctccccctctgtcatcgtcaacatctacttccgtctactcatactctgatgggttcttcgattttcaagagttttcgatcaaacgagccgggtacgatcttgaaatccaatggaaccattatcatgcgtatgatctcgcctcttcagagcaaccgcctgacggtttgatagactttgattcgagagacaagaaaggaaagagagaagagaatggatggggatctgaggagtcaacaccgggatgggaataaactggaggagtttcatgtttttgatgaaaatggtttgtctaataggtcggatgagaagctcagtggttggtacaagaatgtatcggagagatatgaatagatagaagaatgaacgtcatgaatggggggggaatattgtataaaatgggggaatttttagagcttccaagctctattaacgatatatggaaagagcaaagaatgggagaaagacgaaaggtgctaaattacagaaaccatcttccgaggtgcttgagattgtgaatcaaatccaagacttttagcccaagccttcaaatcgatgttcttgttctcaatctcaatcatccaagtaagtttctgttccatcggaagttacatcggatggaaaaaaaaacaccagaatatcagatcagtcggaatacgaaaacgtatcagcaacccgtcgacttttcaatacttactgataactctgccggattaggtctaatcgtcggatccttttctaaacatctatctacaaagtcaccttcgaccgttccgacgccccacggttcacctaacttcggcgccggctcgttgactatatgttgcagcaggtctaagatcgacattgtcatcccacctccaccaagggacactcctttggatttgcgtttttcagatgtcggaggcgaagtaatggtggccgatgaagttgatgagggtatatcagagtcatctgcatcatcagaatcttcatgaggtaaggaaatagatggtgaatgagcgcgctccttctctgctttcaaaataaaatcatcaattggaatgaatcacctgaaaatgggaaccggccaagcgccatctcaatcaacgagattcctaaactccaaacatctgatttgacagtatagggcgctccttggattcgctccggctgtccaaataaaaaagatattcagaaatgtttgtttaacacatgagtcttgattgttattatgtactattccaagagagaaaggagcaaaaggactgacactcatatacgtgcttgttcctacgaaagtgttggcgatactattgatcaactcgcccgatactccgaagtcacaaagtttgatctccccttcagaattgaccagaatattcgatggcttcacgtctagcatttcgctcgacccaaaaaaaaacacgcacatatatggtgatgaggaagaggaattccaaaaatatggaaaagggtacctgaggtcaatatttgcatgctaatgcgaagtacctgtaagtggagagaaacaaacctcggtggatgattcgatgaacatcatatagatatgttaggccctcgaggacagcatgggctatcttgccaacgatgtcgatgtcaatcgaaccgtgttttcgatagatgttatctagtgacctgtagaagtcgagtatcaagacgatggaaaagaaattgttctgtcaattcgagaacgaccttaagagccacaacagacacgatacagaaagaaacacaccctctatccatgtgctccatacagatacagatgtgaggatctgccatgaaagcgccatagaaggaaacaatatatggtgacgagcaatcgtgcattatctgcaactctcgtaagatttgtttcctaaccgacggcttggcatcgattagaaccaactatatggaagaaagtcgtcccatcgcagcgaagtcagtgatatcaactgacaacatctcgtctcgttctttctcgccatatctaagagagaagctgtacctttctagccatatagagccctgtcgcttcgtgtaaaactttggcaaccgtccctccatttccacttcccagatcaccaacaaccttcagatcctctcctttcagatctgtctttgtttttccgtttccaccgcctaaatgcaagctttcgagctggcttgctagcttctgctggtatgagaccttgccggaagacggagaagatgaagatgacgatttttttattcggccagcggatgaaccggtagttgtagaaggcgtaggcgctagccgagtcgggccgatcgactttgagatgtccagtccgacgggcttttttctcgagatgctagattttttgagaccacttagaccgataggcatgctcaaagctgggtccgatgtactcgaacagggaagaagagaagacgacgtggaggacgaagacgacgagggcaaggtgatggtggattgtgatgtgacaggttttccgagcgtcagattctcgacagaaagtgatatagaggaagaccgatcgtatgcagacggagacactgtcaggtctgttgtctcctcataggaggaagatgcagagccgatataggttgattgcgctctaggagttatgtttaaacaatcatcgtcgtctgtgtagtccagcggtctaggtgccaacgcttcggctgacaattgtaggagtctcggattccgtttcttcttcggttgcgggagccctgggaacgtagacatatgtgtgtggatgaatgagtatgagtatgtgtgtataaagaacgagatcaacgggatgatgaccggaagggagagagatgggaggaagatagcaaagggatcaaaagagcatttcaggggttccctacaccgcagtcacgtgcacaggtcattcgtagggcgcatacacataaacacacatacatctaattggaacagagggaaggaagaacgagagagtacggaaggtaaggcagagtaaaaagaaaacaaaaagatgacacgaatccatggatcatacggaagatagatagagaaaggcgaggaggaaggagcgagcaaagcacaagaacgaaaggaaagaacaaaaacaagatacataagcaaaactgacgaaatgtcgatcgaaccgatcaaatcacaaacaactagaggacagacaacaaggatacacatatggttagcgaatttcagagaagaataggagaacatagcatttgtaactaaccttgccctcccctgaccgcactctcttctccaacaacctactcgctctcgatctccaatcagattccacgaaccgctcgacccgatcccacattgcttcttttcgcatatggtcgggaataaatctatctattgggttcttcatggcgctttgtatagcatgaaagaaaccatcagaatcgtttctgaatacgttgtacacgtatggcgcatcgacatatttcagtccgttctgcaggagatccggggccgagatgttagtgttctactcggtcttgctttggagactccaacacacacataaacgaacacacctgctgagtataccagttgattttatctcccggattatctttattccaactcaatattgggttcaagaatggtacacctagacagagcgcatcgtacggactgggactcaacggtgggttacctattccaatcaaaatcttgctatgggcaaccttagagaagaactcggtctgagggagcaggtggcttgtatgcgccaacgcggacggcggttcaggaacattcggtgtagactgtgtatatgcgagtaatgtcacgttgagttcatcccgggctcgttgaaagatcgcgttggaccctgcaaattgtgagttagagtagatgttcgggtgagatgcgagaatgatacgtaaatagaacggagacacgaacacgcaaactcttcggtgaagaagaatgcagacatctttgcaaacacgtatgcctgcttctgccgctcctctcgagggatcagaggggttttctcacagacctcctcgatactatacccaatatatgtgttgcccaaatttgagtcagaacctcgggggcctatgacttgctttttcggcacaagaatcttcgagggccagatgcttgctaagaaagaggaggtcgcgtctctctttcgcttgtaaccgatggaatcaagctctccgccttggaagagctttcggaaatactcttcctgaagctcgatagaaggttccggtgacatcgtccagcctggtccgagtggatttttactgtcgccccagaaatggaaggagaataacttccaagcaggaatccctcctttgtcccaaatggatttctccgaatcagtattttgtgttgtatcagttcgagtacattcagcggactctaggcatttgaatgatttgatgggttcgacgacgacgactaaggcgaccgaacagattgaaagcactagagtcagctgttaaatcaaaagcgttttttgcgactctttggcgttgatacctttgacatagtcccccaggactctatattgtatcgcggtctggtcaagcctccttgaaaataggaacgtatatcccagatgatccaacgcacggattatagatgaagccctattatttgagcgattggattagccaatgattgttaaacgagaagagagcctctgaatcaagtgacacagtaagagaacgaaccaaatggcttccccgcccatccaactgaggaaagcagatccaatgaactccatcgagccgacaagaacgatggacgattgtttctctttacaagttcctttctccaaacattcatgtaaacggatgattgcgtttcgattatgttcttccggtgtggagcctattgagctttgagacgagacttcaatggttggatcaatcggatcatctggatgcgctcggagaaaatagagaagctcccgaagtggtgggagaggaccaggaggaggtagaggatctagatgcgggacgggtataggctcagattcgagctcggagttggatgcaaagtttggatgagaagttggcgtggtatatgaaaacagaagggtgaacaatgagaaaagagtgagggtaagagcgataaagagcggaaccgtccggcggggcgagcgaacgaatctagaaagaggaagagtggtataagtatggttttcgaaacaagatgccgcaccttcatcgagagaatagacaaccgggagaatgagggttatttctctccttttgaactaacctggtcattgaagatgattcatctacagaataaaccaaggcttctctatgagcgagtgaagaggcgttggtcaagtgttagctccgaggtttcagccagaggaggtttcactggttagtcaccctggattcaacagtcttctcttccatcacttcctcgcctgcctctgtcggtttgatctctcaactatcatcacagtatgtctcctaccgaaccttcccagttaaatgctcagatcacatccacccagggtgtaatctacgaggtagttttagtttcatttgatcaatcgttattatgtcccatctgattcctgacttttcaatcgcatacagaccatcggaaacgtgacaggctcctcagcctggaaggaaaatggaaagaaccttcaagagaatgggaagaaggaactagaagctgctaaagcaaagcagcatgtggatgctgtttgggatcaagcagccggaaaactcaagaggttggcccttgttttggcagatgtgttgatcaaacaaacttatattgaccgacatgcgcatatacccgcatctacttaatagcggatggggaattatagctggtgaccaagacaaacagacagagggaaatcttcaaaatgaaaggggaaatttagaggaggcacagtctgttcgttgtctatatttcttttccttgtaatgcagtgacttgagatcaataaaactgaatattctaattatctctttcctttccgttttcttaaatgcacatatggttcatctagaaaggagaaatcttgcctgctggaggatcagagacgatcaaaggaaaacttgagacggctgctggaatcatcaccggagatcaagaaaggcaaaatgcgggcaatgtccgcgtccaaaaggcagagttgcaaggaaatatttagcaggcggaaatgtttagagatctgctctactttcgatgagaaaagctcgatgtatttaactttgtgtgatccaatgtatttgacgctattgatgtgccaatggcaaggtcgtcttgtcgcctggagttgggttttatctatcggctcggtcaccaccgcgattagatttgttttctcgttccgaatttgtttttttttgtcgttcgttctcccttccacgtcgacatcttatcgtttcttcctcgacatgtcgagaagagcaacatacctcgatgttctaagcgaccggcaaaaagaaggttcgctcttcgcacagatctgatcagcttgggcattattctcttttgaggaaagctcatatcctccagaggaaacttggaatttataaaataatagccgtcacatcggatccatccgttccacttcaaatcctcgccggcccaggatctggtatctaacatattcttataaatctttgttcaatctttgttttctattgatatgtatgccaactgactatggcttaactgctgtatggggagataataaaaggcaagactagagttttgaccactaggatcgcacacatcatcgaacatcactatgtaccacctcaagatatctgtgctgtcacattcacgaataaagcggccaaggaaatgaaagatcggctaggaaatctattaggagatgagttagcttccaagttgattatgggtcagtcttcagaatgaacccctgatttttgtatatgctcatcctctatcgccacctgggaatgaggctgaatggattggatttcttgtacctttcaggtactttccactcggtctgcgttcggtaccttcgtcggttctctgaactcatcggactccctaagaacttcataatccttgatcctgacgattgcgccaaggttatcaaacgccgatggcctcaatatgccgagaagtttcgggaacttgctcaagagtcagccggagagggaggaggtgaagggatgaaggaagaggattttaaagagaagtggtgtttaaatgaaatcagtagatcgaaggcaaaaggactggaaccacgagcggtcaggaaaatagcgatagaggaaaaagatcccaagaaggctttattcgcagatgtaagttcatacacaatatcctgtcgtatttcttcctttatcatgtcacttacttctttgaatcatgtggacctgaaactgctagatatacgaagaatatgagaacgagcttaaggacaatcattcattagatttcgatgatttactctcaaggggcatggaggtgagtaatgaagattggcggggtgctcatcgagaagccaggatgggattattgaactttacgttgacttgctccactttagcttttcaaaacaaacccgcatggtgagaggtatatttctcgtaaatggcaagttgttatttcgttcgactgaagaactgtttgtttcgtatcttagtcttgttcaacatcaaacatattttcatagacgagtttcaagtgagcattaccctgtatcctcaccactcttcacttcctcgctgatttaatgtcaacttccgactcttttcctcaaggataccaaccatgttcagtacactcttgccgagtaagcacaagccattgttgtctagaagtaggctggaaagctgatggcagtatccttatactgatcgtgttgttcggatataggttatttgcgggagtcaataaaaatatcacgatcgttggagacccagatcaaagtatttacggatggcgttcggtacgttcctcggatctccttttgacatttcgtttctgtcatctctacttccctacttatcgaaaactggcgatcggccaatcctcacggatctttatcctgatcgaacaaaggccgagatcgagaatttgaacaagatgatgaggaatttttcagggtgtaaacaaatctttctagaagagaattacagatctacaggaagtatcttggcagctgcttctgctgtgatctcccaaggttggttcttttaatacccaatcgaactttcttctcatcccttctgcctctcatcgatgatttatttatctgtttatgatcgatagatgtgaacaggatcaacaaaggtacgaagattcgttctgatctcattcatacatagatctacaagtgctcacttgttattctatcttcggacctcttaacacaggcctgtttacaaatcgcgccaaaggcgaagccgtcgtcctcaagcgattctcaaacgacgaccacgaatccaactttatagccaaagaaatcaaacgactcaaggttgcctacgcactccggtgggatgatttcgcagtcttgttgagatacaatgctcagtctagaggatttgagaaagctatgcagaccgaagggattccgaataggatcttgaatgggcacaaggtgagggtttatctgaaccgcctgtccttcgttgtggttactgataaaaacggatgtgcggttttttcggattggacaatcagttctttcaaagagcagagattatgcttgttattggatatcttcagctagtcgagaatgaagccttcggtgtatgttcccctctgatttccatcccaaaagcgttgaatcagaaccgtgcttgaccggtacacaatgggttttcgacaatttttctgcgtagtctgcattcagaagagttgtcaatgctcctaagagaggccttggagaaaaggtatgtagtccagatccttatgcgacctattttgcgactcacgaattgaagaagcaaatatatatgcgattctgtttggtgatagagtatagaccggattgttgcatcagccaataacataggtgcatctccaataaagtacctccgtcaatcacgaggagatctgaataccaagcaggcgcaggaaatgaaaaagatgattgagggtttggatacggttcgagcttcagcaaaatcggtacgttcatgtttacttcgttacttaatccagaagctgattttgtttctataatctgagcagggatcatcagtcatggatctgatcgacctgatcgtccacgtgttcgagctaaaagctcatttcatgaaagaagatgattgggaatctcggatggaaaacatagacgaattgaaaacgttcgcttccaaattaactctcaagaatgagtctacttatgagattcctactcagggtgattcagatgacgagatagaggaggtggtgatggatacaccactgaggatgtttttggaggaggccatgttgtctacagacgcggacgaaacggctgacaaagatgaatcgcccgtaagttggctctcgccctctcttatggtacaaacagaaacatatgttgtacatatgtcataatcggcgttatctgacggtttgttgatctggttctgttgggtggggctgtttagaaagttctcctttcaacagtacatcaagcaaaaggactcgagtggccagtcgtatttatccctactcgtccgttcatcttacttgtcattcgacacgttcactccacgatcttcaatcgtctcgttttgcatctttttttatagtcgagatggatatctatccgttctttagatccaagacgccggagcagattgatgaagaaaggcatgtctaaattacttgacagctcgtactacgtatacatctatattgatcaacatgttgatctttcttatttaggcggctgttgtatgtaggtgagtgtctgacacaccttctgtggtactgctccagaagactgatgctttattcttatctatgatcattcgaagcaatgacccgagcgcaggctctgcttgtaagttagccagtttcctgcgtttatgcttcagtcaagcatggatctgacctcgctcttgggtaaggtgaaacagtacagcacacatgtagaatctcgatttgcacatggaaagagtagggcttcagaggtgagaccggacatttgtgattccttctcttgtgaacgttaactcactccaaatcctctccatgtttctagatttccccattcctgccgccaaaacacaaatgggtccgtatcaaaatctttctctttggaagtttctcacaacttgaagtaacgtgctcttctttcaatgacaataaaagagagagctgtttctagtaacgtatccgatcatcacgtccaatgcccgcattactatggcaaaaatcctggatcgacccgaaatagatgaaaaagttgttttggaagcgatggcatctgcgtaagtattccttctcagtcgtgtatcgatatcattggactcagctggacttttctcatttgaggggtcacagaaatattcctcatgaaacgacagacgagtattacctaccttacagcgcaccgacgacatacagccaatcaggagggagttacttcagtcgatctaataaaggtaaagacgagtacgctttaccacctatgatggattcatttgacggagggttctcgaaagctagcactctagtcggttcggcatctaccttttcttcttccactgtctcggcttccacttcctctacagccgatcgacagcctcgtcggcaactgcccggcgcaaactctgtgccttcctcaacaacatcctctttgtccacaactctaccgttgatatcaagctcaagctcgagctcgagcccatctatcggaagttttcgagcgacttcgtcccggaagatcaacaatctaagctctcgaacgggctccacccctgtgttcaattcaacattcaagcccccgtctttcatcaacccacccccttctgcttctcctgccaacccaactgcttctatttcttcaaccaaaacagcgtctgtcccatctcactctcgatcatcagcagcagcaacagcaggagggagaggaagaggaagacagaatcagattacagctgtagcccgccgtcgagcagctctgacgggccctcctcgaccggatcctcctaaatgggcaccacctcgtcaatcggaatcagatcggtataaacttccgcctatgaaatcaacttcctcaaaatcagcagatccttcaatcttgttacctgatggaccgggtactggtctagataggtttgttgatgtgggctcggaaggattatcgattatgaagactttaggcttaagttcatcaactcctcctactactgctgcctcctccgcttctcaaccatcaattcgaaccaatcaatctcgacctcaaaatctagaagaacacggccaaacacgctcgagaccaaaccggattaaaccatcattgacgcctacttatcttatcccacaacctacaaatccagagacagcagcctcaatcatcgtctcgggttctggaccttcttctttgggtctaagtacaagtacgaatggagtcgggatcaaacgaagtttggggcgttcaacatccgctgggtcgtcagggtcgagagggctatcgaggtcatcctcgagaggatcgggtactaaaaggtcaagaggattgtgaacgagggggagaagaaaaatctcgtattttcgataatgatgtaaaactgttctctcgggacagaaagtgtaatacataaagacgagatgaatccgttctatgacaaatcgactagttgaagagagagctgagtacgaacaaagtcaagagaccgaatggccattgttgagggaattatggaaaatatgaaattaagagagtgcaaaaattggatcctcatcatgaatgcaattggacatcgcgcacaagatagaatgaaactagcagtataaaacataggagtaagcaaacatagaacaactataagataaaaagtgactatgtcgttttagaaagacttcaatcgaaggataaagttgatacccaaagcgacaatgatgattccaccaaggagcgtcggtccgagatcatcgtgatacctcgcatctcgtcgctgatcagaaaaattgggatatacatgtgtcagcaagggatcgatgagagatcatagaaagaacgaacctttcttagggaaatcgctcggtaaccgaacattccagcactatatgcgaccgagatgagcgcacaaagcgtgaacgcaaacgcgctgtacattccggctgtatcatccacagaaacgaagttcaatagaccagttgagataccagcgagaaggacagccacgtgaagccatcggaggaatgttcgctcgttagcaaagatgacctgcaacacaaaagtacgatcaatacaggtgagcctcaatttaagtaaatccgttcttccaagtggcataccagtgaagaagtattgcttaccttgggctcaattctgacgggaacagagatcctcttgccagcaggagctgagaatctgaccatctccggttgatccaacggcgccccctcgtcctcctcctcttcctcgtccaacccagcctcagcctgctctctttctctctgggatttgctcttgaatagttttgagattcccaaagagttcagcatggaagaatacttggcatcaaactgtcgagatccagtcaacggctcgatgtggatcggtcgctcagctcgtttggccgagtttgtgttgccgttggtcgagggctttcgatcagccgtcgaggatggaccctgaacctgaccctccccagctaatcgcttggcctccgcttcctgtcgaagctttacctctcggaacgcccgggcctcattaatccttgacatgaccgcatcagtcagtttgatctgtttcgcctcgtcgtccttggaggccaatttcgagtacgggtcatcgtcatcatcaaactcgccatctgaaacgggctcgttgtagggcgcttcagaaggtggaggagatccgatagaggtgggtgtgaccgaggctgagttgccggccgaggtgactccgtggtgaggtcggtgaatatcaacctgatgtcctcggctttgttttcggatatcgatatccatctgggggagccaaaaaggaatcaaagcgactctctccggaagaagggcagcacatccatgaatgaacttggagaacttgggcacagcctcgaccaaatgactggcgactaggtctctcacccactccggtggttcctgtcccatttgggtctgtagcttgacctccaacacggcatacgggaactcagccgagtctttcttgtcgatctggttgaatggaggtgtgattccaatatctgtccgacgccagtttccgttagggtgatccgcgctggccgttcggtccttaccatcgaagtcgtcctcgcggaccatggtgagctcagtatcaagagagattcggactctagcatctccaggaagctggaaagcggttcggttgtagaacgaacgcatcaccggtcggagctttctagtttggatagcatattggacctcgtttgccaatcctttgactttgtcggcgtccttgggatcctttccctttgccttggcggctgcctcgagctgctcgtccatggtcatccggccgttgatgtagtcgttcatctggtgttccttgatctggaaacgctccttgacggacttttcccctgtccagtcttctcgatgtgtcttcctctccacaaagatcgtcttggtgtccatgcctccgtaccatctcattctaattgcctctgcaccctcggttttcttcaaccgaccgaggtaaagatccaagtcctcattatcgaaataaattgaagtgatcgccgaatcggctggctcgaactctttatcagagttgaatactggaaaactctgacgagtcagctctgaaagcgaaaagagaaatagatatagaaaacgtgatacaaacctagaacgggaagatgtcttagtacattcaacttcaactgaacaatattatcagggtgaacctatcggtgagagtttgtgacgatactatgttagcatttcgtccgcctatctgccgaaatctttacgacgaacagcagtcggctggaatcataccgagcctttctatatttcgacaaggaagagagaaacccaaacatacccagtacttggtcgtctgtcgaacgaaagcattctggcttcctcccgctccagagtcaccctcgacagggtgtcctctcgttcggacgaggtcgtagagcttggaaagcttgacaatgatagcatcgtagttgtatcgatggaacggggctttctcgaggaactgatgagagaatactggcttgagagggaaaccagtgactttctgtgggtcgcgaatatccgagtattagaaatgtcatgattctaggatctagccattgtaaagataagaaaaacgaaatagacgtacatcgtgctttttgacaatcttaatgaatccactgtaatccaagcgagattgctagacgatgagctttgttcatagaacgacgatttacatgcgaaagataagaccttaacatacgtgtagttcaactttgtgaataaggcgagatcatggacatctgctaccaagatagcgactggtggacggaaagcgagtgagaaagcagagtgagtgatgtaaactgagtttcggcccatcgactatcaagagacagaaggaaggaacgcaccatcctcctcaagagacctaaatctttcctcgacagcgtttacactaccatcgtcactgttcgagttatcttctccaccttcttcgtcctcatcatcttcgtcgtcgtcactaccctcgtcggcgccgtgggggtctgatggaatatggaacttagactgctgagcctctgcatcgtcctcatcttgctcgttgaggacatccggatcagacgtgagactcttgactgtcttttcagccactcggattcgggatgccaattctttggccttttgataaaatagagagaaaaggatgaatggatgttgttttcgggaagaggccccgatcgggtcatcagacatgtttgtttattccttttggaggggtggaatctacaagagctgaagacaaacctttcgatcttggaacccggcaatcttttcgagctctttctcgagctctttgacaaagtgtgcctcgtcctcgtcttatgataaggagggaggaagaagtagaagtcaagagcgaatggcacaacaccaattgattagcccaagttatgtttccacacaggcggtacacacgagaactgatttcgctggcgaaaaaaatcaatcaagaagggagcgcagaaaggatttaccattccattgaagtccgttctcagtggcctgtttcagggtcttcttgagacctttgtagtcgaggtactgcaagtgaacaatccaggttagtcacccaacatcttcagaaacatggagattgtaagcgtcagacatacaaaggcctcccactctgggtagagcgtttgctatgatcagaaaaattgagaagatccgtgtttaattgatccagggaaatttcggattttgaagttgtgggttattttgagtacatggagagagcgtcagtccaaaaggttggtcggatgtaatttcttatcgatcacccagaacgcgggaagagtttacttgcctcaattcgacgaccaaacttcatctaacaagatatcttcttgagggagttgattcagttgagggagcaggggtaggatgggatgatagttggagtgaaggtaaagagaaggaaaaaaatgggagatgaaagttaggaacaggattctttcgacggaatttgggattaacgaacgttcgctcagatttcttcgaggggtccctgcattatccgtcatgcgcagcgaagccacttcaggctcacgtgctagttcattaagtgtatttgaatatcaaagtttgaatcttgagcaagctcattacgtaagaatttaaccctagatactggagttatcatctctctatacgttccctccttctagttttgatgacatacagtagctccttacgtctcttgccaatccacctccatcttcatcttgtcgtttgaaagataacaatggcagacaaaacatcgggaaaacctcggatcattcaagtaccggatcagacattcaaacaaagaccgttagctattccagattattcaccctcctcaccctctaccgtaccaatcgtcatcgataatgggtcttaccagttgcgagccggatgggcaaatgaacagacacctcggattgttcaggaccaggtcgtttcgagatatcgagaccgaaagtctggcaagactgtcctcctctatgggcaggatgtcgaggttgacgctgcttccaggtcgggcgctcggtccgtatttgagggagacgtgctctgcaactttgacctgatggtgagttcgaaccgtctctgttctatatattgcgaggaaacacgcatctgttcgttccgccacaattttcgcactgaaaaatgtcatttcgattaccgtccgagaaggaacatgtcttggactacaccttcttgaatctagggattgacactcattcaatcgaccatcctgtcctaatgaccgagcgtgtctgcacacctttggccagcagagcccgtaaggatgctttcatttcttgctttcttcttgctcttcttttggtttcgctcaactcaccatccttctcttctttaatcacgtcttcttgtataaactttcatctctatagtcatgtcagaactgctgttcgaagcatatggcgcccccgccgtcacgtatggcatagattcgcttttcgccttctctagaacgggaaagaaagacgggattgcgctcggcatgggtcataccagcacatctgtggtccctgtcgtgaatggacgaggtcttgtaggatctgctagaaagtatgaatcaaagacgcgtctttgttctgaaagccttcttccggcgcgactacaggaagctgattggaattgtccttttcttttccactggctgcattctatattcagattagcgtggggtggttctcaggcaagtgagatgatgcttaaacttgtccagatgaaatatcctggatttcccacgaaggttactccgaatcaagctactgtcagttgtttttatctgccaactttatcctcatttattcccgtcaacagccaccgaatagacatttacgaagtatacgtctgaacctctctttcagtttatgtaccgagaatcttgctactttgcggaagacttccaaacagagatcaagactttggcggacacgaaacgaattaacggggttgataccatcatgcagtttccttttaccgttcctgtgagtctttcctccctttgtctagaagttgtttctcactcataaggaaggatatactcatttgttggataaacttctctataaaatgcaggtcgcggatgagaaaacaggagaggaattggcgcgccaggctgaaaagaggaaagagtcgggccggcgacttcaagagattcagacaaaacagcgaatggaaaaggtccgtccatcgtcccttgtctttcccttttgctattcgggaactgtctatctgattttatctcccgttctgtgtgttctagttgattcaacaagataccgatctggcagcttataacgaaatcaaagaggccaaaacaaagatcaagaaagctgatttccaggtctgtttctgaatccttctttcttctacttcttccttctttctccatactcatctcaagctctaccattctgcctgaacatatacgctgtagaaaatgatcgagaatgcaggatttgaagatgagaaatccctggaccaggcgattaaaaagattgaggaatctatcaaacgtgcaaagaagcgctcgatgggtgacgagatggagcctgaggcaagattatcttcatcttagtttgtttttcaagcaacatatcgctcatcttactattctcaccctgtgacgaccaacaggaagaaccgtctttccccttactcgacatccctgatgcagatctgaatgaggaagagataaaagagaaacgaaaacaaaggttattcaaggccggatacgattcccgagtccgactccgagctgaaaaagctgctgaaaagattagacaggttggtctctgcagcttcttccttgtccttctgcttgggttcaaacaccaagtcagatggagataacagaatatcgaaactgaacatatcactggtggatggggattggatgttgataggcagagattgagcggaaagacgaagaagatcgaacggctgacttggaaggctggtctgctaaaatgagggctgagcacgaggtgagtttttagtatttggtcgtttctccttttctatcctagattgacaccaataaaatctcttgaacaggtcgtggtccttagaatgaatgaacgaaaaagacgaagagcggcgttgggagataggaaaagtgcggccgcgcaaggtcggatgaagtctatttctcatttggctgcagaaggacctgcttcaaaaaagaggaaaaagaacggggatggttcgtattcggggtttcttacacatcttcccttcgtttcatcttgaaaattgatgggttgttttcttttccgtatagatgatgattttggagcaaatgatgatgattggggaatttatcgagaaatcgtaagactccttccccctcctctcttttcttgcctgttcctgacactgacgattcatctcttttcgtacggaacaaaaccacgatgtctacctatacacatagggcggagaagacctagaggaggaagaggaagaagacctcgggatcttatcgaaactggaatcttccctactcgcacacgaccctacattcacaagggcttccacattcgcttcgctgtccgaacgacaaaacgagctcatcacttccttccttcgaggaggatctctttcttccagctcttcttccacttcatcagcaccaacaggggagtcatcgtcgacgccggtaaacaacggtggcgagcctgaaccaggagggttatcgttggaggaatcattcaggattcatttaaacgtagaaagagcaagggttccagaggtatggtttcaaccacatatcgctggtcttgatagcgcaggtatagcggagatcgttcaacatgttttgaacgaagtcgagctagagaccaggaagagaatgcagcaggtaagctttctctcctatcccttatgcattactttacgtgaatttgtatttgacgaccttcttcattactcgtctatctgctcttcgatcagtcaatcattgtaacaggaagctcagcatccatccctggtcttattcctcgactgaaaacaagtctaaacccaattctaccttacggcacccccttcgacgtccgtacctccctcctccgaacatacccgaccgtctcagtctcacaaggagtgaagaaaattggagaactgaagaaggagagtgaagatatagcattagatgcttggaagggaatggctgcttggtctgggacagatgagtttgagaagagtttagtgacaagagcggagtatgaagaattcggtggcgaggttcgttttcccttcagtgcttcttctatatatttcatctctttgttgatcattgaggaggagaggaatcaaagctgatcgaaaatcttattctgttccattcaatagtacatcaaggaacatagttggggaaactggcgtacaggttgatcgtttatctacattcatatacatccttctttcccagtggtgaagcaaggactttctactggtacaacctattttaatttccatacagcaagagaagacaacaaacaacgtgaaaggcaacactcgaggaaaagagagagaaacaagaatgaaacgaaataaacatgacaacaggaagaggaaagagtacaacatgagaacaacaggacggaagaaaaggataaatcaactacttctacgcccttctcctccttcggttctccttctctttctcctctcttcccattccagagcccgagccatcctcttcccctctcttgcccactcagcggcctcatagtcctctcgtttctcaaatccctgtatgaacagatcgtacaatggcacgatgtgttcttcaagcgaaagagatgttgagtcgggatctagatctaggggaaaccgttgagtcagttctgaggctgcgatgggagatgcaggggtactttcgcttaaagatgtcaaggtcgaaatggaggtagagaatgatgcagatgcagaggtgtaaaagcggttggcagagatcgaggaagaacaggaggaagaacggaagttggacgatgacgacgacgacgtagaaacgggcaggaaagacgatttgaagagggaagcaccagggatttgattgagaaccatggtttggtgaaacagtcgacggaatggcccggttggaaaatcagcgtcccatcggacaaaaacttggatcaagatcgttagcgtgttcctacggacgaaggaagaacaaaagatggatcagtcctgagtctactttaggagaacgacaagataagacagaataagccagaaagaaagggtcttaccaatcgggtcggaaccaagggaacgactttttcattttgaccatgacttccatcatcgatctcatcaacgaatttcccactcttctccttctcgttccctcgttctttaacagtgagttgacgattagctttccaacttgccctccgtgaagcgcataccaatcgatgacttcctcagcttcaagcggtccgacatcagcacctacggctcggatcatgagagcccaggtttcctgacgaaatgcgtatccttcattcagggcgagtctgaagtagttttcgaacaaactcgaccgaatttcatctctgagagcatgctcggcgcgaccgaccgctcgttctgccggatcagcgggattgtagaacattggtggggcggacaggaaggcttcggtcgtacgaacatcaggtttgattttcggatgagaattgagagatcgctcgatttggtcggtaaacgcgtttgctgctgaccgagtagagaacgtcaagtttcctgctcgaatcaaatcattatgcaattcgagcgtccggtcgagcataggtatcaggtcgaatatcgacgcggccaggtcaagacagacaggcgtccgagacggaaggagtgctctgatgagtatcatcgatagatggacaggaggagctggagtacacgactgagtaagcgatggtcggtagattgtcaagtagagtttagcagcctcagatgcttgattgagatcgatccagaacgcgagcagggtgtgcaacaggtctgaggaaatcacccgatcagtcgcagctactgactttccgatcgcttcgatcagatcttgcccaaaagatctcatcccgtagaacgaagtgtgctcgtctccggattcgtcgaccgagcgaatcagcttgtaagcgagcagatggaaatgacgagtgttaattctaggatgagtaaggacgagacaggccggtcgggtagaggaaaacgtgaatgcaaactggacaagtgaggatgagcgaagatggatagtttgacagctgatgagcatggcgtaaatgcttaaagaatcatctatgagttgtgatgacgatgggtcgtctctcgcggcgaagactgaattggaggagatagaccaatgaccatcacatgtggtcaggatgaatgaggcgatggaagaaaacatcttttgctgggcgacacatagcgaattatgccttttcaactgggaagctaaccagtcaagtcttttgatcatttttttcatccactcaatttctctagacgtggcgagatgtcgaaagattttttgaaacagtcgctggtagctttttggatcggccagatgatgagcgaggaacttttgtttttgagtgagaatgagaaagcgctcgactgcttcaatgctgagcaacctgttacgtgctgagagcagtgcgaggaggaagggtgcgtgcagagcaagcgaggcgtccggagagagatgttgatagagttcgcgcacaggagtaaagtctgtgtggagggcaataagaggtcaggagagaaagatgacatggtgcttatagaaagagtttgtgatgttcgaaccttgagacttgcgggctagaacgagcgcggcctggacagcccatcctatcacttctgaaccaaggccaggtctctgtccgacgagcctcaagacgaatctggcacactcatctctcaactctgtgttttcgttcttgacctgttcaaccagacacttcacaagttgttcaaaatcctcactggcaataccgagccggtctaacggttcgctggaagagaacaagagaggaaggatgatccgctcgggctcgaaggcggcgacaggggaggatgtatggtagagaatggattgtatgcggaaggaaacagggggctcgatggcatccatcggaggatcataggtgggctggatttcttgaggaactatgtatgtatgatgctgtaggtgcggtgttggatgccacactgttgatgatcgtggtgaggatgatgaagatggactaggttgaaagaagggtatatgctcggggtttgagtttgattgatcgatttgtgtttctggaggcaggagatattagtgagagtgtcagactggatacatctagagaaggatggtcattggaggagacaaatatacatactacggccggaagaagatgacctggttgtccgagaagcgtcgttcagttcatattcccagactccaggatgaaacaagctgacatcaattgaggatcggtagttcttgaccggatgccgaaggccaacactccgggagtttcgtctggaaggtgaccgtgacgagagcagacaggtcgaaaatggcctggccccgagtatctgatatgtgccagaagcgtcagataagtctctgaggactccttttcctttgatagatggccatggatggaaaaaagtagactgtcttcggaaggaccgggtcgtatagccggacgagagatggaaggacggagcggataaggccaaattttgaggagctctccttgaggagtgagcgatgaacctagacgtcatggcatgtctagaaagggagagagaagatctctagcgagagagatgatggatgaaggatgactgccgttgagatcaccgagatggttgagatggattggaaccgagaggaacaggaaggcgacgaattggaaaccgcccgttattcttctcttatcccattacaaaagggcattaagggtttggtctggaaagtatatttgatggaagactacaaaagtgattacaccaccgactatggctcgactacaaaagcgacgagagatcacattacagagcaggactacagtcgaactagggtcactgcaaacaacatcacagatcaggacgcgtcgagaacactagaaaagatgaatatatgcgaatacaaaacgactctggattgactacaaatattgtagattgagtggactgcagtaaggactacagaattgactaaatgctattacgaaccagaccacagaagcgtaatagcagggaggatcgcgctcgtacctccttcttgagctggccgtgccttgttctctccattgaatccatcccatcccttacttcctcttcctcttcctgcccttcctctttccctcatcttccttctttcttctttctcacacacattatctcatggcgacaacatcattcacggccaggccatccaagccggtccgaaacgtttcctccgggacgaccagctcgaatagatcgatcgggagaaacacgatgaacagatactcggtcagcgccgtacgtactgttcgattcttccttctctctcctatctctcctctttgcgtcgtctacgagagacagaacatcaaagactattcctcggtggatgaagttcatatgttaacctgtatgatactgaacgatgttcaattggttccttctcttacgacaacctaacacccatgcatacacaaaaatacaaacaaaacaatcctattcctgattctgacaaaatgctgcctggcttggctgaattacttaaagatgtactccagtacgtatacgctttgtattggatgaaaggattctcgtcctgaggttttcttcacttcattagagcttgatgacatgagttgtccctaggatgactgatctaactcttcgcttgaccgactggaccttgcacatatatagtggccgctgaggtcgatatggaggtcacagacgatctggccagaggtccgttcctttatcttttttctttgtcacacttgatgatcgtcaaattcaacactgatatactgctatctatctctgatccctttcgctccacgttcgatccagcccaaaaacgactccgagacctgaaggccaagatctcgtcacagtcgaagaagaactttgtgctcgaacgagacgtccgatatctagattccagaattgctcttcttatccagaatcgcatggcagccgatgaggttggtccgattgatcttttctccttcgtgattcatcacataggttctattcagcaaagccacaaattctgctccattctctccttgtcgttcagttcagccctggacaggcgtctatgctaatttcatgcgctgaccaactctccattttcgtcgtccgggaataactacaatagcaacaacaggtccaagaacatctcgacgacgaagacgataacgatgtgcagcatctggacgataaacgactgacggtacgtatccctctttgaggaatgaacccgtaccccttgtcagcttcgcgtacgccaaccaaacttataaacacatccttcctctcttacatattttcgcgcttgtccatcttctcatcacacggcgattgacatacaggcatacggtaacctgtttttcctactccaagcggaaccgagacatatcgcctcgctctgtcgattgatttccatggcagaaatcgacattctgttacagacagtgatgttcacactttacggaaaccagtatgagagtcgagaggagcacctcttgctgacgatgtttcaggtgaaagagcttccctctccacattatatcttttgaagatattacgactgacgcgatttgatctgttctcatatttccttgaatcctcccatcagtcggttctctccgcccagtttaaaacatcgacagagtttggctccctccttcgagctaatactccagtgtctaggatgatgacgacttacacccgacgaggacccgggcagagttatttgaaaagtgttctgtccgagagaatcaacagtctgattgaacatagagatttgaatgtagagatcaacccactaaaagtaagtcaaatctgtacgtgtccgttccttgagatatagatacttaattacgtctatgttgcaacttgaaggtgtatgagcaaatgatctcacaaatcgaagaggacaacggttcccttcccgaaggtcttccgcgaggagtctctcaggagattgcggctgccaacccagacgttcaagggatcattcgacctagaacggcgatgttgatcgaaatcgccgattcattcttatcgaccatcatcgacagtctggacatggttccttacgggatcagatggatctgcaaacagattcgaagtcttaccagggtccgtatcacattacagtgtcatcaaccattcgttcgggggcgcgtaaggcaaacatcatactgaaatgagattttgttctttgatacttttcgtcgagaaattttgtagagaaaatacccagatgttatggacttctcaatttgttctctcatcggtggattttttttccttcggttcatcaatccagcaatcgtcacgcctcaagcatacatgctcgtcgatggggtaccagcaaagcacccccgtcgtacattgacactcgtttcgtccctctttctcgcatacctcctctttgcaaccttgatactaacatattttctttctgcttcctttccgttctatcgaattttctcccctccttcgcctaaatcacagattgcaaagatgttgcagaatctcgcaaacaaaccatcgtacgcaaaggaggcctacatgatgaccctcaacccgttcgtcgagtcaaataaggcgcggatcaacaagttcctgaacgagctgtgcgatgttggagacttttatgaaaacctggaggtaaggccgtgtcctcatttctttctctcttatcactttctatctttccttacgagacgcgctgactgggatcggaaaataaattaaacatagatggatcaatatctgacgatgtcaaagaaggaccttcgaatcaacataaccctcaatgaactttacgtcactcaagattacctactcaaacatatcgacaccttggttagtctgtcctacatgctcttcttatatttatctagtaatctggcattgagaatatccttttgttgtattgttgcatatcttctccccttctgtttcggactctaggctccgagcgacaatgcgcatctccggttatgtctggccgagctaggacctgctccgccccaagttcctcgaaaagagaaccgagcggtcgacctggcgctcttttctcgatgggaaactcccgttcaggacatagcaacccaattaatgtctgactcgaatgtcactaagaatgacatcctcttccaagaaactaaatcgatctttgttcaacttattcgatcgatccctcatctggcggaccgaagaccgattaatctggcgagtctggcagataaggcagcgacagcaaaggacggacaacttgttaggaaagggatcaaagtaaaggagatgttaagagagctggaagagctgaaggtgctggacagtaaagacaactaccgaatcatgcaggaggaagtgtcggccgaactcgtccatttaggaaatatgaaggaaaaggtggtggcagagtctgcttcgctcgatgctgtttacaagacgatcggcgaccacaacaagtaagatatttttgtcgtacttaggcaagagtcgataccttatctcactcattttggtccactcattcaaagctaccttcgctcgcaactcgaacagtacaaaagttatcttcaaaacgttcgagcgacgagtgcaaaagacaagggaacaacccctgttggtgtcactgccgtaggtggtaaagataagagggcaccgaaaactcaggcgttagggccttatcgattcacgcatgctcaatttgaaaaggaaggcatcattttggatagcaacgttcccgataaccggtgagcgctttcttttcgtccccttgagcatagactgttgactctcttatgctgatcctttctcttttctctctgtgttgtatcagtcgagcaaacatatactttaacatcgcttcgccatcgccaggcacgttcctcattggacttcactacaaaggtcgagacaaggccatcctggagatggatcttgggctggatgatttattggaaaaggttagtcctccattcaatcttgggattccatccgttcgcccaggtgaatcttatcgatttcatctcgttccgcggaaacagcaacgagaaaacaatcatttcctagacctcgaatacgtccagttggacgtaacgaaagttttggccctcttgaacaagatgtttgtcaagcggagataatcagttcttttttttgtcttgaagcatttcactgcttcacttattctctctctcatatcgtcttgactctcggttactcttaacacttactcaactctcgacgagtctattctccttcttcttgtttctgttacccttaatccataatcctgattatttcgtatatcgttcgatgcctggcaagtcacccggtgtgaccgagcgctcggttggtcggttgtaaaaaaatccttcctcgacttctattttgttctcttgtcgatcgttctcggtctctaggtttctcttcttgtgtgactatgattgtgaatgacgttactctttttaatccgggaaatacaatcgggatcccctttcatgagcgcgttgtctttccaaatcagggaattatacataatgtatcaacgagagaaaggggttatatgctttcttggactctattcctaagtttgagggagaacgcatctttgcactaaagtcaaggagtcccaattatcagatcttgtgaataaccagacgatctttacagatcaaaggaacaagaagaggtaggaaagagaaagagaaggagcaagaataggttggacatacgtgaagatgagtgacttcaccgagaggtgtatggacggcaatgacagagttccctagtcgtttcttgcattgcgggcatctactccggggagtcatccattttttgattaccgtaaccagccccatcagtttgattgcccgagttatttgatgacccactccctttttccttgttcagaagaaaggagaaaggagagaagaaaggagaaaggagagaagaaaggcgaaaaggagaatgaaagacacttacaccctggtatccgagatcctgactcgattatcttgtaacttcatcaacctccaatcgatctgctcctccctacatttcataacttctctcaacaccagcttttcgttcctctgagcgtttgagtctctaagtgttctaaggaagaacgaatgaacgtctttcatcgtcagcatcggaggtaaaatctcgatcacttctaaaggttccagtttagtcgaatgtttagcgatcaaggaaagcgctggtggtatcagaggcttatccgttggggcacgaggaataaggtagatccgaaggaggacaaggaacacgggggatgaggggttggataagtatgttcggacgcagtatctgttttgaaggaggagtaaatatccatcaaatggacctcagcaagtgattatgtaggaaagacttcaagcggaggaaaggacgaactcttcggctttcttgtaatcctccaatcggtgaacgtatatctggagtgcattctcgtgattcccaagtcgacccaagaggacagcccgagcttcaaataattctatagaacgaaaaggaaagaacgaacggtcagatatgattcatcgattttcaacacaaccgggtcggaagggaacgcaaaagatctgcttaccgtcatcaggcagaagacgaaggatgtgtccagcacggtatcgttctgacgtcttaaggaactgcaatgctctctcatacgcaacctcaaatccagcttttcaagaggaaacaggaacaaaataaaatgagcatctcaaaggagcgtaaacctatgaaagtctttccaaagatagaagcgcaatgaaaagaaagagaaatctcacccttccccggctccctcgatgctctcttagcttcatccagatacaattctgccagtcgatcatggaagtcattattgttctcttccaagtgttgagtaatgtattccaggtatgtggtttctgctctaggactgatcttttctaagaactgaagaacgtctcgtcgaggaagttgctccacggtgtcgggatcggacttgaagatctactgtccaaaaaaccaaacgttcattgacaactgaagacacatatcctgaaagagagggtctctaatacggaatgtcgtaccttcatggcatgatcgaaatctttgtcaaaaacccactttgaactttcgaatattaagttcatgtacttcggtcctaatgctaagagatatcggacgataggctcaagcttgtcatctaggtctgcttcctcttcgctcagcctgatcaagagtcgtggtaatcagacgggaaaagaagctatgagttcaggtccaagttgtcttgcgcaaccgatttctaaacacaaataaccaactcttgtagtagatgtaaagccttctcgtgatttttcctagttcggtacaaatcgatcaaatcggaatatttctacacgagaaacgattcaacgattattaaacaaattgtgcgtctcagtaacatgccgacaacaagacttaacagagagaggaaaaaattgacaaaccttcttctccttcaactgttcttcgacctcggtaacttcacaaaagtttgagagcctacacaaactacctaccaagctcggcctgacgaccatataactcttgaacaatgccgtgtctaccagttgagcgacccgatagacctgttcaggcgtaagactcgaaactggggttgaaggaatagtgtagagttcatcttttgacacagctgagagtggaggcagatttgtttcgaggggacttagagtcgaaggcgggatggaggatagtgcgccaagaactttctgtcgacggtcagacaagtaatgaaacaaggcttcgtatgtcgccttgcgtttggcttgaatcggcgaggaatcaggaggaaaagaaaacacctcaacacatcagtttgaatgtcgagagggacaacgggaaacgaagccaactagagagaccaaacgaatgtacctgcatcctccttttccttcctcttgtcttctatcgtcattttcggctcgctatacacgcttccagtcaaactctgggtctctgagtttccgcccccagcaccaggagcaaccatggtagttgacttcagacctcctattcccaacgcccccaacattttctttccagccgattcgaccccaccgacagctcccgccaagacagaaccatgttctatctttacgctctctgcttctgaatcgagataggccaccacaggtgtgacggtctttgggccaccgaacagttcaacccattggtcttcaggtgtggctagtcgaccgctgatgatctctggaaacaaggcaatcacttttgctggattgatatccagtcgaagaaatgtctcaatagccatctgcgctggagaaggggtcgatagaggaagcgagctgttctgacggaacgtttctagcgcacaaagcgtttccaaacggattcgacgagaattctaagcattgaaagcgagcagattgagagagactgatgaattaggaccatcttcttgcgtctcaggagcctacggataattttcttattatctgaagaagcgaaacagaccttgttgtgaagcgaacgttcgtccacgccttccagtatcttcaaactctcttcgtatagtccttcgttcaacatgtcatccaacacgtcccccatcttcttcatcgtcaaacaccagatcttgctaccaccttcggctgccaagaccgccctctccaccggggtgctcaccacgaacaacggcggtttcagcggtgccgtctgtgacgaggccgaggacgagggggtcaaatgatgaagggtgtaatgcgcggtagacggagtggatgaagcgagaggtaagctcaacgtctgggttagcgttaatgtcggagaagaacggatctggatcagagtcgtcgtttgttggggttcggatgaggtagtgttcgaagaggccgaggtaaggagtgatgtcgggggtggtggatttagagacaaaagaaaaggtttcgcgtagactgtatcgaatacaacagatcaaaatccaagagtcagcttaattttctctttcacggaaggaggagattatgtctcccttcgcacctaattcatccggggagatggtccaaaggagatccttgtccctactgatctttccttcttgtccaaagaacgcgcctacgtcctctctacagactaaaacctcgccttcttcgattctaacgagttccggtctagctttattgcctcctagacccatatatccacccattccacccatccctcccagactcaaacttcccagcccgctgaccacgctcttgctatcagctcccgtcggctgtgcagactgtccaactcttgactcatctgtcgaactcagcggaaggtctccaagaataacgcctaatgggtcaagcgcgattagacactgatctgatagtgtgtatgccaatattgccctgttcggcgagacaaaagcgatacttctcggtgagtgaggtaaagcgagcgagagcggtacaggcgtggacgatgtgccgtccgtccaggtgaacgccaaaaggcgtttcttcagtccgattagaagcgtggttatcaacttggggattgattcttctggatcggttgagccggctggggtggatgagggtaaggaaacagaggtatggatggcgaacgtctgtgcttgtcgaacttgaggaaggacggatagtagggcgaacgattgagggtcatacaatgagaccactccatctgttgtcatcacattacatcacatcatgagagatgaatcagcgcgtgccccggttcctcctttctgatagtatatgaactcaaaatcgaggagagacgaagcactaaccggagaggacaacaagactgttgatttctcgaataaacccaagtcgatcgattgcccttctactcagccccttctttgtctctaccaacgttgctttcggttcactctcatcttttgaaattttaaaaaaaaacaagtttcactcagctccctatcaggaagggagaagagtgttgaaaggacgagaggcgtcaagaaggactgaccagtctgttgatcaatttcatacacgctcaagctgcccgacccatgagctacgaacaacttttcccctgaattccccaatgtgacatatcgaccaacgagtccaagatcaatcagctttcgtgattgacgtcaagtatctgtgagagagaaagagtcaagggaggatgaaagagaggagtagatggagacgaaccttgggcaaagacagcgtcgatcttgtctttgaacccttcgattataggaacagccgagaacggaggcatctttcttttctttccctcactattcctagaacactcgtttgcgtgtcgtttgcttttttgggcgatacttcgagaagatgatgcctttgttttctctggtagagactcaatagaagaccaatgaccaaggaaagaactcgagagaggaatgtgatggacggagaaagagatcagaaacttcggacaagtgcgatttcccgtccgacggtgtttacttctcgtccgtccatcctcgttcatccgagagtcgaacgtttttatctggtgaacggtgtgacaagtccatcatctaatctttgtctcataccaaggaaggaggctaagctatcgaggtcgtatcttttgacagaacgaagatgaaaatgtcttgttctcgacacacgcatttggtccgctaataaacccctcatgagaaaggtgacatcagcgtcatcaatccgtgattccaatgagatagatcaagaacaaaaacgaaacaaaagagattgaggtctaacaggaatgtttcggattaatctaagaatattcattctctagtcggggctaaagaacatgtgagattcagactcgagcgagccagtcaggtaaaaaaaaaaggaatgctcagacgacaagttggtcggacgatcaggacgaacgagcacgaagagtgatatatatatatgaagatgctcgaagtagaaggaagagacttcgtcaaacaaggaatatggaccaagagaaaaattgaaagaagtgagatagacgacaagcggtgaatgagacgacacagatcggtaaataaagagagagagaaaagtcagcaaagacggataaaacagcaaggggtagttttgacaagaatggtttgtctggtatacaaagcagattggaaagaggagataaagaagagagagagagacacaacaagcgagatcgagtagtggtttgtagacgagagagagaaggagaaaaaaactacatgcgggaagaacagataaaaagaagaggatgtggtaggtaggcaggcatggtgagccctcttccgaaaagaaaaagaacggacgatgttcatctggatgcaaaacgccatacggggaaacataatcagatcaaggcatacaatcatgaacagatgcaaacacaaagcagaagaacagcatcacttacgaacaagaaaagtaagggaagagaagaacaaaagaacggagtcgatcaagcccgtcctgcagatagcgcgagcggaatttgctccccattcggcgtgctcacatcctcggcctgatcgttctcgcctagtagctgatcccgccactccaagaatgtcgttaacgcttcagcctgttccggtctccagtctgtcaaattgcaattcagatccggacgaatagggtcagatggccatagcagggtggttgtatgcgtatagtatatgtgaagaaaaagtagactgacatgttcttgagatagcctcctcaaccgttacccattctcgttctctcgtatcttccggccaagattccaagagacctgacacctgaagcgggaagaaatgaatcctcgttctggccgttgcgatctcacgctacattttgttcaaagaaagccagcaaagacgatgagcttgagcttagagttgaacatgagagatgacttgaaagagtcactcactatacactcttccgtcatgatgtatcctctcacaccaccctatgaggtgaataaaaattcgaatccccagtcagaccggtcctacgcttaagacaatggaggagcaacgctaaaaagaagtaaagaaccactaacctcttcccaagcttctctcaacgctgccgccggcaaggcctctccttcttctcttccacccttaggcaaagtccacaatcctgcctttttctgatgatccaagaacatggcccatacgaaggagcgagcgagggacagaacaaagggtggataaggagggaaaaaaaagaagggtgggcgttaaggcaaggctcggggcgagcaaaggaaacatagcagagccagaatgaggcaacgaagagaaaggttgggaggtcgtacccgtgaagagatcaagagaatgttcttcgtcttcaaatcatactttgagaaagacagaggagaccagaagagatcgggcagtcagcgaatcaacagaagaagggattctagaaagaaggagagaaaaaaaaagacataaaagacctacagggatcgcacagcacaccatccgcttgttttcctcggtgcctctgactttagctatcccgtggtaagcggctggtgtccacgacccgtcatccgaagctgacgagtaggcagaagagtaggcggacatgatgaacttttaggagaagaaagaagaggacgagtgggataggacgacaaggaaacggaggggtgagaacgtgacgtggttggccgaagtgagcgggcgagcgaaacgggactaatcggttagggatgagaagccggagaggagctgacgtccaaagatggagccaagagagcgatagggaggagaaaagaaggagtgatcgaacgactttgtagatgagaagaaagagagataggaacggagccttcttttaaggttccgggctcgaaaggatgaggaaaagagagatccagacgagcgaaagaggcgatatagagcaaggtgtcgggttttggaaaagctagagaggtcttgaagggaaagtgaaggtaatcgttctgttctggtctgttctttcttctgttttctttcttcttcttctttttcgggtttgattaaaaattcgagacaagcggtcggacgagcatgttggatgtgagtctttgttgttgaggcgaatgggagataacggagaacaggtgtcgtgtgagggcgagaaggagagaacacagagatgggcgagagggaagaaaagagaagggagagaacgtgatggacgcacgtttgttaatttttcattacaaatcttttctagtcttctctagtgtttgttggtgagttctcctatcttctttcgtcattacgcctttttcggccggaactacaatcctttctaatgcatttttgtaatcaagccgccgttcttaaacaaacacaccaaaaaaagtcacaacgatgccgaaatggcaggattacgtaaacacataagttatctgcgcctgatgagtaagtatttgtatataaggacgaatgaatagaataatcccgtacaggggcagagcgataaggtggaacagaataaagaaaaagagagaggagaggagaggaaaggagagatcattgaggaggaagtgcagatgcaaaagggggccgatggacaggatggatgagcgtgttgaacaattagaactacaatagagaagaacaaatgggcaagagaaagagagaggaaccgaaatgaacgtctagagtacagccaactctgtcaatgaccgacgaagaatgatactgtcgtagttttcgcacagataatgcacttagtatcaggtgtgttcaatacgaagagagcgaaagaaccgaagaggacaaactcagtgacggcgaccatgacggctcggagcatgtttgtgtcgaccgcgcaagtgaaactagcacgccaattgaggaaatcttacgtcagtgaacacaacctctctcttctcctctgtcagcaagaaagaaaaagtccactcactggcaatagacgtccttggtggatgaccgatttaatctggaaaactttttctgaaaaaactctcttccctgtatgtaatcattcggtggtccttggtaatcaggaaagtagtccctgatcaagctaggccccctgactttttctcgaaacagatcgtccttattcagaaacagaatgatcgacgtttgaagaaaccattgagagttgcagatagagtcaaacagcatcaacgcttcttgcatttgattctagtaggtgaattagcgcaaattagcattcgttcattccaggccgggcatcaaagcaagaagcaaaactctctcaccgaatccctatcttcaaccagacactggtcatatccagagacagcgactaagaacaagatggcggtcacgttctcgaagcaactatcacgaggagaagaagaaggagacaatgaagatgcaattgagcttcaatacaactttaaagaaaagacgtgatttggctgacgcactgaatccatttctttctctcggaccgttgaccaccgacatcaaacattgagtaattctaaccacgcattcaagttgaaaatataaaatgatcgactgtcagtccaatgagtttctactaaaagaaaaacaaataaaagaaagagaaaaaggcaccaacaagttctccaattttgaacgtcgtttctgcaatccccgtagtctttgctcgactacgaacgacatcttgttcattaggtttgtaatccggaagaaatagcctatcgagttctcgaaagtagtagaccaagctttgggatccaagagattcacgcgcatgcgatcagtcgttgagtcagatcgacgagaactgaaagcgcgaccaagagaacctacttctcaggcaaagatgcctcgttccctcgctcgtaacatctctgaacttctgaatcgttccacaagctgacgagcggctctttgtattccagagggaatgcttgacctgtttctaaatctggagcagaatcgatgatcgccacattgcgctgtaaaggacggaggcgagaatgggaatcaagattgttcagtcatttcgctctttaatcttctctccctgtctcctcctttgcctggtacggagacttacccgattcacatccaacactctcatctcccaaaggtccattgcgtcaataatttgacgcattccatgaacgatattcgaaaagatcaactgtctataatctacaagatacaagcaactcatcagtcctctctccgaaaccaggttaggctttgtgaaagtggaaaaaagggacgaacgttcggtctcgctagacgtgaaagggacgttatgaatcaacctcatttgctaccgtagacgaccatgaaacgcgggcgtcgaaaatctatcagtctctcttctctttctgtttcattatccttccgtgcgtgggtaaaaacaatcaaggaaacctatgaccaaccttcagaactgtactctttccactctcacccgctcccaggagcagtaatttgacttgggtctgcagctttcgctcgtcctatgaacatgaagattgatcaaacatcggtcaggtcaaatctctcatcctatttctcctgttcatgagttcgaaggaacaagagggtaaggaaaagggcgaacctccttgagcgctcgttcgacttctcgactccgttgagcctccggagaatccgccgtactcgaaacgcaacttcccatctttcactctacacgtatttaagcttatagagtgtctctcttctctcttcttcgcttcagttgcgtgatagagatcggacacgatcgaagaaacaagacgaaacaagggttgtacttgttagcaatctgttcttcgaataagaaacaaggacgtgctggatgcttgatgttacgcgctagatgcgagagaggaaatacagggagagccaaagtcgacccccggagaaggcttggtctccgtgtcttgcacttctcgacgtgtaaactttcagcccttccgacgagaacaaagtcttcccgcctcttttaacgcgtctgattccgggatagaacggttcgatgtgaaagcctgatgtgcattctcttccccaaacaccaatggacaacaatctctgagccgatcggcggccggacatcgatcacataagggaccgtcgacttgactttactcggctgtacgatcacccgtcatgtctggaatgtaaagaccatccaaccgatcgctcaagttctgcgatggcctgaggaaacgaccatcagtcgtaccagaaccgacagggacgaagtgtctttcgtttgaacgattcgaagctggcgcgtcacagaaccatatccgttctatccgaatcacgggaggaacactcacgatttatatcaggcagttgcgaagggtgtccactcgatcagaaagatatgaaagcgaggccagatatgattacgtctatccgactcgatcgttggttgatggatgtcgagagagaagaaaaacggtctaccgttgatagttttcttgtcaaactggcaagatattttatcaaatgtgtattaaatctgaccgagatgccgacggaagagatatgaaaagaacaagagagatgttcgtgtaagttatcttcaaaacgagtcgagttcctttcatctattctagtttgggctgatttatcctgtacacacttacaccacctcatctcaatagacatacatcttacagacatttgagtctctaccggatgagtcaaacactgctgttctctctccgtcgatgccgatatctctcgaattcccttttgtctaattccgctcccatccgagataacaaaaggatgggaagcaacaacagacgacgatcagtataaatgaagatccgcagtctccatttgtctttgccgaagttaatttcctttccttcttccactgtgtactcattcgattgcagacacaggaaaatgtattccgaacagcagcataggttgcatctctatcaggcatccctcgctatggttactgacatcaacattgtcataagaaccagaatcgtcatcgttcattcgttccaagcaatcaaggccatgctgtggagatgaaagtgcgcgtgattttcaaaccaacaataagcttcatcagcggatgatcatttattcgaagagacagaacaaaacctaccatgagattccgaaagccattgcagccgcttccttcaataactgtcgcccgcttgagcttgcctccaaaagctccgggacgaccgagacactcgcaatgtatactgtcagatagaacacagtcgttagccagtggccgggcatgattatcagcttgataagagaaacaaagacatacagaatgaaccggcaacacatggaataactaggtcagcccctgtcaccgtggtctgcaagatcccagaagcctctacaggtaagcgcggattatgtcagccacacaagaacagtcgcaggaagtttacaatatcagttttctaaacaagggatctttgggcatataaggccaatgtttgaaaaattcaatacgcactgtgcaaaaccgaagcgaccaggtcaggtgaagaaacaacttcctccgctcccgcggccgccatcttttgaataaagattccaagcaaggtgcctacgaatgcaccaatggcggtgatgaattgactgagcatagctttcttcttggagaatctgtttttatttatttatatgtttgaatggaaacattatgttcgagaacgtcaacaaagttttcttcgcccttcttacatttcgtctccagcaagacagacgaatttatcaagcttacccgctcttgacgagaatagagaaatcagcaatctcatgtgggatctcgtgggcaaagcatgccaatgtagtggtcgcgccgattgtaggagacgcgaagaatgcagcgctcattgccaacccatcggtgatgctgatcgacaagagaacattcgattggtcaaacacatcatgtgatcgatgaatcgctaaagagagaagagtccttacttgtgagtgaaatcagcaaacaagttcaagtaagcacccagctgcagactagctccgacctccttagtggtagtaggttgaacctccgccttctcttccacagcggtagatgatcctcgctttttaagcgtcgaagcagtatctttatcagtcccggcgagagccgaggaagacccggttgagtgggagtgattatgggaatgagaatgaccagaggagtctgaatcaccgtttcgggaggaaaggtatcgcatcgtctgtattgcagaaaagaagatgtaggctttaggttcacccaaactcatcagacaacgaagatggtggacaagcttactttatcgagcaagaagaagagagcgaacccggagaagattgcagtcccgaccacgatgtttcgcctcggctcaacaaggacgacgctcactccagcctcaggcgagggctcacccatgaaggagtgtgggctggcggagaagatagtacacatccgtggtgagtttcgagtaggcgcactaattttatcagtggccggaagacgtacatcaagttcaagaaaacgtctccaaggagtcctccggtagcgaactaaggtagagaacagtcagcccacatgaattatccagagactaaaacaatatgaacctaccgagatcatggtgttcaaagaagacaactcgatatcggcagggatgaatcccaggatcaaattggggaaagacgagatgtagaatgtagctaggagagagttgtaagcgggactgtcgaatgggaataacaaagcaaacagccgcttcatcaacgggctctctccatcagcagactcaaaagtatccttgatgctgctcagccgctgaaccgtcgagcaggcttcaatgtctttgatctgccatgaccgaaggtttatcccaggagatgaaccagcaagagaacgtttcagccaacacactcgagatggcctggcagagtgaggaaaaaaaaaagcaaacctactctgataggagcatgagagtcggatgtcttgaaaagtgccaaggctggcagagcgagcgcgagaacgagaatgccgataaagatgagtctagtacccggcatgttgagcaagatggatggtaaagatggagagatgagattggcagggctgagagttgaaaaaggaaaaacactggtaaattctaataaatcaaaagactacaaaacatctagagttgcgtattagagagtacagccaagatttctaatcaatccggatgcgcccttttccctcgttcatccatcctcgtcctctccctactcacgtcagtcgtgtcctctggtctctcaccctctgataaagacctattcaggattggttcacgcgatggaagtttcaaaacctacttcgtccactttgtccgatggctctgctcagactttagcccgagacgatgagaggcgcaagctgggtgaactcgttattgttgtcctcagagctgtacgtccatctagagcccatctctggttcactgtaccttgtggctgatgtctttcgtttctctctctctttcattgtttgatagcgacatcttacaaacgtcaaactttccaagcaagatccgtattgtacgttgacagtatcatctgagaaacggcggacctcagtcatcaagaaaggtggtcagcatccagcatgggatgagcagctcaagttcgagatctttgaggacactgaagatattctcgtccagtcaaagtcggataccgagtctggaacagaaggtgccaaagtccctcccggaaaacgcaagagaaaagtatttgagaagggaagcaagatcgtcaaactatgttgttatgcagatgctcctagggagccagaattgattggtgaggccgagtttgatcttgccaaggtgttaaactcgggggaagacgaaggtacgtcgtcacagccatcagaagtgtgtattatccctcaaactaatgcggacatcaacttgcaaacctccgtcttgaagaatggataactatcaatcggaaagaccgatatgctggagagatcttcctcgagtttacgtattttatttcagtaaggcctgccactctgttgtatctcttctaaatcaatctgttaccttgcctgactgtcgtgttttctttaacgaaactttaaacagggaacccctcctccacccaaaccacctaagcttccaaatactggctacggaagtcttaaccggccagatgcgcacggtcagccagcctaccttcgacatgcaagctctgccactaacctccacgggatgtcgaacgggacgccgctcggacctgatgaagatagccgcagaagagcaggcagcttcatggtgagtcttgctaatacagtcctctggatgtcttatcttcttgtctcattgcaacagcttgttgatcatttcgtttctctgttgatatgacggctacgtttcagtccaacacctctgccatgccgccagcccaggctccgctcaatccacaatttcagcattcggcatccatgcattccttctctcaactccctcctcgtgcaaattccctagacatgatcgccaggcctgcttcaatgatgtctctagcatcagtcgcctcggctacttccaccatcggatccagacctttgccgagcacgatggacgcacatcaatctagagtcgatcgtctacctcccggatttgtacctgacacatctacctggaatcaacctcctcaacagcagacacctcattatggtcaacccatacctgtttctcagtccttgggatatctttccactcttcagccacaaacgttgcttacgccaggacttccctcgcatgccaactcaattccttatcaccataattcttcccttcctccgtcatcttcgactacaatgctaccttcatcttcttacacgcaattccctcaacctcaggagtacgctccctacgctccaccaactcctctgcctaccgctcctcctcaagattacggcgcgccttcctatgcatcatatcagtccagccaactcagccaaccgcccccattgcctcatctctcctattcagatcctcaacgataccttgcccatcctccaccaccgccaccctcgcttccagtgtctcaaacaccgatacctcaagctacactgacaaattcgtatcactcctcgtcggacatgtcgacggtatcggggacagacgggttgagctttgcctctagcttggtgccccatagaagatcggatgggccagacacaggtcggccgctacctgagcctacttatcagaggcgactctccataggtagctatcagagcccaccaacttcgagcccgatgatgggaggacacgggtattcatctgtggcaccgccttctatggggacggggcaatatggatatgcaccatcacagattgggtatcaggaccctctttctcagcaatatcagcacaactctcaccatagtacctccacgcc

SEQ ID NO: 1697 - DNA, 37249 bp, Xanthophyllomyces dendrorhous
  misc_feature (21223)..(21232): n is a, c, g, or t
gccaccaccgccgccgcctcccccgccgaaccgaccaacgagttcgacgtcccaatggcctagtcagcagccgattttccttcaacaagggaatgtgtacgagacaccagttggcaattcatcaccagctccttcatcatcttactatcagtctccgtatccaccatccgcgccgacccccgctcccgcttctgctcctatacatttgcctccacctccaccacctccacccccgagttcatcaacagatatttataggcacgcttctcctatatctcctagttacaacgtatcaagtcagtatcagcatccttcgacgggaagttacacttcttctcaaccgtcgggatatcttaaccagcctacgccatcgcaagaaatctattcccactcaacttcgccaaacctgaaccagacctacaacggagcgcctcctccgcctccgcctccgccacgacaaacgccatcacctgcaaatctgcagacgacgtggttatatggcgccggacaagtacagcagccgacaagttatgcggcttcttcgacaggagcgtctgctccgggaggttactctggtagttggcagtcacagcagccacctcattggacttgagcaaatgtctttggaccagcctctatgtgctttatagatttcttttttcccactacgtttcaaatactttttctttctcctcgaccctacactccaattttttgtgaatgtaactcatataaaataaacatctgcaccatctactgcttgaatcaagttgtgcttctattgcacttaagcttctataacagatgaatattgagattgtactacaatcctgaattggaccgccgttcattttactagatgtaaccacatacgggtaaccactcaccgtgaccgttcttcttgccgctgagcgcgactaggcctcacgttttctcgtcattcatccctctctctcctccactctaccatctacgtccttaagcccaagatggattcaatagatgtaccgatagaggatccaaaatccagaacgattgaagtcaatatgggagggtacgactttatttcgtttcatttttgggcctccatcgcacgactgtggggaagtcaatcgggctaactgtttcctttcgccttcttttatgttatccctctggtcatctactttcctttgggtattcgtgaacaggggcgagctcgtcgagtttgaactctcccagctagcagaaggagaagatggagtggagccgatcttggatatctttgaatcagcaaacgcaaaagttgagctctggttgatctgtatcctcgagttcatccgaatcggaaacgaagttcaggcagagaggatggccgaattgggcttgaagagtcagtcgtatttcgtatatatctctgcacatcgaacgattagaaagcagcaagatgtctgctcgtgtacaacagcagaggattgacttgattcttattgccatatctttgctcacacccgcctcgatttcatctcttccagctaagagagccagtaatgaattggctgctcaagttcctcttctgcttgtgctggccaatatgaagcttgccaaggcgaagaaagctcccaaacttatccttcctaacgctggtgagtaatggtcacatttatttggtccatatacattccagtcgcgtcgctaggaagagtataccttcgctgacgcgtcggtcaaatcactactacagacggcgacatcttgcctccttcgacattaaccaaaggagctctgtatgagcaagcttcggagaagatcaacgaagctcagcgaattcaaatgcaactaggcgagaactttgacatggtcggattcttgagtgtcggttagtctgggttttcttgccttctcccttactcggtgaactgggcccaaaagtacatactgacctgtcgcacggtcgtcatattcaaggtatcatgcaacttgccagaggcgaggcagacggagcgttgaaacactttgactctatctcgcagagggaacccaacaacgtatttgctcttctcggaaaggtagcgttgcctttttttgtttttcatgcataatcgagagttctttgcctgcataaagctgatatgtgtagtgttacatgcttcatctacaattcatctataggcacgagttgcttatacccaacgtgatcctcaacaagccttggtcctgttccagaaggtcttatcgctcaacccagattgtaagccggatcccagaatcggtatcggactttgctattgggtgttgaactcgagggagaaagccaaagctgcttggactcgaagcttagagctcgtacgttcaaacttttccgcggttgtcttgtacaagaatacgtgttaaccaaatcacttcttaatacatgcatctgcaggatcccaacagctgggctgctgagttactccttgggttagagagactcaacgtggtgaagaacgtacacacgcgtcgggaagatcgagatcagcctttgatagaaggacttcggtcggtggctgctgctttcagagcaagcgatcaaactagtgcagctgctgccatcgcctcaagtacgatgcattctctggaaagtggagcatactcaagggtaaatctttctcgacatacatacatgtatatatcagacaaacgttattcctaactctacttttcttgatgtgtgtttgtgttgttccttgacaggctgtcaagctcgcggagagagcgatgcagtttgctgacactcgagctcactacattggaggattgaccactctggctaggattcatcatatgcagggcaatattcctgaagctcaaggaatgtttgaacaggccgcatcggaatccagaaattcaagtctactagcagatatcggggcaggtcagatgcagatcgccagtggtatgttgacttttgctttttgagaaacaccaaatccatcgtttacatagagtcacttctgatctgtcctgtcttgatatctataggcgatctgcttcaagccaaacatactttcggtggaatcatcaaacggtggcctcatgagcctgaagttcaggctatctacgcttcccttcttgcccatccgcacgccggtcttagtgctgaggaagaaaaggctgagcgcgctcaagcgcgagttgcatttgatcggattcaacatactatcgataatacgtcagccgattcaattagagatatcagcgacgatccagacctgtttgtggagatggccaaaacgtggcacggcaattcaatcgaaaaggcagcaaaggcttatcgatcggcggctgaagttcggcttaaaaacgaacaacctaaatcgcctcagttgttgaacaacttggcgtcgcttgcttatcttgatggagatctccaaacagctgagacgatctatcaggaggccttgaccagctcggtcggaatggaaggaagcgacgtgaacgacatgaagaccactatactttataacttaggaagggcatatgagggacaaggcaagttggacgaggccaaagaggcttacagacaaattttggcgattcatccagagtatcctgatggtttgtttatcgtttcttatgatgattctttttgttctgcaagctaatattgtcgtctttactttaattttcgattggcttggatactctcagccaaggtacgactagcagctatgtgcattgcggtctctcagttcgatgaagccaatacctaccttaaggaagccctcacggctcatcctaccaaccttgagctccgtgcattttatctgtactttctcgttcagaccacgtcaaccggctcttcttcagctgcttctaaagccgctcttgactttgcctacactacgctcaaagaacaccggtccgatgtgtactccctctgtgctgctggttggcttgtttatcgaacggccagagagacgaaaccttcgcctcgagatgcgcagaacgagcaggcgatgaagacgttccgtcgagaacagtctaagaacttccttcgatcagcagaattctttgacaaggcgctgtcggtcgacccagagtgttcgtttgctgcacagagtttggctattgctatcgctgagaatgcgctcgcaccagcagggtcatcgaacgaggacggtcgaaccagggtggcaaatgctcggcaggccttgtctgttttccacagagtcagggagactcttactgatggaagcgtttacatcaatatgggacattgctattttgcaaatgatgagtttgaacgagccatcgagagtgtgcgtatttccctttgcttgccagaatcttaagatgcgttatcgtatcctaacgtttgtgaaattacttctgcattcagtatgagactggccttcagagattctataacggagttcactcgccgattcttctatatttagctcgaacatggtacgcaaaagctaaccgagaaggaaacttctcggctatgcagatcgcgttgcggtaccttcaaaaagtgggtaatatttcttgcatcattcatatagctcatcttgggatcatggtggcttggcgattaatcttatgctcttcttgtttttaggctgtacacattcaaccgcacgacaaagctattctgttcaacgtggctatgattgaacaaaaggcagcagaaatgctcattgcgcttccaaccgatcaacgtacacttgccgagcttcaggatggtctcaaacaagccgtacacgcccaaaagtaagcatccatagtgtatcttgttcttcttttcttctctcgactgacttagtttttgttgtcttcgcttcgttctatgaaaactaggatcttccttgccctcgcctctgataagtcaaagaatttaccttacaacccagagatggcggatcaacgatacagatacggatccagtatcatcagacgtggaccggccgaggttgagaaacagacggcttacgagcaggacgctcaggcgaccgtcgccgctgctatgcaacgtcgcgaggaagagaagcaaaagttggaagctaaagaggtccgtttagtcttttcatacatttcagaatatctaacgaggttgttgacattgttttcgtcattgtgctatttcttgaaccttcatatttcacagaaagaacgggctgaagaaattcgtcgacaggccgaagcactcgctgaagaacgacgattggctcgtgaacaggtcgcctcgtgggtcttcgttcaacccgattatgaaccagaacgggagaaaaaagttgccaagaagcgaaagaagaaggccttcctcaatggttctgatgacgaaggcggtcagggtatgtctagtggtgaagaaagggaagaacaccaaccaagggtcaagaagagtaaaaaatcaaagaaacagaagaagtttgttgacccggatgagatgccagatgatgcagaggcccattctaatgacgaagacgatgaggagagcagaccgaaaaaggtaagttttcgacttctcttttcttatccttgaaacgtctgaggataccctgctgaagttttgacatcttatccaacttcttgaatcgttttagtcaaaaccaagaaagaaagttgtggctgcagcgatgtcagacgacgaggatgcgttgaagttgaaaaacaaaaaaggaaaacgagtgtaagtcattgtcgatgttgagaaatcacacacgtgtcaacttctcaatctgatcatttgcttcgtctttcttccactcgtattgtgtagcatctcaaaggagacaatatcagactcagatgaggattaggacaagtcgagattaacgaagataaccgagcagccgaaggatccgttgtaccaccttttgttattcatgatctcttatatcacactgtccactcattgagaaagaaggacgtgatagagaagagtggacatgcggaagaggaagaacgtcttatgtttttggtggaacataagtagagagaagacaagtattggaaataacagatcgatcagaactagaaacacggggtaagcaaaacgacgcaaggatgcgaaggaacactaaaactagcaaattgtgtatatcggtaagaggattcaagattttagagaagaaggaaggtgattgactacaagacccacccgagattcaactcaggcctatcgtgtcgttttctcctcttggaagatggcatgctttcaaccctgatttgccaacccagccatcgtttgcaggaattctctgggagacaagatttccgtacttccatacgtaattttctttcctccaccagcagctccaccctgtccgctggcactcgcacttgcactcgctctctcagcccactctgtcaagttggtgtattcgacgtatcctccacctcctacgacgaacacgaccgcttcggagaacacgtgcctgttctttcccccacctccaccggcaccgcctccggcggaacgaccaagacctgcagaaggtcgagccgatcgaggatcaaacagaaggtaatcatcggtgtcttggagggcttgagtggatgcggtagcaggctccatcaacgcttccaccagcctggtcacagtcaaattcttctgagccggcaagaagttcttgacaccagagataatggattcaaagccacccgcgagaggaaggccgttttctttcagtcgatctgatattcgactacctagaacaccgaatcctcggaagagttcacctccactactcgttacaggggcagcaggagcagtggcgagcatggtcatcctcgtgatctctcgaacccgctttacgtactcgagcgcactcatatccgctccactcgtcttgagtgccaaagcaagctcagccatgtcgtccttggaaatcgcgttgtccggcatggataagaaatagatgatcactagtcgaagcttgtcctcatccgtgcacgacatctcgtctcggtctctcaaaatatccaaaatacccgtcttggtctggacgcaaagtaaagaggtccgtaatacatcatgagtatgccgagcaagatgagagataatgcgagaaggaaagggatgataggaagctaacctgtttggtgatagcctcctcggtctggaatagtgtgtcgagtcctctagacttgatggcctgcaaaagtgcggtggcaatgttcatatgggtatcaagtgtatgctttcgggcagtcaattcaggaagtaacgtgatggccgtcttaagattggccgcgttggaagtgaaatctcttttgaagaccggagcagtgaggggaaaagatttatggcgggaaatcagcttaggagaggaaggtctagatcaaaaagacagaagagaatcatacatttggctgacatcgttgacatcgctcattcctgttgaccgggtaatctctgcggcgtctgtcttgtacctgagaacagtaaagaagcaaccaaataaatatcatggttgagccagccagagatgaacatagtgaatatcttacctattgagctctgcgtcaatgtcttccgctacttgcgggaagggattcgccgcattctttgcccaaaagaaatccttggaatcaaaatcgtaggactttttcagaagcttaccggcctctggtgcctaaacaaccaagggaggaataggatggatgagtaaatcgaatattcaaagagaaagaggagaagcctcacctcaacggacacccgattgagcttcatatccaatacatcatgtacaagcgcctggtaagtccacgagtgagagagcatgggcacaagatcgacattcctatctaggatgacgagcactataacgcgaaagcatcgagaggatgagccatggtgtggagcatgggcaacaagaaagaagtttaatacttacaaggtctttgcaaaccacctagaccatctccactgaaaagaccaccgttggccgcacctgtcctggccgagctgacgagatgatctctcatcaaagcgtccaaccttcgggccaccatctctgctgcgttacctctagggcatctgatgagagggatggaccccattgtggccaacacactaaacaaccctttggcgactcgttcaacttcaccctcaatctcagcttcgccagatttggggtcattcaacagcgcataggttggtctcgggtcggccgctgagttggatgaacctgctggtgcagaggccgcagcacctgggggaagcgtcgacgaaggaggaagtctaggaagaagagaaaacaagtttggggatggaacgataaagtctaggtattgatcatacacctgcgcaatggattctcccgaaccatccttggctacgagaccggctagttcctctagcagcggccttggaagggacgatgtgaagttgagatggatggctgagtagaggttttgggaaaggtcctgagcgacccgacggatattggcgatggtcggagagatgaaatagatcgcaggaacatcgggaagaggtggcctgttggaatttaattgccttttggaaggaaagagagagggaggagaacagagaacagagaacagaagacagaaaagacatgtgttgatcaacatgttagtttgcttatcatcataacacgatcatctttctgttatatcgtgaccgctgtgaaactgacaaagaaggctagggaaacagaacatacatatgaagtgtcacaccctgctccctaagatcctgaactcggagtgtggtagcgagaacatctttggagacttcatctagtacgagtaccttccatacaggagcattcgtcacgatcggttgggccgccgggtttgaggctcggccgttctgaccggctgtggaaggtgcgttgaggttaagcaaattgaggagggcacctgtctgtgatgtgagcagactggatgacgactgggaggccatgatgagctgttctggatgcctcgacgatgtatcgggacggaaacccagacgaaggtgaagatggtggatgagatggaacgagcaaaaaaagaaacaaaatagaaacaatttctttttttttgtttctcttgcgttcttgcgttcgaccgtcgaccatcaccatccaaaactcttttttcaattagatacaaccagtaggtctcgttgtcttcagggttaatgcgtgaataagtgaccatttaatctaaattgtccgctcttgccagtgcccaagatcaagacctctagaacgaaacctcctccggaaggatacgaggaaattgctccgattctcgaagactatgctcggaagatgagagacgcagagaacgagcctcacgagggaaagcgacgggtagaaagcacctggggaatcgtatgtatctcttttcctcaatcgctttgtcttagttcgttcctatcgcgtggcattgtagcacgacaagtcgaacgaagtggatatacaatgctgtcggttgagctcatccagctcacagaacacaaccgatgagctcttgcttacacaatttgcctcttccgatctgacgatgaaatctcttttctttgaatggaaatgaaactctcaaatagatgaggatagctcacacccgatcgaaatatatctacgacctctacgtgagtatcatctttctcctctcttcttggctctttcaacgcgtccgcacagtagcaggccgtaagactgaccgattcacctaccggtaacttgtctcctcacttttctgctcaatctgacagtactcgcgtgaagctatcagcaaagagctttacgattggcttctgaaggagaaatatgcggacgcgaagtgagtaatttatccttgtacaacctgatgaacgttttaccagttggtctaaacgcggccactcttctatttacagcttgatagcaaagtggaagaagcagggatatgagaagttgtgctgtgtccgatgcattcagaccaaggtatgtttgagtcttcatttactctctcagatgaatgactgtaagactaactgttgtctggctttcatttctgggtacggtctaaaacaggacatgaactatcaaggtagtacatgtatttgtcgagtaccggttcgtttccttgtactttctttttgggtttctacctcattctgaacttttcttgatatccctctttatcaacgcgtgaaattctgattgttgttcaatagaaagctagtctgaaaccaggccaggtgatagaatgccctcattgtggttcgtcctctttcctcctctgtaccgtttcttcattgtagatattcaatcttctgtctctgtccaacctggatctttttcctgtgacacaaatgaaacaggatgcagaggatgcagtagtgattcgtgaagaccccatctgttcttcctaatgaaaaccttgaacctcctgaatcataccaacccaactctcggacttgacatcgactcgtctcagacctaccggactttctagactggacattcttcccgtcctcgtttacatcctattctctgtcccttgtctctttcccatcctctctctcttctctgtctcactcaaataaagtaaaagttataaccgtatatcatgtttatgtcgcattgagatatctttaacagccaatcaacttcaaaagaagacgtgtgtacttcttgagggatacaagacctagcagctgatcattacagattctgatggtgaaagaacagaacagaaggagagttagagcaagatagaaaaagtaggagaaccaaaggggaaccaaagagggttagaaacaggagcaaggaaataaaagtgggagacattgttcagagtgttatataatttatttttgatgtgttttcaagaaacatacggaggaacagatatgaacgcgacactatatccaaagagaaacaacaacgcaagacaaaaaaagaagggaagacgaggagaccgcccaggacagtgaagttgggcctgggagtgaacatcatgccaatgaggagcatgattagcaacctattggttgagacgaaccacagaagataaagctcctcgttcagttgggtaacctgctcatatccgccttcccactctccaaccattcaggtttgcagagcttttctctcatctcgtagagtaccttgtatctccctctgattgttccttctgtcgtgtcgaccaccgtgcagacttcttttgttgtcttgggacaaccccacagatgagtcgtaaagtagagcagactaccgacaacggtgagcggtgaacgaccgtcgatcaggccgagggcctttccagcgatgagaacatccatgcaagctccttggaaacctgggtaggtcgaaagaccaagattcgaaatgaatcgaggaagcatttgggaaatcactctggtctctgattcgttcgctgctgcatccagaaccgcctgtgacaacgggtcgcccgtcgctgctgccaacgcggcggacgagatcggaggaggcgcagaagatatagaagatgaattcgatagagaactcgaattgatgccgttgttgttggaagagacattggaaacagacgtggtcgacgtcggggtcgaaggaagcggagtcgatggatcgttgatcgggatcgaaccgtttccagaggctttgacctcgaacgctcgttccaatgctttatagcactggcctaataactttttgggcacctctgtcaacgtacagatctctttgaatgttctaggactgtttcccattcgacaggcgatgaatatgcacgccgccaccaccgcctcttgaggtttccctttcagaacgccctcttcgctcgctcgtttgaagagctgcttggcagtatcggtgatgttcttaccgagagaaatcttttcgcacaaatgaccgatgtcagaaaatgcggaggatatcgtcttttcagacttggaagacgacttgaacgccgctctttgaagttctcgagagagtccagaattgttatccctgaaggaaatggaggtctcgaacgtctctggaccatccaacgggttggatgcggaaccgactcgggaaggatcgtccccttcatcgtttgcgaacgtcttttgtttttttgttgttgttgttattacaaaatcaaggcaaacccagaaatcagcacatgtgaaagtacgtgtatgtgcatgtctgacacaacagggaaaactcactctccattcactcctggtgtcgacaatcttgtcacccagcaccaagccacaacctccacagactaaatcacccgagccaaattcttcgataatctctggtctatccggttcgcattccggacatatcaatctgacggatagatccgggccgatgatctgacgaaagaggaaatcgccacaagaaaccgtcagatgagatgtctgctcgaatgcacacccaaaagacagaataagctaacctgcggaacggcagccttgggtccggcctgcagatgctttgctcgagggaacggttgatagccagacatcaaataagaagaatgaaggagatcgtgtcttttttgtttgcttttgacttgtttccgggtgtcttgtctatacttttggtttctttaagggtcctatcgaaggacggcttcttttcttcttctggcacagtacgagcggaaactttgttttggtttgtataatgaattcacagtcgtgttagtcaatcgtggagggatacttcatttttgtcgccacccggaaatgataaagagaaaagaggtctgcgagcagggaagaaagaaggaaagagctatccagcacacgaagacatcccataactggctagcatcacaaccgtctgtgtcttttcaagcattcgcacacaggtttaccgagagaaaaacaacgaaaaaagaagaaaactctcgacacctcaagaaagactggaaagagaagaagagaaagaacccaccctttctagttcagacggtgtgaatgcccagacagctaaaaaggtgggttgtgtcgattctctcgccggattgatttatccaaccgggatgaaataagaacaggaatggctccaataacactctttgtctctcctggcggtccgggaatgaagcagattcaaacaagagttccaaagtttgtcttctatcgaaaacagacgatggtcggtggtcaagaagaataatcatcgtgatgcttgtatgtgcgggtgatatgtcccggggcacgcgtgtgggttacgcgcttacaaagcttcccctagacaactagtacttatggcgtcacaacgttggacggtcaagaaaacggcgtacagagtaaattaaggccgatgtacgttgctcgatcagagtaatagatgaagaagaagtgatgagagcttggattgggaaagaaaagatgaaatattgaatcaggatggagcaaaagacctgacggatcgctctctcaggtttcgtccatgcgagtgcattcaaaaaatggacgagcctctcgcgatatagatgaagagaacgagagagaaatacccagcgcggaaagagaaagacatacatcaagaagagacgtccgatcagctatgggaatagaatgaccggagaaggatgggatacccgcttgatcttcttcccacctctccgacacaaattgagcctgcctcattttcgccattgccctcactgctcaatcaattgcttaacgacacatggactgctttggctatgagcagaggagtgaacgcagtcgacagtttgtattcattcaagggcgagagagatctatggtgaagtattgcattccggtctgtacaatgaagcgttcatagcaagcaatccttctctcattcgatatacaagagcaacgtaagacccagcttcccactctgggatgatccgaagaaaggagacaaaagcccacagaggccatcaaacgcaagtcaccgccgacagaccctagacaacagctgtttaaagccggatttttttcgaactctcttagatagttcacttcactctcctttcatccctcagatcagttctctatcttgatttcattgtaagtcaacgtcctttgctagcgagaaaagagggaaagaaatttcaagtgaagaatatagctggcaccagaccgacgctcgggtgtttacgcccccgagcatctgaggataccatttttgcagagccttcatacgcgacgtgctcctgatataatttctttccctctatcatttattggttgtcgaacattttttcttaccaaaaagataactgatcattggttgttttcgttcgtgacctttcagttgtgttcatgtgatatgcgaatgtttaatactgtctgatgaataaggagagcgtgttgcaacaagcattttgaaagaagggaacatgagcaaaatactaagatctctaatagtttgaagtatccattaacaagcaaatgaagcgcttcaacccatcggctgagttgtacacagtcttgagcgctcaaaaatcgtcacattgggtttatggttagacaaacggtcaagaaaatgaatcaccgcacactccggccgactaggcgtgttacgtgaagttcttgaatcttcagaatcgcacagaaccatgcaatcgagacacgtaacaaatgacagattatgacttatgaactgttcatctcaaataaaatagcaaaggagaagagtaaagaaaagaaaaggaagaactagctctaaatgaacgtttctacagaaacagggtcccacccgctgaatgcctttctactctctcccacctgttcatctgttcccaacaacccatcgcccatcgcccatttcgctttgacgagcgacaggaagtcccctttggccttgaatctggagagagaatcgtcgactgatactcgaacgactcgaagcttggggccagcggatgactgtttcttttcaatgtaaggtatgagtttgatgagtgatgtacgggagccgctcagtcggaaagtctggccagcaaggtctgagatgggaatggctttgattaagtaatacagaaaagatcaacgtgggaagaacggtcagtatcattccgtgcgtcaaatcaggacgagcaaaagtgagtacaggcagatgtagtagtggaatacgcactggtgagagcatgagtgacgaaagaagcgacatcgcctatggatgtaaaatcaatcaacgggtcatccgagccgacaatctcgacctgcccagtattcactctatcattcaccagaaacaatcgccacatcagtcatttagtattgagcacagaaacggaaagagagatgacaagaaagtcgcaaggcttacttcaggaaaagggaaatccaatcggcgaacaggccactaaaaaacttgacgtaaggcaggccgatattatcgaggtagagctggacttctcttttcttatacattggtgaatcctgggtaagtttggtcgagtccatcccaaactcgctaaaagtgggtaaagaacgagcgcgaatggagagttcatgaaaacgagaagagcgacaaggtcagtcttgtctgtaaccgacgccataaacacgacttgaaacaagatacaacaaaagataacaagagatgatctcttcctcgaacgaaggctcttaaggactcaccttggaacgaagagcttgacgccagcagctttgcctgcatcagccagcacggtttgtaatccgaggcctccccctgcaagagcagagacaacgatatcaacaccttgaagtgcgctctcaactgacaacggatccgagtagtcgacgagagcgatctgagcacctttggttctgagctcggtcactcgtgggaggcttgcctttcgtttcgagaagaacgaatgaatccccaagatatatagtcagcgactcggcaccacgacacttcatgtaagtgggaagatgaagagttcagacgaagaatgtacttactgacgatgctcggacgagaacaatcaccttgactttcgtctcgagaagtcggttgacgatggccgagccaacagatgctttggtcccattgttatcggtcgctccaccaaccgcaccagctacggcgatagtcttgacagggtctgattcaaaaagcatggtgctgaggcgaagggtatatgcttgttttggaatattgatgtttgttgagttagctggttgagtctgaggaaaagatcatgagtagtcgatacacaaaatcagtgttttatatcttttgaagagccgggcacggacatcattcgaacgataaggttaggtccaagaggaaaggccggtgacttgtccttgattctcgtgagccgaaaaggtctgccaaatgagatgatctcatatccccatgagtaagcctgaaagaacgtgcaactcggagatacttagattgaaagagagcaagccggcatgctgatgaccgaggagatgcaaacgatgctttgtcagatgtttgcttattcatcttaatatcagtcctctcatctcctcggtcatcattcctctcgttcactgacagaacagcgatgtcttatgttggaccgtgtcatcaaatgtatcttcctatgaaatatgtgcatgttttcacaagtagtagagatgttagcaggcctgatggtcaagtcgtgatcgacgagggagttgttgagagtgacaaagtgggagtctgagatattatgaggtcagctatctattggaactccatctctagtcagcctttacatcagtttcatcagtcgtatttacactcaacttcacatacactcgcacactacataccaatggtctgctcatctttatccttgctatctggccatcccatatatgcatgtctaaacatctacttactctctggtttgtctttatcagaaccaacacttgtcgtttccgttcaaaacgaccgttccactcgctggtccgctggcaaactccttgcggacgtacatcaccgctaacttcaaagagcacagtccagaagcattcaagcaagatatctctcatttctgtcttgcgagagaggaagccgtcgagaaggggattcaggttcatcgggaatccgtaagcaagctcgtcaggtgagtgttgtgatctattcttttcgaaacgtcactgctgctgaatccggtccgacacgcatgtatatacctaggtaccatgcccatttgaactacctacttggtaaactcccggccgacgtcagtaacgctagttttctttttcccttaaaagacctctgctcgctgaatcttacctaccttctactgggtgaatctagatcggtcaacctttcccctatacgtctgcctttcctccgccgttcaccttccatacacccgcgcctgtagaattgccttcgttagcccatgagcggtttgccgtgctcttcaacctaggagcatgctactccaatttagtcagtcctatagatcatcatacaggctcccacacccgcttcgtgttgacaagattgcttcgatttccccttccatccactatttagggaggccaagaaggtaggctcaatgcggactcgctcaaacgtgccattgcagctttccaggtgagcttactcttctcgcgtaatcctactctttattagaatacccagatcttccagactcacaacatcgttgccgaaaattcactatcagaacgcagcaggcgtattccattaccttttgagcttgataccggataccagcgcatcgcttgactcgtttggctcatccgtctacgacttcaaggaggggttcatccgaacactgctctttctcacgcaggcgatggcacaggagtgcttctggcaacaggctgtgttgggtacgtccgtcgtagtgttcagttttggtgatctctttcaaagaaggaagagccgctctgaaagatagatattgggtcatggttacaacagagaaatacaagaacggaatcgtcgccaagctggctatgaaagtatgtttatagaataaacaaatagagatttcttgccaccaactcctttcaagtgtgctttcttctaacttccggtcttccttaggtatcggatctgtacgaacaggctatcttggcttcaaaagcagattctccggctgcttcttcgtttctaccatctgtaagacaatcgggcagtttaattgatgccatctgctcattttttatgaggtcttgacgtcaaaagaccaaatcgagtagacaggctcaaaatctttcctttttctttgttttcgtgggggtgttttggtgaattccatgtacttagaactggacggcacttatgaacgtcaagcagcttcacttccaggctgtcgcgcattgtaagtcccttttctattttactcccatacgccaaacagaatgctgaccgatgaacaacgaatacttgccacaacaatctggcgaaatgataatagatcggatgggtgttgaggatctagagaagaacagatatggaaacgagattgctcggttagaagtgagactgaacctctcgctctttcatatctattcaaaatctttccgttcagtcgcgtcgttctttctctgacccatctcctgtcccgtacatcttcttcttaatacaggccgctgaagggctagtcaagaagacgctgggacaggccaagagtggagtggtttcagatgctgtcatcggggacatcaaaggattcctacaaatgatccaaacgtctctcgtccgtgccagaaaggataacgatttgatctatctctcacttgttcctcctgctggtgaactcgcttcgatccagggcgcgatgatggtaaaacccgtcctcccggtcgaagtgggagacggtctggattggttgataaactccgacgggggacttggttgggagggtctggtcgactggggggttcatgttgctatcagtaagtttcgtatactcggattaattcagatttatcactgagacatatatccgctgtcttatcccgcttctcaggtatctacgatgataggaaggatagcttcgtaaaagatgaaatcatcgcaaagaagctggaaaccgatcagttggttgctttgtgcgtcttctatgcctatttttgatattctcctctcaattgactcgaacgagacgaatattcactagcttgacattcacaaaacaaattcagaacccttcaatcgttgaatctcccgggctcactccaagccatcgaacgtccgatcggtttgccaccgtctctactgggaatagccgatgatataaaaagagagaagggggcggacagagttagagggatgatggaaaacgtgggcacattgagagctagggcagatggaagcttgaatacggttcgatcacatctttctttgctttcttcttcttctttgaaatatgatctgacaactacattccttataatgtaataaaaacctgctctttccatcatgcctacaacactttaaggcgcttgacatattagaccaagaggcagaagaagacgagagtaccagggccaaatatgcccagaccggcggatggtcaagaccgccgtcgttcgaagtaaacgaatatttgattactcaggctggagtgtacagagggacgttgactcaggcaggagacagtgattcgttcgttctctacctgttttcttgttcttttctgatagggaaaagattatgattaagagttgaattgagttttgtttttatcctgtgatagaatcgtaaggcagaaatgggaggaatgggaagagaagatagagattttgggaggagacgaggtctgtcttttatctagtttcctctgtcgagctctctgatactgacgttgaaagcctgctgtgtcgacaacattaaaggaatacctaactgcttcgattcctcgcctcccatccggtccatccctcacctcgacaccggctgcgcgatcactccacactctgctggagacactatcggacttgactgctactcggactcgaatagcagactctgcccgatcaatggcggcaagggatgacgtcagatcaaaggtcatctccgaggccaactccattcaggcgggctcgaaggcaggtgaggtcaaggcagagtggtttgaaaaattgtttgaaaaggagttgagaaagtatgaaggactggagagagaaatggtggaaaactcagatcaggcgaatagaacgctggaggagcttagagttagtcttccttcctcttgtttttttgttcgatttgaactgactcgttcgctattgatcctatacacaccatcagactcagaatgaagagttcattcactcgaggaaaacatcccctataatcaaagctagggagaaggctcttcaaagttttgatatcgctcatcagaaatacagagaggtcgttcaaaatttggaagagggcatcaaagtttgtctctcgatctttttcatctctccatgattgaaaagatagtcattgattttttcgcttctccatgtttccgctcatctcctcttcccacagttctacagcggctttttggatattttgagcaagtttcaagatgaatgtcaacatttcgtctggggaagacggtccgatgtcatgtcagtcttgacctttcttcttctttcgcttgcaagtgtatgaccgatcaatacgatggctgattctctgctgggtcttgtttgactatgcaatttactattcgtttgatagagctatcaccgctgcgctcgaaaacgctcgattgaatcctcctccgcctcaatttgagccggaaccggaacctgaattaaggcagacctcacacccgagtcctgctgtatcgcgtcctcgaacacagcctgctaccttcagcttacctcatccaaactcatcagactggacgaccgagacttttgctcctcctttccctccccctcctccaccccatgcgccttcttcggctaatcttgttgggacgccggctcgaaggggacctgtagctggattgtctaaagagagtggagcggagggaagtccatcaaggagaagtactagggttagaaatcagcaacaacaacagtagggatctaatggatgtgtgtgtatgtgtgtgtatgtgcgtgtgttagaggcgcattcaatatatctatctgaagtcgtggactgataacatgaagactccttcgaggcgcaaatgtcaggatccgggttcagagggtaacgggaaggttacaagaatgtaaccaggcagggaatagggctggcaagaaggaagttcaggctctctagcttggtgactgtgacgagagcgcaaggcagggaaatcgtatgaataaggttgatacaacaatggaacaagagtactagggaaccannnnnnnnnngtggcaaaggggacccgtcttatatatcatccttagactccaacgattatgcataatagaacaggtcatagaaggtgctagaagcacctgcgctgggaggtcatatacctgcatgttgatataatgagagagcataaggaataccgaagtaggagaaacaacagaaccaaaagaaggttaccgaggtgtaacactcaggtcacatccctgacagcaaagatgattcgtgtcacgtgatgcacgctgtacagcgataactagatattgcttctgaaatctcaaccctaacaaaacaccatgcgagccaactctccatcatcacaaatcactcactacccagatcggtatcatcaagacagagctctcaggacagccggtcagtcagttagagaaggccaggtttcagacaccgagtggacgtggttatagatacaaaaagccatgtccgtgttgatatatacgacgtccattctacttggtctgatcgctctgcaacaagcaacgacctaccttgttcctctctccagtctccttttgttcctccctccgaccgccgtcttgtttgtgctctccataccaccaatcactgtttgggttgcttggattaccgaaagctgggcagacttaggtcaacgaccaacgaatcttgtccgtcgaaaggacaagcatcaccatgaacaacgagtcagacgacggccaggagagggtccttcgaatagagtacggacgatctttcaaccgctttcgtttggaacgccagctgcttggtctgttgtacagcttcgatcgagatgggagaaggtcaagcctgatcctacaactctgggcttcattgaaccatcacttaatgcacatgatcatcatccttcaatgccggccatccttgttcaaccgtttaattcgttgcttgataagatcattaaagagtttgtactcgtttggtacactcgaatatcgccatctcctgctctacctgacaaactcgaaggtgtaattcgacactcggtcggggaggtgatcaaccgatatgagaaggtcgatctaccagctctgctggttggaaagatcatccctcatataacgactcatttatattcgttctccaacgccgaacgcagcctacagggcatgagacgtcagcgttcatccacaattggaacatcctcctcggctacaaactcgtccacaagaaccacaacgaaacctgttggattacctgaaggtgtagatgtctttcttacggagtcatacggacccaatgcgcttcatcctgcgatctttggaaaagcgctggatacaaaacccgctagagaagctcatgtgagatcactcgttcaagggattctaaaattgattttgccagagaaggaagtgcagagtgaaacggtattgattgtagcgagagaggtggtcacttgcgcggtgttgatgcccctgatggatatgttgggcgatccagacttttggaatagattggttgaccagcaggtacgcaaattatatcctgcttcgtcacattaaacagaataaaggttcgatcaagtggattttacttctctatcaaaggccacaaactacatccgtcaacagaggctggttcatcagcttcgacaagccctcgaacttcaatccctttctccacacacgcccaatccagcgctttctcctcgaaagactagttcaccttctaaatcagaacggtctatcaaaaactctcatcttcgatcttcatctccaacttcgacggggtcaaagtatcgaatctcgagtaaaacggaccccaaggatttcgatcggtttgttagaaacatcgggaagatcgagagcctgatggaaatcagaagattgaggagtgatatagatagggagatcagaagaacaaaggtatttctaggtaagtgcattgattattatacaaatgcaatatacaggcaaccattttgttcacaccaacctctgtccaaaaagagaaaattggtgcaggcgcgccagattcttctcaagatatacccaaaggacagagaggacatttagaaagactgttctttgcaagagactttatcgagaagaagattgccatgatatctggtgatccttccgctgtaagacatgtgtttccttgttatggaagttcgtctttgttcttgtacttcgaaactagcgctgaatcagaccgtctatggttatttctagccctcatcctctctcgatctgtctccgtcatacaccctctcgacgaaccaaactattgatcttctatctgtcctgaccaatccatcatcacttccgttcttcatggagtttatggagcgacgatctaaacttcttcttgtgcagttctggctcatggcagagagctttaaaaatccgctagacgattgggaatctgggaatttttcagatgatctagacgatgatgaaagagcttcagaggatagtgatgatgataaagaggaggagagaaatggcccaagacgcagtaagatggatagggaggaaagagaaagggtagaagtcagtagaagtgatttacggatgatatgggaggtgtattttgaggaagatggcgtgcttggagagagctcgagaggaaggtttggagagggaatcagaaggtttgttcggggaaaagggcgaagaggactgaaaagggctagacgttggtatgtagcctgtatcttatcttcttttctaagggctgcatcaaaatatgatcaactgattttcttgaacaacttcaacctaatgacacagtatgttccttgctcaacaagatgtatatgacatgatgcaagaggactattttcctctatttcaaaaatcagacttacactttaaagcggtttcaaatgttccatctagcatcatcgccgttccacccgcatctcgggtgacgttcgctcctcaacctccagctttccctcatcgaaatcgaacgtcttctttggaaatgtatcgttcaacgcctatggcactttctgcttcgacatcatctacatcatccaacctcaatacatcttcagccttccctaaccgaagctcatatactgtctctccactctcttcaagtctgactgacttgagaactccaacacctaaggctgctatcagccctcagctctcactcgatgcgccaaattttagtaaagactcctcgatcaagagagagtcttcccctctacctcaaggaaatcatctttttggaagatcccattcctgggcaccgacacgtcgaccgttgtttgctggatcaacagtctctctaggaagtgattcttctaaaagctctcttggctcggagcaacctacactgagacaccatgcctcgcagtctagtcaacaatttgatttcctggtagcattagatccggaagtgtcttctgcccgaccccctctgttcgacgaagatgccagatcatctcgcccttctatggaccgaccgccagagatttcaagacgaagatcaacttttagtcagcacagtcaagccgaagaagacggatcggatgaagatgactttgtccagattcgaagggtagatgctattcaggctgctctgacgtctatcattgccaaggatcaatttcttaatcctcacccaccttcatcatcgtcctcctctactatacaagtttctccgaaaagccgcatatcacggatgtcagaaagaaatcgagctggatcgccaggatcacctgttgggtcctcaataacgaatacgccgtctcctgaacacatcatggggacaacgtcagcccaagcccctgacgagccactcgataagtcgatccttccgactcggcgtaaaaaaatgttcgaagatgaagatgaggacgattctgcgcttggatctagcgtgttatcagcccaacaaaaccggtctgaagaagaagagcttgatggggagagagcagacgaggaccaaggaagcgttcatcttgctgtagcttcccccggagaccttcatctgcccggagaaattgatcgactagagaccaagattgaaaagctcaacggacaagagacgatattgtatgcgttgattagaaaggcagagctgacggggaacgaacatgagttgaagctgttgacaaagtcattaaacggcttgctgagagagattcgacagttagattttcagatgaagcagtatcagcaacagtgcgccctcctttcgagccccgttctctcttcttctccattcatatgtttatgcttatcttttgttgatatggaacagggagaaagacaaccgagtcgatccacaacgaactaaagtatctataccgagcaacacgacggtggaggaggatggaaaaccggtgacccgatatctaattgaggtccaacaactagtcgaagatggttcattctctcatggttgggtcgtagccaggcgatacaacgagtttcatgcacttcatcatgatatgaaagatcttcccggggcgaagaacctatctttgccaggcaagatgttggtaacgtcgatgtctgccagttttgttgatgcaagacggtcagcactggaaaggtacctacaggtaagtactggttcatttccatatagtcttctatttgctgttgtaatcgattgtatcatctcacactgagcatgatgggtggtgtgtactaccttttctcagaaactcatcaacatcccagaagcatgtgtttccaaggactttcgagcctttctctctcagcaaaccattcatcatgtctcttctcaagacgagccatctctagtaaactcttttcgcccacagaacattgtgaaatccatttacagagcgactcgcttggacgacactctttttgccgggccttcgatgttggatttgatcggacatggtctacaccgtcagacaggcgagtttgcgtcattcgccgcgttcgctggtttaggcacgacggatgagatcgaatcgactgtatcaactgacccgaatccccaatctagaggaacaggagggagtggtatacctgacatgctcaatctgccgcctgaactcaagccgctagatggagagacggcatcttcctgtgagtcgcgctgtcgcaaatccagatttgactctacttgaaaacgacggattgactttcttcttttttcactttcttggccccctattgattaaacaacgaaagatttcacagcgcccatctgtgatttatttgtggagatctttgaattgaaagagaacaactggctaagacgacaagcaattgttatcatccttcaggtgatctactcagaaaatccttcggataggtgtatgtgttttgtcgagatgcagctgacacattacttttcacttcttcttcttctttcttaatcaaatgtgttttgcacttgacagcaagttctcggaggcactattgagaggtaacactcctctcctgtgtctgtcttctacctgttgtgcatcgaagtctgacgtcttgtgtcatgaatatttgcgcacaaaaaggaaacttcgagaggtagtcaagaaacttacaggcgcttcttctatcttgacctatctccaaacattacaagagtccatgtggccaaacgggggatctcggccggtttcggtccctcgaacagaggaggaaaagaatcatacgaaagaagaagctcggaaaaaactttcatccctcctcccgggtttgtccttcttctcagctcttgcgttcatgtctgagaagaaacgagatctgaccgccgtttttttttcttgctctgaacatgaactctacacacctggtcctcagatgtagcatccaacttgataggaagatcaaacgctcgccgaggcgccaaacgaatgttttcactcgttcaagatcaaaggctcaacgagcatctcgtattgacaatcatcgatgaggtttgtttctttggtttcctcgcttgcgcttgaatttgttggcctggttgaacacgttcgctaatgaatgccgtcggatttctcttatacttgtttccaggtggtatatacattatttcccgagttgaagaaacattgaagacctcctccttctcctgtctcttcttctcatttgtattaataaaaaaacacccttttgtttctatatatggtgatccatctcataactcgagggatgtttctctttcttactgataggctttcactaaagactttgtggcgcaagatacaagcttcgggcaatcgaagcaaaccgagagatatgaaaacggcatcggatgaaatacaaagttgattgtcttctcttatcaacccatgaaaccgggaacgacgtagggtatctacaagtaaagaccctctggggtgttttcttgctttcggtccaacactcgatctcgcgctgatccaaagtcctggatattcaaatcaaaacatcatttagaagggcgagagaaatcagtgaaatgaaactgagaaaaacagaagagacaggaggaagaaaaattcctgaaggaccgaagaaaagaggactgacagccttggtaaccctcattcgcctctctcgtagcgccaagagacctgcctctgtgcaaacggccttgatatcggctcctgagagatcatcctttgcaagaatgtattcttccaagtcaacatcctcggcgagcgtcattcttgatgtatgcagcttgaagatatgtcgtttcgtctgtttggaaggaagtattggttcatattcagtataaaggatatttcgaaaaagatgacgaaagtcgagcggagtgacataaaacgaaccttcacgtcgggtaacgggaactcgatctttcggtctattcgacctggtcggatcagtgccgggtcaagagactcgatctgattagtggccatgatgactttcacatctcctctagtgtcgaaaccatcaagctggttcaaaagctccaacatggttcgttgaatttctcgctctccaccagaagtcgagtcgtatctgccaataacgaatgagagtacacactcaacatttgatgatatttcagcatcatggtaaagatatgggaactactcaccgtttcgtaccgacagcatcaatctcatcgatgaaaatgatactcggcgcattctcctcagccaccctgaaaagctctctgaccaacttgggaccatctccgaggtacttctggatgagctcggaaccaacgattcgaaggaacgtcgctgatgtctgatttgccactgcttttgccagcagagtttttccagttccaggcactccatagagaatgactcccttcggaggtttgatacccatttcttcatataattcagggtgagtcaaggggagctcgacggattcctaaatgtacaaaatccggcagagaccagaaaagaccacacaaacaagtggtcaactacgagactctctcaatcgaaaaaataaaaggagtcagacgaaccttgatttcctgaatctgagtttccaatcctccaatatccgcataactttcttgaggcgccttgtccaacttcatgactgaaaccatcgggtccacatcatctcctaacactcctacgatcgcatggttcttgttgtgaagtaggactgagcatcccggctcgagcaagtccttgtcgacgaatgagagaatagagacgtaatactcggggccggtagcggaggaaatgatggcatggtcgtcgtcaatgatctcttcgagagttccgatagacataggggagcctcgaagatcatcgacagcagttcgttcttccgttgtcttggattcagttgcctgaggttgaaggagagactggttggtgacatattctgaaaagagaaagagtcgggaaacagaggagttaaatcgagtagaatatttgatagagatacaacagaaggaagaacaggaaacaagatacataccttcctcaaggagcaggtagtccttgattcgttcttgctttagcaatttcaaccgacatcttgttgttgggtacacggctggcagcttcactctggcatcaggtcctctctttttcttcttgcccactctggtggggagagggggctcccatttcttctgttcttttttctgtatgcccgagaagggtatcagttgatgtttgagggagaggtaggtgagtacatgtcaagatagagcgatcatagagagatacgcaaagacagaccttgtcagcgtcattcttgtctttgccctgttggccatcaggggccatacctccaagcgagtttccctgtgtgatttacaagcaaacgcacatctgattagttcaacggcaccgagcggtgagcgaagcatacagaacagattccactaaccatgatgagacgatatcgatgtgtgttgggtggatgaggtcgatgagttgaagggcgagcagagatgaaagatggggaaggtgtcgtcttccacgatggcagctgtgattaggtaagcgccagccaaatgtatatatgaataaatacctgaatacctcataaggcacttaatccaacagatcattacgtaaccgatcgggtcgatcgttccctcccaatgattcgtcactgttccgattgggtcgatttttttccagatactgccaactttttacctgctgccttcactgtccttccaccatcactcactcgctcgtctactcgtacttgccttcgatcatcttgcccatggctctcattagacactcacagacactagccagggtcgccagatcggctcctagcttggctaggtctctcgcgactccttctgcaaattcaaaaccgttcgttcttgcattcgttttccttgtctttttcctctatcttctcatcttctcacctccgattgtatcggcctgcgcgcttacttgtgaattactctgcactttcattcgtgttgtccatcctagaccaacgggttagtgtcttgttatgtcatacggtctactcccacagaacaaacaggctagcggatatctgtcacacacaggctgacccacttgttcacctgctcacaacaaaaacaacagcgatcgttctcatgaacatgggtggtccttcgacggtcagttctttgatcgtctctggccttcgctgtctttttgcctggattacagccatctaaaccacaaatcttttttttccttgccttgatcagatccctgaagttggacccttcttgagtcgtctgtttcacgatcacgatctcatccctcttcccttccaaaagtacatggctccctggattgccaagcgtcgaacacctcaaattgagaagcagtacgaggctatcggtggaggctcgcccattcgccgatggacagctgtccaaggagagatgatggtcgcccttcttgacgaactctcaccatccactgcgccccacaaggcctacaccgctttccgatacgccgaccccctcaccgaagaatgtctggctgaactcaagagagacggtgtgaagagagcagtggcgttcactcaatatccccagtacagttgttccactaccggaagtagcttgaatgagctttggagaggcttgaaggaggcaggtaagaaggaggccggtggagaggttgggatcgagtggagtgtgattgataggtggccaacacagccgaagcttgtcgaggtacgttgggcgttcagtgatcaatttgtcgtcaagaataacttcttaccaagaacatgcgcttatcaacctcccttctcgcaggctatcgcagagagcataaccaagactctcgagtcttacgagcccgctgtcagagacaacgttgtcattctcttctctgcccactcccttcctctatctgtagtgaagtacgtaccggctgatttaccactacattcgagtcctctttttgcaaaaaaacattctgaactttttgcgtcgctgtgtctctctcttcttctagccgaggagatccttacattactgaagtagcagctacagtactggccgtcatggaacatttgggcaacaagaacccgttcgtctctccttttttgtttcaaatctcttctgattttatgttttctgaagttctctattcgtttctccttccctgtatgtcttatctttgaccatcagataccgactttcctggcagtctaaagtcggtccttccgcatggcaaggtcctcaaaccatcgatgcgcttaagggacttcaccgaaatggccagaacgacgtggtcatggtacctgtggcattcactagtgatcacatcgagaccttgttcgagcttgatcaagagtacggacaagagatgaaggaggttcgtcccgttcttttctttgtctctcgttatctatggagcattttaccataccatactcgtctcgttaatcgctaacgtttgtcactttcgacctcattcagctcgggatgaacatcactcgatcaccatccctcaacgactcgcccacctttgcccgggcgctagcagatctagcttctcagcatcttgccgacgtctcttccggcaggcacggcccgatcagtcctcagttggcgttgagatgcccgggctgcacgaacgacagatgcaaaggaagcaaggagttctttgcaaagaggggtttggaaaccgttcaggcttgagcggccgaggtgaaggattggaatcagagtacacctcttttctccccttgtgcgttcgtttgttcatacattcgagcaagggccatctatttaacaacagaagataaccaaagatcaacaacaacaataacaacaacaataacaacaatattaacaacgataataacaaaacgaatcaacccataatcaacaactcgcgaacgagaaaaaaaacaacccacacccaacgatccgtatgtttggagtttatgcaatgtatcttagctattcatcactggaagtctgtcctcgatggagacaagaaaaagtccaacgaccaggcggaaagattaaagagctatagaaagaagcgtgtgacgaaaggttcgatgaggagcaaatgaattgatgactcgataaattgatgaattgggaaagatggacatattgatcagaccacctttacctagagacagaccataatatccttatcttcatctttatcttgttccattctgttttctctttcgttcttcgtgagagctgtaacaatcaagaacccgaacttgatcgtgtgtcaagaaaaagaagactaagccgaacttgaagataaagatacaacatagatatcccaagtacggtgtgtgaaagaaaaagaaatcttaggaaactccttggctaaaagcctaaagaaaataactacagacaaggcaaagaacaaaggtcgacaggctaagcagaggctgtagcggaagtaggagtgggggcaacagcggcaacgacgggcttctctgcagttgtggccgtgctcgatccagctgccgtctttgccttctttctctttttcaaaagagctgcacataacgaggcgtgcgagaaaaaaaaaagaaaggaaagaccactccaattaatcagccaaccttgaccgagaagagagaagcaaactgagaacggaagatgagaaaaaacgaaccagcagaaacagcactccggacgttttcgttgatctccctgctttgctccagatactctgtatcatcaaaccgatgtttcttccccgcgatctgcgctagatcctccgacgtcaactttgtcctcgtcacttgtgctcgctccacttctggtcccgcgccggacccagatggaccggccacaggcgatccgtcctcgttcgagtcctcatcctcatccccgtcctcggctagagaccgtccggtggcgagcgcgtcggcagatgaagagatcccaagttggcgttcgagtgcatcgagttttgctcgagcagcatcagtctttgtctttttgtagtttgcttgtacgtccaacagttcggccatcctatgtgcgttgcaaaagtgattgaaggaaaggtgatcaggtcaacacacatatcatatggatagaacagccacttgaccctccaaggccaaaacacaaagtcggaaggaaaccagacgtacttcttggcctccttgatggtactcaatcgtcttccactcagatctctacagctgtcgttgttactggccttcttactactcatctttcctcctgtcgctctgagcatcgctccaaaccctccctttccacctcggagtcttgccctgacctccacttcaacccattcttgagagtttcctacagagctgtcggcttccaaaggacaaaaggaaaggagggaggaaaccgtgtccgagtcaagaggtcgcctggttccagattggaagtagacatcggaaagcgatccaggaagaagactggaaagtttggtcgagggtgcgacccggtggaccgtagttggaccctcaagggatctgactaggacgttgacgatcccgaactcgggattgagattatcttgcatcgtgtgtgatatactttgaaagcgaggatgggcaggacgtgactggcttcttggttggtggcaaagagagaatgtcctgaacgaggaagattagggaaatacagtctattttgcaaactgtgactgtgaccactgtgatattgttacgcgccggaggctcactaaaagagaacggtggacacaggagaacgactacatgtcattcttatagggcccgacaaacttcaagaatgaaggatccaacaagaaaactctttgtaaacaaagaaagtcgagagactggtcaaaggtccaagaagaagggaggaggatggagtggtggtggttttggggaaggatcgacggatcgacggataaaaggaaggatgactacggagggagcgatagaggagaaggaagggggcatagtgtttaacaatggaggaacagagaagacatagtagtcggatcagactagaaccaagggaagagggatcgaagggcgaaaacatagggatctgaacaagggagcaaagcaagaacaaaaagacggaaaacaagagtagaccagagagattgtagcaaagcccaagaagatgaaaaagtagaggggtttatatagttatatagcataagctacccagatcaaacagcaaggaatgtagacagagaagtcagcaagaggagcagatgttgactacaaacaacaaacatgacaatgaagcaaagagaaaagaaatgctcacaagagaaagaaaaataaacaagagacaaaagcaaaaaaaagccgaagacgatacaaactagggtacttccacgatgtctttgaggatacaaaaagaggcattcaacatgcaaagaagagaacaaagtgaaagaaggaaaataaaagattgcgtatgtcgtttgactctcctaaatcccttgttgcaagattgggtcaagtgatggaggcgatgcaaatgacagctaagggcgagcgaaaggatgggacgttcgtgagcttttgaagtgtttgaaccaatgcaagactgcaagaatgcgaagaaagaaataacttacctttgacaaggaactaaaggaaaacaaagttaagaacaggcaaggacagagacagtctgaaagatgtaatggcccgaaaatgtaccgaagaagaaagagacaaaaacgatgaaggtgatagaaaaaagaagtcgagaatgataagaaagaaaatagagagaggagaaaagcgagtcgatggacaagcatgacaagagtatgaaacggtggtaggcaacttttgaaaacctggtccacctgcatgagagaagaagaaaaagagaaagagaatgatgagaaaaaaacctacatatatgtaatagacgacaacggagttgtaaacattaggaaaaagaaacatgagaaaaattcgtcaagattgatgagaaaaaagataggtagagaataaagtcagaatggaacaaagcagctcaatagagagcaagagaaggacgcaacaaacgaacaaagaaaagaagagaagagagatcaaattttgagaccaaaccggggcttaggaagatcgcctgccaaaggcgaattctggaagacgctcccggcgtataatgggcccttggcagaattgtctgcgccagactcgatcgatccgccagcgagaccaagcgtagaaaggctgatcgacttcgcgtgcccagatgaggccctctgattgttctgagttaggtggtgagcacgaggaaacgtgttgccctttgctggcctagtagcggtggacgatgttggacccgcgaactgggcagggggagcggaagaagacagagaggactcgaaagaggaccgacgctgtagattggctgtagggtttttcttcttagataccacgaccggggccgaagactcaaacaatgcttgctgccaggtcaggttggtcgcggaagggggtgtagagatagaaacggcgggagagggagagatcgatcgagtttgcagccgattgacctgagctcggggtgaaggcatttttggagtcggctttgttggagcagagggaggcgaagtctgctgccactatgaagcaaggcgaaaatgacaaacaggcgcgacatatcgaaaatgtacgacatgagcggtgaatcagatgagtgaacgatataaagatagacaacaacaacaactaacggtcaacacgtcggttcctcgcttctctagaggcatctcccactcttcactctcatcttcctcagactcttccttcatcggtctgactcgggctcgtccagcggagattcgggaagctgatcgttgattggaagaggcctttggtctacgcttgtgaacgggttcggtgacgccagggatggaagcgtgtggaacatcgacagtggggccgggcggattaccatccggtttggttcgcttgtgacgggaacgtcgtggggacttgctagggacatctttgtctgaagcaactttgatggaaggatcgacagcagaattatcggtaccggtagttcgttgggcaaaattctagataaatgaacgtgggattgatgataagaatggatgagctggatagtcaaagggaagtgaagagaaaagagaaaacagcctggctgccgacatgaatatacacaaacctggtgtttatgcgagtgattcttctttggtgcaggtcgacttgcgaacttatcctccaaaggcttgctgagggtgagaagaccaggaatctggcttgctgccactactgttgtggctgttgtgcccttgacgggagtagacttgtgtgactgccgggcaggctttgacgggtgggtggtagtggcggcggcagtagtatttgtagaggtggtattgcccgatgaagggacgacagcctgaacggatgggtttattgtgttcctgaggacgggcctaggagaggctgatgctgtgcgaaacgagctgttaagggtgtgggagtgttggtgtgtgttgggctttgagttgaaagcgcctcgatgggatccatgattggacgggactacagacataggtgctatttgtgtattaggtgtggagtgtttggtgtaagaggattaacggaaatgatcgaagtgagaggcgagcgaaagactggatgagaacaaatcagacgggaggagcagaagaagaaggagagagagagagaaggaagaagaagggaagaagggaagaaagaaaaagggaagatggatgggatggatgggattttgggatgtggtggatgttgggatgtaaagagacaaagagggagactcggggaaaagaggaagaggcccgtgaggagaggaggcgccacaaacacgctgtggttacgggggtttcaccgtgtgggatctgcatccggtgctaaaattggcgggctgacggcgcgctgacggttacgctgcacagcagtaggagagttgagctcggtaagtaggcggatcatcacgtgtgtctgatgtaatcaggcacacccacccacaccgtaaatctctaaatcgtcatccgccctgatttctcgttcctggttttcatctcgtccggatatttctcgtacacccacacacacccacacacacccacacacacccacacacacccacacacacccacacacacccacacacacccacac

SEQ ID NO: 1698 - DNA, 24995 bp, Xanthophyllomyces dendrorhous
cacccacacacacccacacacacccacacacaccacatctattcacagctcatgccctcagagtctcgttcccatcggtcgtctcacaagcatggcaacaggtcgccagagagtgaaagaagacaccaggatagaaagagacggcgaaagcaagaggacaaaggtgggctcaacgtcgttgacgacgaggatggtgctggtgtttggatcgaaaagactctggatgaggtgagtttattctctctgtctcttccctctttctccaaggatgcaaatcctcaatgaacctgctcttcttctttttgatccaatcaaacgatacctctttactttcaccatcccaggacgtcacaccttcgattcctacttcggcctcactctcgctgaactcccatgcctcacaatcaacatctgccatccttccaccctcagtcacctcgatcactgcttcttccacctctactcgggactcgtggatgcttgataactctacccatccagcttcagagaaagattttgccgaggggctcgaaggacagtccgccggagggggttcagactttttcaccgctctcggcaccgttcagagttcaagaaaggaaaaggaagccgtcgccaaacaggtcatcagagaggaacccaggtttcatagaagagagatcaacactcgattgattgagagtgaagccggtcaagatgtcactccaagtctcaatcgtgagtcgcccttttctctcgactcctgataactcttagaagaccattcaaatccattctttcggctgctttttctaccaagcctcccgcccagctccaggaggccctgggtcgcaatggcgaatgaccaaacttcgaaagacgtacgaactcgcagaatcaagtcagcgtccgatcgaacaagtcgccatcgagcgatatggctcgatggccgactttgatgaggctgtcaacgagcgacgagtcctagatgaacgagcaggcaggagagaatcccgaggtgcgaccagttcggccacaaacaagggatcttcctcgggattcggcaaagggtcttcttcaggggcgagcactccctctgccggaggtagattcatgtttactaccgatgcgaatctgtctaccggcaacggaggtagcagcagtcgaccaggttctcgagcaggtttccgtcgacctggggaagaccttggaggaggacctgcctcggatgggacacgcacgcctggaggagccggtgaacccttcttgccatcaaacaactcagccagtggacctgccgggcgaatcgagaaccttcgaaggcagtcttcgtcatcttccttccagtattcttctgcgccctcaactcccattccgtctgttctgccccctccctcatcaaccaccaaacctataagcttgtcggtatcgtcccaacctccactctcgccctcttcgctcaataagctccaggctcgtgtactcaaagctagattgatggacgcgtccgacgcggaagagctagaaaagagctacaacgcagctgtcgagcgagccagagaagcctccgcccggccgacatccggtcaacaagccaatacagacaacaacaaagctggccatgctcatcatcactcgaaagaccagacgacagtgcagatggttcctactctcgatggcatgggtcggctgtatgatatcggaaaggggaagaaagcagaagaacggttgcctcccggaaatagacggaaaaaaccagaaaaggtagagggttcttttttcctatactttacggttgacttggtcgccttacttacatatctcgtgttctcctctctttctttctttttccttctttgcatacctctggtacataggtcgagaccagggatccaaagaccggagagatgctcagattgaacgcagacgacgacacgaccaccctaggtgacctcgttagacaagaacggtttggcggtggttcggccgaccagaagaacctcgacgcagagctcgctaggtcaatcgcaactgatggaaagtttgatgtcagtcctccacttctcccttcttcgtgttatcctttgtctgcactgacgtgtgtaatggttcctctccttggcttgtcgggtcttccttgcttccacagagcaatttggactatatggacgagaacgccgacaaattggccaggaaaaaaatgaagacagatgcttccaaacgactctatgctatcaacggtccgttctcatctcttcagagctttcgctgtctcatttgctcagattcattttatctctctttatctcgttcagactatgcccggacaaagaaggcgctcgacaactgccagttttgtccacagaatgaaggcgatcccccaaaggccgccgtgattgccatgggttctcgagtctatcttgcctgtactcagacagaagaactggtggatgggcattgtcttattgttcccatgcaacacaccctcaccactcttgagggagatgatgacgtctgggaagagatccgtaacttcatgaagtgcctgatcaagatgtttgcacagagcgatcgaggagtcttattctatgagaccgttctatcgttcaagtatcaaaagcatacatatatcgaagcgtccgtcctgttcttactttcctttctcttcttccacacttacgggcatgtgttaatcttcgagaaaccttcgtattgtatcttgcgcaaaacgcagtgttccggtaccctgggaccaatgggaggatgctccagcttatttcaaagtgcgtaccactatcttaattatattacgcgatgaccgactaatcaaacaactcgacgttgacacctgaacatccatcttccatctttctgatactttcggtccttaggaatcaatcctcgcgtccgagacagaatggtcccaacataagaaactcatcaactttgcagaccggccgggcgggttccgccggtcgctcgtacctaacctaccgtactttatggtccaatgggattataaaggcgagaaaggttacggacatgtgatcgaaggtgtttccgactccagtgccaaggctggagacggtgaagatatgggcgcggtcgacgaaggcgacaaaggtggaggcgagtttcccaggtttgtcactctctcactatttgttttcggtctgtttgtctgtctctgaggatatagggcgaagccctggatttggaaacaatgctgaaaaagagacggttccccttggggctcaatgttttctcattccccacagatactttgcagcagaaatcatcggaggaatgctcgagttggaacctcggaaatggaggaaaccgagaagggtggatagcagacaagataaagctcggatcgataagtttttgaaggccggttatgcgaaacatgattggaccggcatgcttggtcgacaaggttgaagaacatattgagcggggagggaacgagaagaaaagtaaggatgacaggggatgaaagattgtggatgtgatcactcccctttggagtcttgcccatggtgtatttgtatcttgctttgccttgccttgctctgctctaccatgtttcaaacaaagaggaaaagaaaggtatatatatgggtttggaccttgcacattaaaaatcagagggagagaatgtgtgtatgtgtgtgtgtgtgtgtaaaagaagaaaaacaggaaaatcatgacaatcgaggatgaatctctcctttgtcttccgaaggaatgtttcgttcctcatctgaatcatagccttttccttcaaggtcttcgtaaaagtctggtgtcataccctgtcagagagaaaaggtgaacaaaagaacgatcagcttgccgagcaaagcactgaggaggaagacgagagaagcgtacagcaagacctcgatcgagctcattaaatggcccttttagtttcccatgaaagttggcttttcgtaatggaagcaatcaaacggccgaggtcattagttcgtgtaactgacaagacgactcaaaaccaagagaggacgaagacgagagtaaagggaaaaggaaagcacttacttcgcacttccttccggaatgcctggacaggatcgacgttttgaaggtcacacacccaagtgaaccactagatatttcatccggtttgtccaattcgttcaatttcagtaggttagtactcatctctgatgggtgaaaaatatatgattgtcaaccatcggagaagagatagagatgacgtactttgtggcctgatagagggtttataagggataaaggaaacaaaagagtgtatcagaggggaaaaggaacttgatatagtggtttcggcaatcgacttgcctgcggtgacgtctgttgagaaggaaaagcgagcaaggattgagtacaactcataggtaagagtccttgtctcttatgtttaagaatatatcaacaggcagaagatagagagacggacgggtgacttcgtctgaatgaattatttccaacgtctgtacggcttctagatcacctgcttttcggaatttctcgatagttctttttgatcgttggaatagaatacccgttttccaattggtgaagttgatttgttcagcttgattatgagagagcaggatggttgtgggcgatgacttacatcgggttgacatccaggcctctcgctttttacaccatgagtaagaccagaagtaatttttcaagcttcacagttagcagatagcgcttgggattgtaatctgacaaaaccagatatcggacaaagcacagaacctgaaatagacagaaagacagacggtgtaccttcgtggaccatatgaatgatcgccaatcgagccctcaaagaatgagaggtctcctgagctgactgccagagcccggcatggacaggatattgaccgtattggatccctcgtttgttcaataatgagacgagtagtgagaaatgtttggcttcgtcttctgctacctggtttcatatttagatttaaaaaaaacattaggtcagtttgttgttttgtcagaaagttatatggaggtgtattttaacaaaacaagaaaactttgtccccacctttgcccaatctggtacaccgttgtgaagacaaaaagaatggtcaaaattcattctgaacaacaagagactaaacgatggagaacccatttcgaacccacctaggtagaattcaatcggaagctagacgatttatcccagcgttaatgcagacaactaaattttgcatagatcctcaacagacaatcgagctcactcaccgattgaccgttgatttcagtaacagcaaaccgagcaatcacgtcccaggcgagatcgatagcccactgttcaatattggccaaagcatctgtgcagcgcgggacaagaaaagaaggaaagaaagaaagaaagaccaccaccaccaccacatgcgcacatatcaaggtcaacaccgacaagcttgttctgaaagtaacagcaaatacaaattgatcagtacatacgcagcatgagtcctctagatttttctgagcctcctttgcctcgttttcccatccgtccaggtgcgaccgttcctccgataccttcttctctaggcggaacatcatttcctacaacttcagcagaccatttagcttcttctctgccaacaagtctggactgatcattctttgggtctcgaatgaaagcaagcgcttccctcgttctagtcactttgagcgctgggttggatgtctgaaggatctggagagcatacgtcagtattgaagttggcagtggatgggcagggctgagtgactcttctggtgttgtatgcgctgtggacggaggagagagcgagagagactctatggagggcagctcgacagccgtctgtggttgaagagcaggagaccccatttcgacaaacgctgtgtatgtgttcacagtttgaagaataaaaaagcattctagcgtaagtgtctatgcacggtcggatagagtttgtacatatcaatattcaacagagcacaattccacgcttaccttccgacaccggttcgacctttgcgagctcccaatctgattcctgaggtcctccgggagactctacatacagtgtatctttctcaagctttgtttggtagacacagagcctcattcctgtttctgagctgccgtcttttagattaaagtcctacataagagaatgtcaagagggcgtgagcgccaaggggagatttttcgagaaagagaagaaaaaagtaaaatgagacatacatattgatgccatggacaggtgatcacggtatcttccacatcggcctctcccaaatcggcccctaaatgaggacaggttgcctccatcgagtaaaactcgggaacagcatcacgaagagacgacagtcggaagagaagcaacttgtgggacttgtaggatgggtgggctggtcgataccgctggaacaagagggtatatctagtatgtgtcaaaaatgtcgacagccgacctacgggaatgaacgtcgtcattagaaagtgatgccgaatatacaaatatgatagtacaggcaacgagacaagtagggaacaaatggaaggtgaaaaggagaggaagctcttaagaataatcgaagcgagaatcttaaaccgctcggatgtagccgggttagggttagtttgatctcaaactatgcctctccttgattatgacattggcaatgactatgttgctcctggtggttcattcaagaagaggtgatgaatatacttggctggttttgaatgatcaagaggcgattaggggtgggtgatttcgtttttccctttcccttgtatccctggcgcaagaccagactctcttcaatccttcagaaccaagatacaaccgttgacaatctcttcattctgtcatctcggctctcatttgtgagaaatagtcacactagatcagtgaacaccgtttactggcgatctgtgccttcctggacggaagaataaatagttggaagaatcataagcgaagagaatggtgatatcgacgcagatatgcgcagcgcagaactgataaaagagatagattcttttacttctatgatcagaggaccttcggaaacgtatcctagctacttaaaatcaggagaagggacatatggggcatcggaaaagcactctagagagcgtaagatgctttactagaggccgcctttgcggtaacgatacagaaggtctattcactcatctggtatagttctgaatttgatgccttgcttttcgacgaatactgcatcatgatagacatcccggcttgccgtttgaactgatgatagaaatctccaaataaataaaatctcatccttcattcggatctgcatacagctctcagagtcctctggcgttgttaattgacttatcacaagctttcccacggggccgacccagacgacccaaaatcggatcagatcaatgacaagacagccatggccggggtgaacgttgagagttacggatcgttgtcaaagatgtgggtgaagtatcttgtgacccaaagggtatgttgtaagcttgaacacgaaaatgtctcaatccgctacttctttgtttctcgctccagcgtatcatcatgtctccagcgcatctttgcgctccagcatatctttgagtcttcagtatatatcgtaccagacttctagggtttgagaaccacacatatgactggctttcccgaccacttgtagataaaaaaacacaagcttggattcttcgttacttctacttctatccttccttgtttgcttggtccaagtgattaaagctatcctgcctctcagtcccaagaacctgaactcctctccctgaaacctgagagccttgtgtggttactattcttgtgatccttctgttaccagcccagctcccgtcctttacagttaccaccgcaagctgttctccctgatccctggcatgttatgtatcatataccacgtgacctttcggttgccccgtagccatcaacgtgggtgactgtgctgccttacgtttgttcgttctttgaacgggctatcgtcctagttcattctaccaacacccattgtccataaagaactttacaacatccaaaagatctttttctaatctattccatccggtttctcatctgttacaaatttgagctcaagtagagcgcactagaaatgtctccacctagtccagcacgtgaactacccctgcaccgacggtcttcctctgcaagtgcagctttaccaaaagttcaaccttcgctacacctcgaaccatcctctacctgggatgagatttttccacctccgactgccgacagacaaggctgggcccactatagacgaccgctgagttttggtgtggttggtttattcttatttagcgtgagcgtgatcgcgcttcttggcgtcggaggccctaattccagatcagacgacagacgtatgggttccggaggaggtactatcatccacggtggaaacggcgcggatgtttcgaaccctggtcagtttgtttgccacatctttgctctcctttgtttcctgttcgctccttgttattctttcattcgttggaatgtttgaaaaactcaaggggcaaggcgacgacgttagaggaagccatcgtgactgatgattggacgttccttactgcggccaaacgtgttgccctgtcttttttaaactcttaccttgtatcgccgttgtcgctctcttgactagcagactattctcaatatgtttctcttcaaacgatcccgtcatcggcactgccgttggacaagccaggtcataggctgatcatcatcggtgatatccacgggtcaatcaagccgctcaagaaacttctaaaaaaggtcgattatgagcatgatgaggatacatttttgcatgtcggagacctggttggtaaggggccaaagccgctggaggttttagagctgcttcgaaagtacaaagttagagggtaagttcgtcggcacttaactcttctggttcgtccagattgtagcgcgttttggttgacattatctttacgatctcgtcgttaaacagggtaagagggaaccatgaccaaccggttattgagatccgaagctggatggaacacacatttaaaaacagaaagacgggtaaagttgactttagctcaatcacgcttgcaaaggcaaagaagctcgggttcccagaggcttgggctaagtgggagaacgagcacttcgagaccgccaagtatgtgtcgtcctttctgaccttggctgtgaagttgaggaaacaaggctgatccacagtgttgtttggggtaaaagaacaatgtcgaaagaagattatgcgtatctgttatctctaccgttgaagcttcaccgtatgtgtttcgtgcttgtgttccctcatgattaattctccccggcttatcgtccatctctctgtacagtgccttcggttcatactttcatcgctcacgctgggctgctccctgtctcgaccgcttcgacacctgctgactctaactcgaaaccaaagtggaaatcgccttcgctacctcggttgcaagcagagctgtcgcttctgtcagacgtcgagccaaacacggatccgtgggtgttgttaaatatgcggtcgatcctcgccaacggcactctcacaaagtcttccaagatgggcgagccctggtcggatttgtggaacgacgagatgaaagactgtcgggatggacgttgttggccgtcgaacgtggtttatggccatgcggcctccagaggactagacgtgaagacgtactcgtttgggctagactctggatgcgtgtacggaaagcagctcaccgcgcttgtgttgggatccgatctggactcaaagtcaagtccaaaagcggtcaggaagggaacagacgtcatggttggcgagttcaaaggaaagctagttcaggtggagtgcaaagatctggattgagtcggcatcggataaaacaagtcagatcactcctcacatctctctgggtcacctctctccgccaccccctttcttctctattcaatatcaacatgtttatatataatgtgcatacatcgatcctattcctctacaatttaccaaccgtgttgtcataactggcggtttccttctctcgatcctaaaacaatccatgggaaattttgatcatagtaaactcatagaacgtgtacaatgtaatccgtcgagacagaatgagccgcgatcttctcgacgaacacatgtcttaggaagaagtattccgatggcatatcgaagacaaaagattgagggcgatgataatgaaagagaaaatgaaaataaaaatgctatctatcgagtgtatatatatctgatctggggccaaaaaagatgaagaacttctgataagggattcttgaatcgttatttattggtttcgtgatcatttcttccgcgtgtctgttccgctggccttcctccttcctatttctcctctgtacaaaaaaaaagcagaagaaacctctacaagtttgcttatgctcttggctctgaagaatttgtatgtgtagaggaggtccaagagaaacagaagaaaggcgatgtgtaaagaccaaggatcatatgtgtggatgataagacaatttcaattagataaatgacacgggctcttacgcttcgttctgattccagtttattctccggcttttcaactgaggctcgccggtcttttacatcatcggtattcatccagatatctcgtctgtatctatccatctatctagtatccagcctgaatcaacatgtcgatgcagggtggaatagtagatatattgtataagatccgtatggcaaggtggaaaatctccacgaagaaagagactaaaggcgtatactacgccggaaagggaaagctttagaatcttggcggaaggccgcgcacgctgatggcgacactgacgttgatattgctaccgctgcggctgcaacagaaggagtgcgaatcttcaatctctcatcattttatcgagccttatctttcctttagcgtttgacatcttggatactccatcaaactttgtcatggatagccaccagtggagacctacttaagcgagtcgtcccagaatggtttcgtacgtagcctttttcttccttttctttccttccacttgtctttcataactctccttcccttacctctttccctcaccgaccaaatcaaacctcgatagccagatgtcggaagagtttgacgagaaacctgtcaaactgggcaagccgatcaccgcctcacatgatgtccggctcgcttcggactctcaccatggcgagatctatgatcccagcaaggaatccatttggacccgactcggtctctctgccgagtcctacaagcgtgctcccggtttgaccgcgttagttgtttcgttcttcgttctattctgttttttctttcttttttcttgtctctctcttagatctacagcgctaacaaagtccacccgattgtacttcatagtggccgagccacccatggaacggctgacatcgatatggagaaagaagggaaccagaacatccttcaagccaagatgaagccaagacatttgcaaatgattggttcgtcttaggtttctctttcctggtgttactttttccgcccttccttatcctgcaccgaaactttccgctcatctgagttgaaacttatgacctcgatgcttatcgcggcatgttcgttttgttttcgatatttcccgtcttatccattcaaacaattcaccgccacttcgtcatcaccatgaaattccttcaattaatccatccgatcaatcagctgtcggagggtctatcggaactggtttgttcgtcggtaccggaagtgcccttagcgtaggtggtcccgccggagtcttgatcgcctggatcctgatcggagctatgtacgtgttcactcgtcggccttcttatcatgacgcaggtatcctgaccgatcgcgattccctcttgatacgtccaggttgatctcggtcactcaggcacttggagagatgtccatcgtctatcctgtgtccggaggattctacacattgacagagcgaatgcttgattcttctttcgcctttgctatgggatggaagtgagtgttatcttatacttatatcttcgcctgttgtatttcatccatattttccgtcccctttttatgcttctttactcatcacaacccttttgtctcctgcgatccagctacttcttccaatggtgggctgtgcttcctttggagatcactgttgctgtcaccaccgtgcagtactggtcaggtgattcaattcctgtggccgcgttgattacaatctttataggtgtcattattatcgcctcgatattcggaactcttggattcgctgaggaagaattctggagctcatgcctcaagctcgcaacggttgtcatgtttatcgtcctcggtatcgtcttgaactgtggtgggggacctagcagcggagcttactcctcttatgtcggaggtcgatactggcaaaaccctggagcatttgccaatggcttcaaaggtgtctgctcagtctttgtcaccgctgcgttctcctttgccggaactgagcttgtcggattggctgcatccgagacccctgaccctaggagtagtgtgcccacagcaatcaaagctaccttctggcgaatcaccatcatctacatcacctcgttaaccatcatcggtctcttggttccctgggataatgaaaacttgtacggtggctctggatcgaacgcctcgccctttgtcatcgtcatggatctcgcctcgatctctggtctcaaccacttcattaacgccgtcatctgcgtttccgttctttcaatcggtctgagttgcgtctacgctggttcccgaacgctgaccgccttggcagagaccggctatgctcctaagatgtttacctatattgataaggccggccgacctttgtattcgaccctcgccgtgttgattgctgcccctatcgcttacgttaacgttggtgcaaccggggatactgtattcgtctggttactcgccttatccggtctatccaccttgttcacatggctcgctatctgcctttgccatattcgattccgacgagcatggaaggtccagggccactcggttgaggagttacccttcacagctgccaccggcgtctggggaagttggtttggtgtcgtcctcattgttctcgttctgatcgcccagttttacatcgctctctggcctgtcggcggaatggctgatgatcctggaaccgtcgcagaggatttcttcagcgtttacttggccgctcctatcatgattctctgtatgtcttctgtttctcttctaggccgactgcaaacgaaatactgatcaagaatgaattatttttatcaagtctatgcgattggtttcatctggaaacgaaagcttccttaccgtgcgcgggatatcgatctcgataccggccgaaagtcctggttgacggtagaggagatgagagcctaccgagccgagcgagctaaggctcctttcatgaccagaatgtacaggcagcttttcgccagctcgtaaaaaaaaggaggctacttgccaagtcttccccatgtcgtttacaaaactctatgtgaattctcctaattatgtacatctcgatgcatcctcacttttttacgttacccatcttcatcgtcttctttccgttccctgttatgacacatatcagtttcactagtagaaggcctgttctatcatttatctcctttcttttcgttgtgttacaatgttcactctattgaatagtctcatcgttctcctcttccctacaaatatataagattttcaaggctttccttttctctttcttcactaaacgatggatgaatcctttccgaactttcagagtcttccaactcgtacaattaaacacagccagtcgagaaaagaacgggaggattcttatattaatacaactctattcaagacccttcatcgaaacaaacccgatattccgagtaaacctgagcagtcttatcgcttcctcatccttgtactggaacctgccgttcgcctcctcgttgatctgtttgatcgtcttatccaactgacccagaagaatctcatccttacgtttctcagcccacctggccatgttgagttctcttcgtttggcggcttccgagctttcaaactcgtcacccctattcaggatgatgacctgccccttcttcgaaggcgacgttttggatgttatccgaccgagtcgaccggcgaaatgtgtgtaatcagcctcggaagcgatcgaggagctgaatatgtaaacagccgagagcgaggggatatctaaccctcggacggtctcgctcgtcgcgacgtataagagtgaggtatcggctgggtcttcggaaaacgttccaccctcgtgaccggaatcacccgaggcgaccttctcctcagactcccctgtcttctcctcggattcgttgactttgggccttctgttccttgcccgattaggatttccacggacgagagttggcgtagggacgatccctgctgcttcctcattcgaaagtccggtagagttttcgatcagtacatatctgatcccaagatctttcaaatcaaattctgcattcttcaacgcttccttatcgggcacaatcaaaagcgatcgattctgatcacctagtccgccgttcatcgcatacacctgtgcgaaggcttccatcatatgaggttgagcagtcgtgccacaaggcttcccgtccttgtctgttggtaaagggtgcgcagggagtggctcggtcgggcttgcggttgttgagaatgtgttccgaattgaaccagcaggagaaactgtgatacagtggtggtcaactgaagaaggtttcttcagcctatgaggggcaacattgatgttgctattcgagttgaatgactgagctgttatattggctcccggacgaacccaagcttcctgattggtgatgaagttcgtgaaatggttgcttattgtggcgctgcaaattaccatttgcggctttcctgtaggacctcttccttgatcctggatcaatgagaatagccttctgattgtccttatcgcgataggtggtttggttacgaacgcctcgaacgctctgcgtcctgcattctgggaaggaatgttacacattgcatcagcctcgtcgatggcgatcgtctgaacatccttcagactgagagcattctccataagcgagttggcgattgcattcggggttgcgactagaatgtggggtggcgatctgaggatggttcgatactcctcaacatcaatctcctgagacgacttaacgacaagcgtcccaacacttgtggcaagataggcctctggcacgatgagcgaggcccattgtttgatctgattggcaagggaggtcgaggaaacaatgaggactgaggtgatgtgggtagagcttgtacgggggagcgaaaggagagccaacaacaaggcaaaggttctgttttgcttttgggtcagcacgctgtagcgtttttcatgcagaacaaatatcaagaatagacagagaacaggtaggaacctactttccctgcccggttgagtctcttccgacaacatctcccctagagatgattcgttgaataaactcctgttggaaatctgtaagttccttgaacttagggaatgcttgacgcacagcttgggcaacgacaggtcgaacgcctgatacaagcaacgagtcctcgcccagcttggctttggtggtagggatatcaagctgagcgttgtactttaatcgccaaaagaaccttgattagattgaagaaacagtatccaagaagaatttgagacggtagatgatattcgtacttcaatatctaaatccaacccttgcacccgcttccgtctcgccagtttttcccgcttcgacatctgtttactgaatcgtatctgttcttctttaagactctgcttcatcagttcatcggcttgctcctgcctaatactgagctcatcgagctctgcattgttccggtctaatggttcctgttggaaaggcatcaatttgccgatattgatcttgcccttcatcctttcctgtaaagattttgatgatggcggcggtcgtctaggggggaaatacgggctattgaaaggaggctttgcgcgggaaagagtgaactctgacaagctggttgtcggcctgaactccatgtcatcagttcggatattaggaggtgtcgattcgatgtcttcaacagatttctgggtttccgatcccgaaaggatggggctgagaggattaaatcgaggaaacagtgtacaggtgcatgtagagaaacagcgagctgcaggcactctagctcgtgcaagaagaacggacattgctcttgtcgagggggccaaaagagttataccgtcaatggatatgagtgtgagcgtgagtgttctcgagatttttttaccaaacgagaataccgagattccgttcttcagcacagcttttcaagatattgtcagacacgtgactcgacgcgtcgcgtctatcgatttgccacttcaaagcgtcatggcatgaatcccgtcagagagatcgaagcaggccaggacagacccaccttccactcgacaagttgttctttctttgtgtcttttactcttgctgaatggtcaagttccagtctccgtttctaggccaatcatccaagtcgtctccttcgacggacagtctcaagagaaaggctccgaatgatcctctagtggctggtggatcgagcctaacaaagaggccgggtccgactcgagctgtcttctatggagtaaatgcagacaagcatggagacagcaaagagggagatgtagcaacatactggtactatgagaatcatcctcaacatcattcagtcattgagcctggcgtactgacagatatctgcgcactttggtggagggtttcttggtaggagcgtacagtggtaagctcatcatgtcatttgtgccactccgtataatttctcaggtactgagtttgactttgtactttgtcacaaacaggcgaagatatcaaaccaagaaggtaggatcatttaccaacatcacgctctattttagggactccgcttaccgcaatctgtgtttgcctcttcgtcttcgttcttgaagcataaggtacgtttgacaagattgaatctattgcgcatatatcaatatatgcacccttccttccgaaacatcaaaactaacaatcgcatcatgtatactgactcacagacttgggatggagatggtgtgctcgtcgtgagagggtcgagatgttctctaaaagacgatagtggaaaagagtacgaggtttttcaatactttcacgtccttcttgttacggaaactgatctccttctcactacagtatcggttccgcgccattctcagccggggagcttagtagtggagatcttctcaaagtttcaggaaaagacgtcgaaatcgacgcgccaatatcagctcaagagtaagtattgactttgatcaaggagtcgctgatcatattgacgactctcaatggataacacttatatttcatcttttgctatagctatctatcaggtgagttcgactttcaattttcataagattcattagactgatggtcacattctgatgtcatcattatcatcgggataacaggatcttgtttcggagccaacaagtctctaactgggtccgcttcaatacaaaacacaaatcgcgtatctggtccttctttcaagcctatggtccctcgaaccgccaagatgtcctctcttggaacttacgagtctaagacgagaggtccatcggatgaaccggcagccaggtcttctgtatcccttgcggcatctactttgccaatatcaacaggacacgttttggatataccccggataaagccggatcctgatgcccaagaacaaatagtagaggagtttcatcagaacggtctgctagcatgtcctgagacagactcgaaggcaccaaaaccgcctagtataatggtcaaggacgaaccaactgatttagaaatggcagagactgtcgtagatgctatgccaaatgccgctttggaaaaattaagattcaaagcaaaagagaatccgttcaaggcgccgacaatgaatagtgtcatggccggaatgactgttttggcagaaaacaggaagggcaggtgcgtctctctatttggggttcgttgcatccttgacctgaaattatgagcctgactgtgtacattttctatgcttcttagatttgactcgacaagagaaggtgccgtcataatgaaacgaccgaataaagatcagcaagccagaaacaatccaaagtatgaatatttatctcctctttctattttatgctatgaaacagtcgattgatgtttttcaatcaactcatagaaaatacgatgtggttgatgtagtcatagacccaactctctctgagaaaatgagacctcatcagcgggatggtgtcaaggtaaatggtcatcctcccttgcactttttgtggtgtcttcgactgatcttgcttgctcttgtattcgttgcctttcggaagtttatgtatgaatgcgtgatgggccttcgtaagttcgagggcaatggcgcgattttggctgatgagatgtaagtcgtttcatacctgagtcgtgtgtctgactacttgatatagtcttctcaatatctttctcatctatcaggggattgggtaaaacccttcaaacgattgccttgatatggacacttctcaaacaaaatccatatgcagacccgaagcacccaggagtgtatgtcctcttctttcgctctctggtgttcagtaacgctctttccatcaaaatctttcttgcacttggatactcacatgagcttgtatcaccaatacttagcatcgggaaggcaatggttgtgtgtcctgtcagcttgaccactaattggaagaaagagttcacaaagtggcttggaagagacggtttggtaagtactcctcgatagacaagtttacagtatctctctatcagatattgtagcaatttttttgcatgttcatcactgatactatctgtaatccatagggtgtgtttgtgggggacggagatagaaaccatatcaagcagttctctaattcgaggaggcatcaggtgttagtgattggatatgaaaaggtacggtgtcttttcacaagtaatcttcctctttccaaactagataactaattcttcttcatcgagtgttgaattactccagcttaggacatgtatacaggatctgaaatcatgtcagcctgctattggattgattgtctgtgatgaaggtaagcccgtgtcttagacttttcacgtcggtatgtaaagacgaagcatagctgaacaatgggatcctctcaaattaataggtcatcgattgaagagtaaggatgccaagacaagcaagatgtttgatgcattgggcacgaagcgtcgtaagggttatctctgtctcttttttctataccgagccttcatttgtttcgaagctgattctgtgcactgccctattcttctcaaaggaattatcctatctggaacacctctgcaaaacgatctgtctgaattctggagcatggtgggtcacccataaatgtttatattttgtgtgcttctccaaatgttaattgttttcatctgcctcacgctctctaggtggacttcgtgaatcccgggattcttgatacacactcgagtttcacaaagatatacgaaaagcccattgtaagttttttcctgaactaatcttaccctctgtcgcgtatgttcaacctctttcgcatgcattattacagataaaatcacgtacgccacagtgctcaaaggtcgacgcagagcttggccaggcgagaggtgctaagctatctgagcttagtagacagttcatccttagacgaacaaacgagatccttacccagttcctaccccccaagcgttagttattcagcctttctaaatattttcatcacagcgtattaactttctcgctattttattgttactttgaatcatgcagatgaatacgttgttttcgtcacaccctcgaaagttcaacttgatatatttgcgaaactacttcaccctcaatctgttcaaagtttcatacggggtcctgcgtgagtatttctttcagacatgttgacgaaattgggaatttgacctttttggttgtttatgctccatatcttctttagccaacaagcgcttcagcttagtgagttttctgccgtctctggttgatagatcttctcattgaccggatctactgttcagtcacacacgctagaaagatttgcaacagtccgatggtgtgtctctatcaacttcatagcttgtaaattagatctgtgcggctcataatgttgaatctttatccagcttttcaaagagaaagattcggtgagactattttatctcttttacgatcatgaatttgatgatgaaacgctgattaaggggtcgcatggttgtagggtgtatcggatgactcgcctgcatctgttaaatccgctcggacgatgattccagatgattgtgtagaccatgatgttaactgcagcggtcagctcctcttctttcctctttagtttctagacaagaagaaacttgctgaatctgcgttgtctgctgttgttctatttgcaggtaaattggttgcggtctctgatcttctgaatcatatttttactcaatctgatgagaaagtagtactagtgtccaacttcacacaggtatgactttccctttgtagaaaaaatcaagttctatcaatctgacaatccctgtaaacctttcaagaccttgaatatcttggaggcgatttgtactttaagaaagtatcgatacgagaggttggatgggtgagacttctgacatttctcttgtttctaagactgttcctaatctgtcgtttctttttatacagatctgttccccaaggtcgaaggcaagagatggtagataagttagtacaagcttgtgctcgtattatagttcatcttgatccgaaccgatctgtattgagcgaatgaccatatgcgcagatttaaccgtggcacgcaagctcaaagcttcattttcttgttgagttctaaaagtggtggcgctggttcgtttccgtcttgatcgcgatgttgctctcgtcttgatctcgtttgtgctgactatcaatgtggacatttcatcggatgtttgtctatattcatcaggactcaacttgattggcgcgtctcgcctaatcatgtttgattgtgattggtatgcaacccccttatcagtaaatcatatgagtcttgttttaagctttgttgttgctatctgtaggaatccgtcaacggatcttcaggctatggctcgagtgcatcgggatggtcagaagcgcaaagtgttcatttatagattcatgactgcaggaagtattgaggtatgtgttccggctcgtgtgttgacacgattcgcagtcgataacttgtactttgattattccaggaaaaaatattccaacgtcaagtcacgtaagccagattcattctatcaagttctgctgtgatccttcggctaacatcacgccgcttccctcttagtaagcttgggttgtcgagctcggtcttggatggagaccaaacatctgatggaaagtctgctaagggagctagcgacagctttactgtcgaagagctccgaaatcttttctcagttcagacaagcactccgtgtcagacacacgatgtaagtctcatcttttgtgggcaaacatctagaattccaattaggttcactgaccctacactaatctcaataccacagcttctcgagtgtgattgtctcttcgagaaagaagaagggacgatgagtctgcaacagtgtttagaccttgaccctgatgaggaatcatctgataatgagaccccttacatatcaaccgccagtaatatcaggcctggaatcgaagaaaagaggagacgtaaagtgagtagactgtctagtggctttttttttgtaatacagctaacaaacatggatcaatattcgtgttcatcaatttataaggctcagaaggaaaaggacgataagctagctgtattgaaggagtggaatcacatagagtgtctcaatcctgtcagcgcagcccttatcgaagacgaaagtcttcgaacgatcattcagacatctcacggaatcaacagttctcgaaccgcgtctactgctctccttgatccaccgtcctcctttcagcccgctgcttcgactctgagcgaggatagctctgaagttgaggattctaacggcggtgatgacgacgaccaacctatccatccgccctcaactcagcgacgcgctcatcagactcaaccttggcctcagtcagacgaggacgaggaagatgtgctgttccaaggtggacattcatctgacgctgaagaagacgaggaggatattccccttatgagaaagcttcagctcacacaatcacatcccaggtattctcagccctggccggatactgacgaagaagatgaatcagagcgcgagagcggtctttccaaagtaagctcaacagagaaggtgaaagggttggacgaggaggtcagcactttggatctggtagaagatccagagagtcctgggccgaatgagacggcggtgaagagatcaaggcgaccggaggacggttggagtggagtggtagatctcgtcaagatggcacgtgaaggccaagggggaaggatctgttttttatttgaaaaggtttcagcagctactctctagatatacagtacaggttctcttgtactttttccccgtcattccacctcgctgtcttgatcttaataatacatctgatgttgtaatttttcgatttcttggttaatatatcatatttgatgttcagtacgatattatcaatcttgcggtgctgacttgaatagaaatcaagaaatggtcacaatcattgatctgccgaaggcgtactttgagccatcccagctgggctcttcttcttgttcgctcgtttcttcttctttttggctccttctgatgtttcagtcgaagaagtcgccgggtaaccctcaatcggatctgctttcccaagcttctgagctaggccttccttcttttgatcctggttgtcatcaacgatggttgattgctcggcttttctctttttcccctttttcgcggctttgacggactgaacttgcatcggggcgggatcctctataagatttgctcgaatgaaacacgaaacaaagaatcctgaaattttaagtgtcaaaaatgaggttgtttttggttaggaacaatcaagaatagttaatatgaatcaactatcactctttatgcgatttgttctgaacgaatacgagcagaacacgggcgcgtttagtaggaaagaaagaaagaaagtagcgaaccatttgttttgtccactccgggttcacatcgaacgacgctttcggccaagtctacacgaccagccatctcttccggtcgtcctcgcctatcccaatcgggaagaaccatactcctaggggcaatcgaccaaccgtgttctttggcttctttcgattctagagcagctaggacgacatgttcatcttcctcgggatgaatggaacatgttgagtagacaagcttcttggcgttaggaactttcataagcaatagaaaatgtgagaaagaagagggtcagagatgatgcattaaagtcgagaaacacaatcaaatgggggttctcacatttcatggcatgctatcgcagtggagtaagagagagaaaattacaattcatagttagctcaagacgacgtgtaaggtttctattgggaggtaaagagattccaatgcaaaatctttcttactctgatcatgtttaattggaacccggctaatttatctaatctctctttcttggttgtatcgttttcttcctcagctgtttggacaaaccgagcaagattcgacatggtaagacaataaccttgagtgtcttctctacaaagcgaaggaagaatgtcaaacgaaccttcttcagtcagaaagtccaaccggttgacgataccacttcccgaacaactcggatccaacaacaaatatttcacatccctccactctgcgccatatggatcagtctccaaaaagtctctccttgttcctccaagttcgacatttgtgcaacccgcccgacctatcatcatttctagcactttgaatcttttaggactcagctcgaaagcatgaactttatcttgtgctttgggggaagatattccggcgagaagactagcatgcgcaagtagagcggaaagatgggaggtcttgttgcctggcgcggcagtggcatcgatgacatgtgacggttgggaggtcagagatggttgaggggcgagcacgtaagcagggaagcaggaagctttgtcttgcagaattagatgctaagtatgaggaaaacatcaattgcatgaatataagcttttgacactaagagtaaaggatgcaatggtttaggtgaaagacgaaaacttactcccgaggtatatctaaatttaatttcaaaatgacaaagagtagagcacagctgtgagtttcagaaactgcacactgtagacagagcatcttagagacttacgatacgtgttgggtcaatatagatgaagccgccagtgcaaacaccagaaggtttgggatatgttcgtccaaatgaaaagattttctattaagatatgaagcaaaaaaaaggtaagatactgatgcatcccagcattaaaatcggctgagaaagtaagagtaagaacgaacgtagggattggatccggaaaaggacctttgtccaagaatgtgaagaagccaccttcctttgtttgtagaaaggcaatcagttcctccggctcgatcaagttggtattaattctggcatatctcgggatctgttctat

SEQ ID NO: 1699 - DNA, 13649 bp, Xanthophyllomyces dendrorhous
ggcagataaagaatgcatttgccattttagtgcacagacaatggagagtagtagttatataaacagaaggacgcttctgcaggataaacttcattcatcaagcccgacttacctccgacaccaccaccgatctgaagctccttgttgcttcttacgcctttcttgatcttaagcttgacaagctctgctgcgagtctggtcttgtgttttaaaattgcatccttgatagggccagtggacgattgaatgctacattttgtagatataagaacaaatcagatcagtctctggtacatgaataataaaacggaagtatagagaacaaaagaaagggcataccccggtttggctgcaaagatcaggtcatgaacaagaactagaggcaagttcttggatttcgcatagatgaccttcttgtcgtccttcgttaaagggatcaagctcaacaatgtttgaattgtaggtttgtactttaaagttgagataactaatgccaacagtctttttgagtccttttcaggcctgagaggggcgtgaaaaggaagagagtaatcaagaggatgagtgagaccatcttgaatctcaaaggaggggtcgaaactcacaagttctgcgaggagagagcggccttgatggaagtctgcttgagctcgagctcgtccaactgtggaagtattcatacaacaacaatcaaatcaacccaaattcaattggagaacggacaagttcttgggaatgaaaacctacaaaggaagctgcttggaaatagagattcatggtggctcggttgatggccgaccggttctgtaggttgattttgaaaaccttccataagagacgagcagatagaaagagaagacaacggtaagggttagctcacgtgacatgaactcacgtgacgactgacgcgtttgaggcgatgttgatcgacgcgaccggacgcgacttatttactggagcaagtgaattacccgtagaccatcctgcgtgttcgttaccttcaacatataaatcatagcccatcctctatcgtccacagcatatccgtttctaatcgatctagcttaacaaaacagagaaagaacctctcgtcctggtttgtgtaaaccatcctacttactataatccatcatgatcggaatttctcaatgtctgtccttgtctctgttctttggtattcgttccgagagcttatatacctttggatttgatcatctttcatgggcttacaacctctatccttgaattcagccgtatcaaatatgtttgagcagacgaaaagtcgtctgtcgacgcggttcaatagtccgcctgaccaagtatcaacggaaccgaaggagcctcctcgaggcccggctttcagaaatgcgagtggaggcattgggaatatccagtacaacgaggttggggtgccatggaaggataccgcgcttcatggaatcattgtgagtagacgaagtgaggagagatggcttttccttgtgtcaatccgtatgagtcgtagttctgaatgtcgtaagctgattacttggcgtttcatggtgaccaatcgaccttaatgaactagatcttttgcaccttcgtaggaatgtgctgctttgctgctgtagctggatttcaagcaaaatggagtataggtgtttgtcagtctttttcgattctgttatctcgttcggaattctcctcttacttcctgtcgacgactgtgactctcgacgatgtgctgaggctgtgtgagattctgttctttctcagcgggtctctcggctttcgcgctattcttttcactgtttctcttctttttatctagcttcatgctggccgtacctctggtgtttgacaagtgagcgcatgatcgttgaacgagttcattggatgagccaacattgataaaggagaaactattgtttttttgatacttttctcattttctttcctttgggaaggtttgacaagatgagggcattggcgatgggattggctgtgccgcgggtacagctaattctcagggttaatggagcgttttggacgatcatcctcgctatggctaccacggtgtccggtacgtgtccttctcctcctaaattgaaatggctcgccagttctgagcaaccgtttcacacgcatatatatctacgcgctctctatccagtattctcggagaagggatgcaaagactcgtcaaacgatcctcatgcagacctcggcgatgcatacacggccggtctaacgagttggtgtcgaaccaaacgggccggctcaatctttttctggttgtctcttggtttgtgatcgttcctctgcgtctctgttctttggcaaattcggagtttgacgatgagattcctcttctatgacctgccacgtggatgaattaataaaaagccggctggggaggtctattaggtctggcatttcttgggttgtatgctgctcgaagaaaacatcaaaaagaagccggctttgttcctccctcgagttcgatcgacgaagagcgcgccggattgaacacccgtccagattctctgcacgcgcctactgcaggtcacgacgaggatggcggcatgaatgaagagggcgagggagaagaaagattcgaccagcagcagcagcaacaacagcagcagagagggccggtagaggataggtatcacgctcggtttgatgttgaacctatgaggacacgaccgagcatggatccgtacggtgcgttctcgggaagcgttcctgatggctttcaaggttatgggatggagagctcaagtcaagttgttgtcggtggtggcggcgggagagtttcagttgcgcctccggctgtaaacccttgtgagttcttgtcactttgtcaaaaggccatcaatcaatctgacattcgtcttcgttcttcgatatccacaaatgttctctcggaaagtcgaccaaatccgaacggcgttaacatctccaccacctcgacaactaggattggaacaaacacaacaccaccaccatctacaaccgatgatgtccttcccaatcagtccggtaggtgcccagacgtcgggtccgtcaccgggaccggctccgggtgggtacccaggttatccggcaccgacgccggtgcccgtagctcagagccgcggtcctgtcggcggttactacccgggtcagcctgatttaagttatcagtatgcccaaccaatccagtcgcctccatatacgcctttcccaaaccagcagcagcagccaatgtatggctacccagatccatacggtcgtcagtagaggatgaacgaatagttgttctggtcggatctccttcgaacgcagccgttcgagatgatagatactgctgtctttctttcctttttccttttccccttcactcttcctcatgcatcaaaaggactcttttcttcttaattattcacaatccttggcctcttccctagcttcttatcttgtcatatccttctctccctctctttgcctctgccattcttggtttgtttgacgatgatgaaaccttctatctcctgatttttggttcaaaggacccttgtttgccgcccaaaaagagccaagagaaatagaaacggaggaaaatgtgtaacacaatagaaatcgtcacacgagcgcactcgatgacgtcagatataatcgggtaaattcattttcgttaacgcgccggttcctccgaccgcagagattacatcaacagacgcgtgtgcctttgcggcagaggtacttgtgtgacaattaggacaacctctccgcaaaaatgatctacagaaatctgattttagctgagccccggattgatagcttcgattctttcccttctccgtcccttctctgtccgtcgtcgcctagaactttactttgtcatgcccctcaaaatttatctgatggttccccattgtgatccgcgctgagtgcggggtagttcagcggggaaccatcaagctaaattgggtctcctcccttattgaatcggttccccatccgattttcgttaaagagggcccaacataatcatcgttattcgacttcttcttttccctcccgtcattccctcgtctttcagactttcttcgctcttctcgtcaattcttccctttcacttttgtccctcacttatctttccttgcccctctctggtcgatcatggtcgcagcagcacctggtgtgttccacaaatacaacaggcgagccgtgttttactcgttagtgctccttttctttcttcagtttatcacacatgacctccagatattcatcgtccttcattctcttctgcgcgcacgcatctccacaggctcgtcttcgtcctcggcgccatcctctacggttatgatgggacttactttaccggtatcctcgagatggatgccttcaaacgagactacggaaccctcgtcaatggcgaaatggtcatcaagtcaggcgaccagtccctctacgcctcgatcgtccaggtcggagaggtcgtcggttcgctctccgctggtctcatcggtgacaaaatcggccgaaagggtgcaatgtgagtttgtctgatgttccgaaagacaggtctacatcgactgacaatagcttgcccttgcctttcttacccgcaggtatgtcgctatcttctgggtcctcatcggtgccatccttcaaatcatcgtagtcggctccagacctctcattgtcgtcggacgactcattcttggagtcggtgtgggtattgtttccaactgtactaccctctacctttctgagatctgcccggccgccattcgaggaaccagtacgtctttctggtctcttctctccattgttcagattttaaactaacagagcgcgcaaaatcttcttcagtcgtctcttcgtggcagctctttttggctatcggtcaggtcatcggagctggagtgtcccaaggaacgaaagactattcgtccacgttctcgtacagatttcccattgctttgaacgtcgccatcgtcatcatcatctttgccggcatgttcatcgtccctgaatctccccgatggtgtgtctttctttttcattccttactctcttcttgaccatctggcttataccttgagatttcttccttcttcccgcaggcttatctctaaagaccgaattgaggaagccgagcacgccctcgaccgagtcaacaagagtaacgaaaccgccgataatgcccgagagatcagagtcatgcttgacgccaaagcggccgaggctgctgagtctggaggagaatccagatggggagatctcctcaagggtgcccaaaagaagaagttgttcggagccttcggtatcctcgtctgccagcagatcaacggtgttcagtttgtgttctcttactcgaccgtcttcttcaaacaaattggtgtcggcaacccattcacgatcaccatggtctgcaacgtcgtcgaggtcgtcggagtgctctgctcgttctttatcatcaaccggtttggtcgaaggcctctgctcgtttggtctgctctcgccatggccgtgttgatgattgtgatgggtatccttggcacaatcccgaacccgaccggatctgtgaactccgcgatcgcctcgatgatcatcatcttcgtttgggtcttcaacttggcttggggtggtttggcctggactgtagccaacgagttggcttccggtcgaaaccgaaccaagatcctcgctgtcagtacggctgccttctgggtgagtgcctgggccgtcacgtttacgcttccctacttggcgaacgacgatggtggagctggtctcaacgcaaaggtcggatacatttacggaggaggagccctgatcggagccgcgttcgtgtacttctacatccctgagaccctcggccgatcgctcgaggagattaacctgatgatcgagctcaaagtacccaccctcgcttggccagagtacaagaccacgatcgacggtgtccacaacgagcagtggaaggcagaggataagaacatccagcagggccagcgatttgtcgagaacgccgatgccgagaagggtatggccagacgagattccgacgacgccttcaccgcgcctacaaagttctaaattcagatatagtctcttgcctctcccttctgttttcttaacattttctatttctatagcacctcgagggtattgtgtctcccatgttcccgtttctttcttttcggggttcggttcttctttcatccatagaaattagaaaacgacggtcttccctctttgtatttgtagaaaacgtaccaaacttgaaataaaccatgtttaatagaaaatatcaattccctaataatttggtctcgtagattaatcttcttcctctgcttttctcttgctctttgtatacaggcgcatttggcgatggatatgaagacacgatagtaatcgaacagattttggatatcatgatcctaaatcttctttgagataaagaacactgtgcgagacggtcgagatggcgagtttgtcgagcgttgtaaatctttatccgggagtgctcacatgcacacctcaactgacacgtcgggaaagctgagcttatctatcaagccgtccattgttagcagaagtgatgttgaaagcatgactactgtccatggtgaggttgtcagagcgtatcaaacagtagcgttgtgttcttcagggataggtccgttgaccaagatcatacagcaccggatttttcgggcaggaagaacggagggctaatcatatcactcaggtttgtttatcaacacccaggtagagatcgatgtatgtccccagttccctttgacgtgcgacagaatgaaaaaaacaaaccggcggatgaaccacaaggtccctcgcagaacgaattgggcttgttcgcatcaatcttgttcgaggatgatcgaactatcagaagcaatattcatttatatgtagaaacaaagaaatgcaagaaaccataaggaaagtggatggcacacttgggtacatcaaactcgacgatctctaaatagccgatgctatgtacggatagtggcgagccatgaatgaccactttgcgaaacatgctggtctagtaatcagccagactggatttccagtatgtagagtctcggccattattgccaagtgagctaagttgagtgatctggccgctgatgccaggactgatatcaagaccgatgcttatgctgacgctgaagtagctctatcgacggagacagaccatacccatgacacatgggatctaagtgggtggtggtctggggacactccagtcctgagagatcacatatcgataaccatcggttaggtgactctctatctgccaaggccaaacatgtatatttatagtattgtatctacacgtttcatctgaggtcatattaaaattcgatcagccgaaaaagggtgaactaacgcccaaccacccaactagacatcctaatgtcaagttcctacgagtgagtttgtctgtctagcaagtaaaatgatggcctaatgggaacggccttactgaccgttctgccgtccgctgccatgtctagtgactgctctcctgcagattgggagaactctaagatgggtctccgaatagctggcgtatttatcattctcttcaccagcatgtttggttcgttctagtgatcgtctggctattcagatattcgctctctgacgctactctgtctgattcataccgtaggtgtcctgttacctatcctcctcaggcgaaatccgaggttcgccgtcccaaagagtgaggcatgctttgatattgaaatcgaaaccaagattattcgactggttctatccctatccgctaacgatgtccattcatgttcaaacattgtcatttgctcacgcccataggtgtctttgactttgcaaagtacaccggatcaggtaccttgcttccttccattcagtacattttgcttctcttctatatgtacatgtctgcattctcgccttttctgctcttgttgctgctgactgcgtgttcttctccgacctataggcgtcatcatcgctacggcatttatccatctgttgcctcctgctttctacgcgctcagctctaaatgtctcaaaggcacctggcaaatctacgtgggacttccccctttctaatgcctatctcactctgatactgaccacatgaactcgatcatgtccagccctggcctgcagcgatcgccatgttttctatctttgcgctattcatcgtagaatttttttgcgttcggtgcgtcgactttctcttcccctttgctacccgattgtcacacactcaacataacatccctcctttatcctgtcagaattggtaatgctcgaattcaagcggccagaaatgttgactcggataagtatgcacacacctataacggaacgtgcgcttcccatgaacaagtccctcacgatgtcgaatcagcatcccacgatcaatcttccgttttcccgtatcagtctcctctccctcattcagccatcggacctaaccataacaccttaaccctggaccaagagatcgaattgtcaccatccaaaacatcatacgacccgagtatacctagcctatcagtcaagcagactaatgtcagaatcgatgctggacaagaggaaaatattttagaccgtgaggcgcgggagagagacgcatgggcgcgaatcgtgggtatgctcatcttggagtttggaatcgtatttcattcaatctttatcggtttgatgttggcaacagacagatccttgtatgtttttcatccgttcttctgattctttttgtcttactcacttcaacttgtgctgaacaatccgcccgatcatcgaataaaagtactgtcatattcatgtgagtgtcgctgtctagcctgtgccaatggtaggaacatttctaagcctgcttgtgaacgatcaacaacaacgacagcgtcatcatatttcatcaggctttcgaaggacttggtcttggggcccgactggcatttcttcctctacctgctagaatgaactggataccaattgctatgggtgttttttgtcagtttgatttgccttgcaaattcatctgccaccagtttgtgtttgaactcgtgttgttaacaaaatgcgtaccgtttgttctcattttcgttctgatctgaccaaaacgaacagacgcggccttaacacccatagggatggctattggtcttggcgcgcgatatacctatcagtcaagtgctaacggggcgctgattgctaccggtgtgctagactcaatctcggctggtttgtcgatttaaatcttttcgtttccacctcaacctagtgttctcgagatatttcagatcggtagtctgatcatctctttcccgagcgaaaatactaacctcttcaaattgcttgtcgaacgaaacgtattctatacatctggtatgacatatgaaggaattttgctttggacggtaagtgtgctagcttctctatctggctctcctatgtaaccgcgtttgtatcgttgtatcagatagcttcatgacttaaacccttctttcacccttgttgaataacatctgaattgtgatatggtttcggtgagattagtcgttggtcgaacttatggcccatgtttgtccttcatctcttgttcatcatctcccagacccgacatccttactgaaacattccatctaacttctcctttcttgacatccttttctgtcacgcgcatcccgtttgcatttcgcggtcaaactatgaaggagttcctactcagcccgaccatgctcaaagagagcttggggagagtgatctatgtattttcgtgtatactttttggtcagtcatttcacttctcaacttcgtagttcttggatacctttttagtacactctttccggctgtagatattgacatgtcgatcaaccttgggttattcgattgattcggccaaaccggaattattacgtgaataggatgtgccttgatggctgtcttaggcaaatgggcatgatctatcaaaacattttgtgccttcgggtaggcgaaagagaagaacatgcctcagggcgttggctgtgctttgttccgacagctgctaggatgataaaatgcagcatcagaccgtcaatcacttcagctgccttctgctgaaaatgttctaacattcgactctgtcttttctcctctcttctttcccttttctttcttcaactttcaccaattctgattaatcgctgcgatagtttcatctcatcttccagcgtcaaactgtgaacttcttcagaagtctatgtgttctacagcatctgggtttagtttctgacacacttggtatctatctgtcgatttagctatcctgtctttctttgtagagaagacatatcgatgaagagacaacatgtcaaagaagaccgcaggttcaaatctaatcacgaggcagaaaaggcgaaaatgagaacaatcataattcaatatgctgattttcaggatccgaagagcctttgcttcatactccggaccgacatatcgtttcggacgagcagaaagaaaagatggatgtatatgagagaacgggagggttgtaggatttcaggcctctatctgattctcaagtagcacaacatcgatctcaattcctggtaggaacaaacaggatggacgaatgaattcacgaggccggcatcatccagaccaggtgttttctataacaagccccggccgtgctcgccatgtgagcggtgagaacccagtgactgagcgtctagatgaacaccgctgggaatagctgcgcggggctcgattgaccaaataatttctatcgagagggtcttaacgtcgtctctgtttctctgtgtatgcaccctttgtctgtcaattactgtcttagagtagtgcgtcgagtgctcactgttgcctctgctcgctctcagacttggcggagcagggaatgtcaatgcgccccgcaacatgctgcaactggtccaagactataacgacaaggggtgggcgaggatgctggtgtctgacactgctaccgctctcgacgctcacgctgaggccgccccatgaaggcgacacactaaacccatgacatatgggatcttggtagtttggaatctgagggcactcaagttcaaaagggctgtacatcgatcatcggcgattgggaatgctcttaccaagcctaagggtttatatattgtgtttgatatccactctccttcagttctaaattcctcgaatgcaacatttcttcttattttgagtagggagagatgcctgacaacagacggaacgtcaagcttgacgtaaggaaataaggaagaacaacctaggaaagaagcgaagatagaataacagccggcaaggactcctcaggccaagatttctacaacgacaccggcacccactgtctccccgcctctcctcaacaggatccttcccatctctttgttgacactgaaaggctcgagcgaaacagtaggctgtcgtcggtctgatgaatgctcattagggcttcgaagcgagatctctactctagctgaagtgttcctcgtcaacactctgcaaagaaaaagaagggctcgcaaaaatgattggcacggtattccaagcgcatgaactgaaaagacagagggaaagagatacgcaagaacgaacctaggcttctctttgatgactttaccggtcgaccgatccaaggtggcgaccagctttgaaaccgaagctggtaaattggccgagtggtggaagagttcgacaagcgtaccagaggtgatcgggtattcgatatcaaatagaataatctgagcaacgaaggacgttacttgaggtaccagctgagcttgtggacaaagcacagacccaattctatgaaacgaaagaggggttcccgccagagttagacagggcgaatccattgcgtataagataagaaagaacaagacgcttacgaaagatggatagggtcaatggacgccaggaagatcgtgacattcgttccagcgacagcccaaggaacgttttcttcatcaacctcgatacctttaccgataaacactcaaaccgcggatgagcttctctctaggttcaacatcgtttctacgatcaaacttacttcgaacgattccactctcatctccaggcaagattctcaatctctccccgacttgaaccacaccgctacacaccctaccggccacacctactccggaagacgtctggcctttgaagacgtttgacaaaggaatccgtaacggagcttccaatgctctcaacggtacttccaaagcatctatatcaaacaagcccaatattggtcattcaaacgattataccatgacacgagagatatgtaacttaccaagccgatcgaccagcgtgggtcctttgtaccagggcatcacctccgctcggtccccaacttcggccaaattaattccctgcatcgcgccgaccgggacaaacgtcgtcttgccaggtaagaacccagattgaacaaggaacggtttcatttgatcttcaatgtcgtcgaatcgatcgaccgaccattccacctaggaccatcacgtgaataatgtctcaatgttttgcacaaggatagataagccccaagaagtgattgagtcaactcacagtgtccaacttgttcaccacaacgatcacgttctggacgcccaaacttcgaaccagaagcgcatgctctctcgtttgtccacccactccaaacccagattcgaactccccggtggaagcgtcgacaacaagcatagcagcatccgcctgagaggctccagagatcatattgggaatgaagtctcggtgaccgggtgcatcgaggagggtgaagtggcggttgggggtggtgaaatggtcctgggcaatgtccattgttacacctctaatagcagacaggcaaaacaagacttgtcagttatttcaatcagcaatcaaaaactcccagattgaaatattgtctggagaggaaaaaaaaccaaccgttcacgctcctcaacagtgccatctaaagcccatgcgtattggaaactactcttgcccatcttttcacttcctcgctcgttggcgatcttttccttctcagaaagaactcccaattcatacaagagtcgacccatcaacgtggatttaccagcatcgacatgtcctgaaggaatagcattcacgtcaggttagttcgatttgattacttggggaaagagatcaagccgcgccgaaagcgacgaaaagaagaagaaagggacaaaccaactacaaccaagctgagcgcccctttcccgtcagcctctttcttcttgacttctcctatgatcgccgttcgttccaacaatgtctttggcagcggcgctggctgggcttcctccttcttcgtgtcctccaggttcattcctgccatatcgtcctccatcgacgtcgtcttgaccgccgaagtagactttatagcgctcggccctttgggttgttttgatttgggagccggggttggagctggagttggggttttaggtttagatttagatactttggtttgtcattcgaaaagcaaaagatgaatataggaatgccaggcgtgaagagaaaccggatagtattaacattcaagaaataaaaattataagtctgacaaatacaacactggtgacaaaatatatagaatgagt

SEQ ID NO: 1700 - DNA, 20792 bp, Xanthophyllomyces dendrorhous
gtccgaagagcgagggtgaatgataaaagcatctttgattgcttttccatattcctggtcatttcatgttcaggctttgaatccgaactacttcctcatattctaagatgtacaagccatcgctgaataattcataaccccctattgtgtcagttaaacaactcaagccctcttgcttgacaccacactagcgaccgctggacctgccgctatcatcgcgcccaattttgttccctttctcttctccaagacaatatcgtccgggctcggcccttcaaaagcgattttaagctccatctgtgcatcttccaaagtgccaccttcgcccgatagatgcatcgaggccatgaatagattgctcgaaaaagatcctcctgcagagcgaggaagcaccgcgcgttctatcttgagaagtgatggtgtttgggggctaacaagaatagaggcgaagggggaagcatcggattggagagcgggcttgaccgaggatggagaggacacagcacgaggggtgaaaagtggatttgttgggggaacaaagattggttgatgtgcaggagaggggtccagaggatgcggctttccattgggttgtggcggcgagataggtgtagcatcgacaacttgagaggtattggaaggaccttttgctaaccgagccgcttgcattttgagttgtaatttggaaagagactttcctgcaggtgaagaagcaggagaactggtggcagaagatgcggcaggagatgtaggtaatgcacctgaggttccggcagctctagatttggctagcatggcaagtttggagagcttttggggcggttgaagaacttcttcgatatgagaagaagcctctctccgagctgggatattactttgccctaagggggacgggacatcggggatagccgttttggaagcagcgttgctcttggcagatgactgacgagacagagaaagacgttgaagtgctgtaagtagaacaggtggttcatccgactgtagagtgggatcttctgtaataatcgaaaattagaacacaatgtcagtttcatgagggaaggcctcatggcatggtcgttctcgtcgtctggaagggccttgaaaaagagggggaaaacccactctgcccttttgagaggtctgtgattgattgcaacagcccgaacctcagacggtttgcatagttgatgaaaataggatatatgccggatggacttgtcgtttgtagaaatgaaatggacctgcccccaggtggacgatagttgtggggagaaagcaacgccactcaccatttttctttttctcagccttggttcgttcctccaggagccagctgatggtcttctctgcatcgaagtaatagtaccagagagaatccttgatttctttatcagagaacccagatgtctcctgaggaccgagggtggagcggacgtgagccaaggcagagtccatttggactgtagagaaagaaattaaaagtaagcagatgaacaagttgtcgagtggaagtcgattggattgaaacgaagagctgaagtatcacatacctctttgatcaaccgtcatatcatctggatcataccaagatcattgaagaaaacgacaagattgaagattagatcgtcatatacgtcacacttgttgatttgatgggcgaaaacttgacaaaccccattcatttccatagtctgatccggaatcttccttcatctcctctgtaggtatgtccgttgtatgagagttagtagctgatacaagccatgagaagacaaaggctgaacatatttcagccagtgagaccttgccaggacgaaccatcgagatcgagatttcgaacgaaacgatgtcgtgacctgtaagcgtttacgggtcagtgttatgagacaagaagcgtgtgttcgaagagaagagcctaaatacattatgctcaagtgattgatcgagagagatgcaatagaacgggtgaatcaattgaagcaaaggctgctgatggtgctaaaatgtatgagagtgtgcgtggaattaggagagtgagaaaaaagaaggatgggcgaaaaaagggacaatctctattatcatccccaaatttgcccaagtcatgtgactcatcggggcaatatttggggtactgatgacgtttgtcgttccttgttctctgttcctaagtatcgagcatgctatgatgtggcgatccgactactgaggggcagaaaggtggtgtggaaggatacatccggtataactccacttgactgggtgtcagagaaagagtggaattcatctatcgttgttgctcgacttgcagttcatcgactggaggacgttccctgcaagagcatatgatactaggcatcggtcaagagttatgagaaacgtggacagtgcgtccccacgaggattctagctgaagaaacccatattcaaagaggaatgaaattgtcccctttcacgtattgagccttctcgagcatggtgtacaagacaagacgatacatatgaatacaagaatgtctccaggtcttaagtatgaggaaacaagtaaaggatgaacgaataccaaacaaaaatattgatgatgcagagtgaaagaaaaggcataaaacaagaagaacaggtagcgatggtcaaacaagctcggagcacatgttcgcattccttacagaacatctcgcttaggttcacatcagtcaaagtttgctcttggacaaacagttggcaactgttgtggtctctctgatcagatagaacaaagcccacgttccactgcgttagaagacagaacaaatgctgacgtcaatcgaatggaagacgacttgatctgttagaaccttccatcctggggtttccacgcgatcgaaatctttttttattactcccgtctgtgctgggcacacagatccgcacgtaggggaagcacaatccggtcgttccattgtctccgcacgatgatgatgctgttgcctgatccatctccatcatccctccacccatcggggtttcgtcaaccttttttttcatctggttttatttggaccttctcgttcgatgtctatataagcaaactattttccatctcggttcaataaactctttcctctttcatactttcacatctaactctcacacacacacatacacccacactttacaccttaacttactatcatgtctagcgttctcgagtctgccaaggaggccattgtaggggctaccggctcccaggaggccgttcgtgatgtccgatctctctcacaatgtactgctcacacaggctaaccttatttcatattctattgtatctgattctctctagaaacagtccaccggcgctttccccggacctgaagcttacggagctgagacccagaagggaagggtcgctggtatccagcgggatatggagcacgttacccctgagcacaccaggctggagggcgccaatggtttggttgactatgtccctgccggtaagctcgtcggcaagaaggccatcgtgactggtggagactgtgagtgtctttcttctcactcccatctctgctccgagattgttaggagattttaaaaactcatcgctctcaaactgtaatctctctcagccggtatcggtcgatcggtcgccgagatgtacgctctcgagggggctgatgtggcaatcgtgtaccttcctgaggagcaggctgatgctgatgacgtcaaggccaaggttcaggccgctggacggtgagtgaaagtcgatcgtttgagtatttcgctgttccatcgtccaagtcaactcatcattcttttctacgctcacagacagttcatcggtatccctactgaccagcgatccaaggccaactgccagcagatcgtcgacactgtcgtgaaggcttggggtcagattgacattctcgtgttgaacgccagtgtgatgtacgctgtcccggagatcaaggatatcactgaggagcagtttgaccgaactttgaaaaccaacttgtacggaaccttcttcctctcccaggccgctatcccccacatgcccaagggatcgtccatcatcatcaccacttcgcagtgcgccttccacgcacctcctatgttgctcgactactcgatcaccaaggccggacaggtcggactcatcaaggcgctcgctcagcagacccttagcaagggcattcgggtcaacggtgttgctcctggaccggtctggactccccttcagccggcggccatggacaaagaccagatggctgagtggcaccagagcccagcccctattggccggtgagtcttgaaatggtgctagaaaggtcgtctaaactatcaactgatcaatcctccctttatgccctgatcccttctacagagttggacaaccttccgagcttggtggagcctacgtcttccttgcttccaaggaggcttccttcatctctggagagaccatcaacgtcaacggaggaaccgtcatctaaacggacggtccaagagttgtgttgttatcaggatttttgaacgtcattctgtagcaactagtagtgtttattatcatatgtatgatttgtctagtcaatccaagacgatgttctcgggtgcgtctgatctttctttggcgggtccagctggggccccggacagacgtcatgctttcggccaataaaaagactaaagttgtagtttggccgtttctacaagcggatgaactgcgcgtcttccgatcggtttttgccgaaatccactttatgcttgttttttcggatactcgatttccgccggactttacagagttctctccttccggttgaaaccgctttgacccacagagtgttctttgggttttcgacgtttcttgagcccacaaaccatcattaaatttccgactgaccgacaaaggaaacagccgtttgtcttggcttagctattgtttctccgccggttgcgaccacaccgagttcatgttgtctcggtgctgcagaactcctcaattgatattttgtgtcgaaggcagtcttgatataaaaagtagacgtaggtcatgatacgctcgatatccttgctggttctcttcttcacaaggcctcaacttatatcttgtgttccattcacaaccacacagtccctcaaacttcttcacttgttcatcccatcgtcttggatctttgttctatatctgtagagagctatactcacaatgtcagacatcaaaaaagttgaatacgaaatcgaatttgacgagaaccagccggaggacacaaccgggaagaatgtcgctggtgtgatcgaggacttccccgaccgagctcggctggagaagaaattgtttgtccaaagactttcttgatctcttgaacctgtcactgtcgctgtcatgacacatgtctcaacttgagctgatgacttctttgccttgtctggtgcaggttaaggaaagttgatatgaggatgagcatcctgattgttatctacattctgaactacatcgatcgaaacagtcagtttctcatctttcccctctggtcctctcattctgcgcgctgaatgttctgtcctttcctctttgcatatgaccagacttatcggccgctcgaacaaaaggactcgaggcagacttaggcctgaaaggacaggagtatcccacattactctctatcctctacgtcggatacatcttagtgagtgatcgtttaccggttctgtactatcttaaaccatgtgcgcgctcagttcctttgatcacaagctaaccttcgtcctctttgatggactgtgcttcacagatgcaaatcccctcaaacatgtttgttcaggctacaggtcgaccgtcctatttcttgcctacctgtattgctgttagtatcgagcacagactgagtaacgcttgcctcatgaaccaacacagttgacgctttcattttcttcccttctctcattgtctgaatcgttagctctggggaactatctcaatattgaccggtatcacccataactttatcggagcgctcctcactcgattcttccttggtttcgtcgaaggtatgtattactttctctctgccctcaacagactttcgcatacttttgttctaataaagttccatctcttttctcttattcagccgccttcttcccgggtgctatctttatgctttctaagtggtataagaagagcgagcttggagtcagaaccgcaatcttgtactgtggtagtttgatcagtaacgctctaggacctctcatggctgctggtaagtcctgaaatccaccttttctcatcgtttctgtctcaattgttgagatgtttgctaatttattcatcactgttcctctgtcatgcaggtattttgtcgggaatggagggaaagcttggacacaaaggttgggtctggttgttcttcatcgaaggcgccttgactgttttcgtcgctgtcatcgctttctttattcttcctgatttcccgttcgtcctagtcctgcctgcgccttgcttcagcaacctctagatcagtttactgacacctttcattatcctgcctatcggcttacagtcataactctcgcggatttaccgaggaagagcgggcgttggctcagcttcgaatgaaggaagattccggtcgaccggatggagaaggaggatcatccatcgagggactcaaactcgctttcacggattataaagtctgggttatggcgtgagtgttctctctctttctctcttcctcagacacttttaaacattttctgtattgaacctcgcttccttctgcctttggttcactgttcagtctctcccttacggccatggtagttggactcagtttcaaccaattcttcccctctttgacccagactttgggttacaactccaccatctctctcctcctttgcgctccacccttcttcttcaccaccatctgcgctttctttgtcgcccggcattcggataaacttcaggagagatatctccacatcgttattcctctcttgttgggagtggtcgggttcgtgatagcgatggccacagagaacacggccgcccgatacgtttcaatgtacgttttgattcttcacagtactggtcacttcacgagatccctctcatgctcaccgtcttgtgttgtgttacgatcatgttgagaacaggttcctgatggcacagtcgtactctggctttgtcgtcttctacgcttggatttctgcctcgttccccaaccctccgatgaaacgagctatcgctatcgttcgtcctcttccccattgacccttatccttgtccttgtagttgcatgccaatactgagatccttgagatccaaaccccaaaaacaaaatacaacacaggctttgataaatgcgttctcccaacttggaaacatctcgggagcttatatctatccttcagcctgggggaaatcatatcttaagtcattcggaatctccattgcctgtgcgtttttcatttcctcttcctctctagcttgtacctattcttctcttccgtactgactttggtaaatcctctttctgtcgttgacgaatatccaaacgaattaggcttcggagcatgtatcttcggtcttacgttccacagatacacacttcacaaactcaaccagcggatcgaagcgaacgaggcgattgcggaagaggacaggccggcaggtcaggtgatccctcatgaaatcgatgttcccagaggattcagatacatcttgtagttctgagcgtctttctttcgtctcttgctgtctctttttttgcttatatgtaagggtcttgatctcgttcattccatatagttgtgctttcaggtcagactgggcttccttgtaattgtcttttccttcttttttttcgttgactcagtaacacgtgtcaacgggttgtataccatgactacagatatagaggactgatagggcaaataggcaagcaggtgccggagcagatgatccgaggcgtgtggtcgtgaagacaaacgatagagaagaccttgaacgaaacaacgcatacgacaaccgagcaagaacatatcacaacgagaacgaacaaggaggcggagcgaaagaaagcgcatataaccggacagaacatgacaaactgaatagtaatgacgtaaaagcccaaagaaccaaagaaccaagatgaaaaaaatatgaagagaaaaaaaaacgaaacaagatgagatagatatagagaaattatgggttcagaaggccggaggaacagctgatattgttttgttgtgcttcgttaatcttgtgattactatctaagagatctgtttttcagtcggctctgttgtcgccgctgacacatcggccttctcaggttgctctacccgctctggcccactttcttctttctccttgattcccagcgccagaccaagataccgatcgtcctccttttcctgtccttttttcaaatcccaatctccggaacctccaaattctgcaaagataggtgatgttgcctgtaccgcagcaagagctgccaaggacggtggtctgacgaacccaagagtgtgaaccgggggagatgggaaaccgacgaaggaagaagcgagatcgtggtcgtccgacactgtcgagtcgttgagtgaggatgatctagatcggtcggccatcaggtctttcggctcaccctgaggtggcgtgagaatgaaccctggcgcatggttttcagtcatgaggaccggtggactccaagtcggtcgttcagacagcttattggtctttttgtctgcaaatctttccttttgtccttccttctctgcgtttctgtcgttatcgatggctgtctgtgggttatccgtctcgagtttcgtgatcaacaaccgacctcttctcctctctgccttccaatccctcatcctcttgatctccccatctctatcagccttccaagatacgtccggtcgattccataacgtgctcggcaagataggttcttctgtggaaagcgcaccggcgtaggccatcgcgactgttataggcgcatgtcctctagtggttgacattcgatgggtataatgaacttccagatttggtccgacaaccatctcgccgccaagttgattcatatgaccagggttgagagtaatccctttgataccttgttttccttgttgagtgaagccatagacaagagagtgctgggttagaacttttacgtctctgctttcgtatcgaatgggaatctagacaagtggtgaaattaagaaggagagacagacgaaccaatgtttctcatgaccgaaagggttcccgtgaaggtagtatgttgtacgtctgatcaaagcacgagggaaatgaagaaatcagcctctttcaacgagcaaggttgatccgataggcaaaattcaagatacatacattctcccttatcttcttcaggtcccccatccgcggtttgtctggtcatgcctaatgctcgataaagcctatttcggaaggagaaagatgagagatgatttccatcagaacttgaactagtcgctcatccgagcggtacacgattcgagcagaagaacgaactctaaagagggatccgtgaataactggaatggtgatttgaagactttcttctgataaccatggatcacagtgtgcttcccgtttcctatgattatcactttatggaaaggatatggaagaatatgtaagaaagacaataagacaggctgttgaagaatatagagacatacatttggcacctgctcgttgaatggcctgtggatcaacctcacgaacaatgtgatacataaagtctgtaacgatgtattcatcaaacggacagttctattcagtttactttcagcaaaaagacagaaatggtccgattaccttgacaaagtggacagaaccaatgctgagcgtttgagcgcatcgaattgaacaaagcaggtaagtgatctaggggataagaggagagaagggaatgagattctcctgatgccttacccggatgaaagcgacgatagttctttggtcctgaatcagatctccgaaagaatgtgagattccatctccatcgacgacttcgcatgaaacggctgtattgaagcgcgtaaagttttacaattatggtctgtatgagaatgcttgctgatatccaaatacaggaggatgaaaagagtacgaacctttgaacatgtcttgtttcgttggcggtcgatccatatcgaacatctcttcttctaacctcttccgctcctttctctcctgctttgtctctttcctctttttctgtttcttcatcgacccggtcgaactctttctactccaacctttgcgtagccccaagccctctccgagcttccactcactcagaggctgaccctcagatctctctaagccaaactgtatatcctctggagcgtcgcaaagagaatagccattgaccgaacgacagctggaccccaactcgcctgggctcatcagatcccgacggactcgaaccggggaccaatcagggcttgaacttctgctcttgatagactcgctgatcgagtcttctactgaagaaagcagggaagaaacctccagacgccgggtcactgtcgatggagtagacgcctgagaagtctgtgcctcgaccgtgtcctgatcgccgttgtgagattgaggggataacggcaatggagaagacggtgtgacaggagctgttgaagatctgttttttggttgaggaaaatcatccggcctgacaggcacagtcgacgatctcttcttctttttactcttcttgtttgttatatgtctgggattggtgtcaggaaaaggaatcgatttagaggccgtgttcggattattagacgagaacctagctctgggctttgcggccttgcctcttgccgataatccgccttccgaacggaacttttgccctctaacagatttgtatttgttcgatttagacacgaagaagtaggagggcactctggaagcgagctctcgggcaaggatctcttcagcagagaccgatgtcagacgttcaggcacaaaaggaggactagagggaggtagaggggcaggtttacgcggtggtttgaaacgggcggttggcagaaagttagcaggcgtgatgggaggggatggatcggctgaattgggtacggacgcgtaaaggtcgtgcgtccgacggacataggcaaacgatttatgaaaagagtttggacctgctatttcggtcgatcggccagaggaggataaagtgattgggacaggtctctcgaggactgatataggcaacgggaccggtcgacccagtttcggcggcgagttgagagagaacgttgtcgaagggaggatgagggatatatctggttgcagattaaatgccattggtttccctatcggactggccgtctctaagttgtctccgtttgtcaacggaagctgggatagtctggaaagaggcgacacagactctggcgagtagggacgcgtcgtgagatcatctcgacgaccgaaagaagaatttatgtctattgagggaacagacggcaggagttgttgttgttgttgttgttgttcttgttgttctacagatttcgtctttatcgagatcggacttgcgtcagcttgttcggctagaagaaggctctcgagtgatctggatacggtaggaggtagctttcgaacgccttgggtagaaatctttcgaggagaacggatgtcctttggggaatctgacgctgatgactgtccaaccggacgacctgtttgaacgggttcggcagatgaaggactaaagggaagaacgagtgacttttgcctatcaaacgcaaccgctttggatatcgaaggcaagagagagtccgagtggacctgactggctgttccgaacgcaaagttgaactttgactgaggcggcggagcagacatggccttgaagataccagctgtgtggaaccttttcggacaaaactcgagatgcacagattccctctcgaaggacgagataggaagcgaacgaaggatgtgaacgtcggggatgtatcggtggttaaagaaattggggaaacaaagaggagcgatcgagacggaaagggggtgaggggtaagtgagagttcaaaaaggcacaggcacacaaaagaagaatgaaagtgacgatcagtccggaaatggccatagtaccttgctgcgctctctatcaacagacctgcaaacaactttgctagtgtcagtgacatcacccggtctctatagactccaaggtgtgcccgtctttcattctctcgagcccgacttttcgccgtggaaccagcgaatgaatttctccgaaacagattcgaatgtatatttgaatgtctccttggcccgcattctactcctatttctaacccctgattgtcggagcagactccgacgatttcatccaaacggctatctgcccttgatcttttttgagcctatgaatcgtccgctctaccgaatcccgcgttacttctgatggtcctataggcaggcactggagaagattggataaccattaaaagataaaagaattaacaaaagttatctaatcaacgccgagatgatggttattattacaaaacttacttctacgagtacacacatcctgttctctttcgcaaacctccgttcgatttctacgctcagacagcctctcccatctttcctctcactttcgtccctatgttcagctgactccgcgttcacactcatctatacactcatcgcccatgccctcgaaaacatttctagtggacctcgtgaccttgttgaaaacacagaatatttcttagtcccggacactcgacccaactaactccataccggaccggatggagcaaacggtccggacacctaggaatttcacaggctgagaatcaaaaaaggaagggagaatactcatctgtgtgtcatcgtatccaaattttctctctccctttcttcctctccctatgttggtctctctcctatttatagaatctcttttctcaaagatcaagagctacctttgaagatgggtcgtataagaagagaccatatctgtcggtctttccttccacatcactcacttctgttgtccatactttgatctcctgctctgttcgaaacacatcatgacacatccggccgtctactcttccatcctctccattgtactggttgccatatcaggcactcagtccaccatcgcttcggccatccccgatagttctctcttcagcccatcttcctcatccctacaggccagaaactacaacgagaccaatccaatcagtcaatcttatgactggctcactctccagtacttacagtatggagcccaaacagagggtttgatgtcatgtggtacgttttatatctccaactcaaataaaccgacgctcatcttcttcatttgcctcctctacctcctgtccaactttcgccaccaatcatactagttgttccacactctggtggtgaaaaagatgacacgccgaacttgatgggtactgttgcaagctgtggaatacaggatgtcgagatcgtattcgccaagaacgtgacgtacaacatttattcgccctttcagctggccaatctctcgaacgtgaagatctcgattgaaggaaacctgcagttctgtatgttctatccctgttgcgagcgatgtgtcaattcgtccttgacatccagaaggcactcgtcgttgaactcgtttctcctgcgccatcgttctcacagcggaaaaccgaacgctcatccagtctcaagtcgcaaacatcacggctagtactgtatgtccttgcgtcacctctcaatccgaacaccacgttcgaaaatctcctctttctaacctccgactttctctgccgcgcctgtcttcactcttcatatatagaaatacgggaaggcttacatgcagttttccggcgagaacgtgacgatcgctggatcaaaagactctggttctggctggcttgattgtcacggtcaacaggtaagactgcttttcttctctcgttctctttcttcactcagacgcaaacagttccttgtggttagatccgtgttgatgactgatctgtgtacctcttacaaatcagtggtgggatattgaatccgtcaactacacaaactcagctttatctgccaacagaccgcagacgatgacattcgatgtcaaaagtggtgcgcttctggatttaaagatttacaacaacatcgcttggaacgtgaaactgctgggttcccaaaactatgtggttagtggtataagctctcagatgcctaatctcattcgactattctctgcgctgactcctatgtcttatttgcttctcaaatgatgccttgttacttttaatagaacaacacctttacatatgcagtctccaatagtacagggtaagcccaaggcacattttctcagttttctctcgttcttgaaagaaatctcatcacgctcataacgtctcttcaggtatcctttcaataccgatggattcaacatcggtgccgaggatgtcttaatcgagaacagtgtcgtatatggtggcgatgatgtcagtcatatctcttcctttaaatgtccgccttcgttcattcaggctgatgattgaatactgtatgaaacgcgtagtgtgtggctattgcatcaggttcctccaacatcgtcttccgagagtatgtctttctctattcgtactgtttgcgaccgaacttgaaccccttgtttatgcgcttatctcttctattccctttccttacagcgcattctgccgaggtactcatggactctcgattggctctctgggaagtggaggtgcggtgtctaccgtagatggtgtcctcatcaaagacgtcaagattgaaaagagcgcgtacggcgctcgattcaagagttgggtcggaggaagaggttacgccaagaacatcacttgggaaaacatcgaagccagacaagtcattcaaccgatcttcatcacaacttcttattacgatcaacaggtcggtccgccgactgatcctggaaactcatccaccgaaattatcgactttaccttcaagaacttctggggagatatcgacagtttcgctccgaagttgagtgatgcgacttgcgtgactgatccatgttggaactatgtcgaaggtgccgatggttcccaagtggtcattctggatcttgacaagtacaaactcgtctctggtctaacgttcgagaacgtcggcaactttgtcgcaaccaaccggaagacgacctctgtaatctgtgatccatcccaactgaattcgaccgtcgtggacggtcttggaatcgtttgtcaggatggaccgctcgagtcgacttgagctaggttcgtcttaggaggaaccgcatgtaatgccagaagcgaagtgttgtattaattcattgtagtactgtttgttcttgagttgttggtcttcttcgcgtttgtcttgtacgcatcgccctggacattctgtgtatttctggtattctgtcagcggctatacatgatgatggttggagtgaacaagaaaccgaaaccctaaaagtaatccgcccctactattccttgaccttcgagactcgttagtctcatccgagcattcttgtctgttcccaatgtccgacatcatgttctctcacagctatacctgtcctgccatatttatcaactaaaaccttttatttctgtcttcatagctcatctctttgactgaatctgctctgaatattccgtgatagagaagaatcgtgcacggatagcctgaacatttggttcctcctcagctctcttcagattcgtctcatccttttccttctcttttccagactctgtcgttattcgggaatagacatctcccatcagaaagctttccaaacacaatcatgttttcttccttgttttcttcgtgtatgtcctcgtcttcttcctcgcccagcgcgcctattcagagagatcccttcggaaagacccggccactgctttctccacccgactgtgtcaccgatcgttcgcctcccgatgccgatatccgtgtgaaagggtgtgtgttttgtgagctggataagaatgtgccagcctcgtcagttatctatcaggatgaatcgttcgttgtcttcaaagatagaagtcagggtgcgaaacaacatctactgtgtataccaagagcacatggttcgtctttcctctcttcttctctttctccctctcatcctcgatatcagtgatctagttcattcgctcactacgggagagtcaaacatgtgttccaccagtggcgaagagtgtgaaatctttatcaagccgggatatacccatgcgtaagtcgatctcattcgtagactcgagagctttctgggaatatacgctaatgcgaacagcgttcatgtcagaactgtagtccagaccatggctgccctgtctttagatgcccttggccgatcgacatccatctcctctctcggacagacgaaactaggattccatatccctcctttcacgagtgtcgaccatctgcatttacatgctttcgagcttcctcacaaacgactggcgaacgttgagttcaagtcaacttggttgagtaaacccaagctgggtaaaggctggggttggtttgttgatatagatcaggtcagctccggtctctcttttctttttcttctcttctcttctctattttgccaacgcgatgtgtttagtccatcgcttccctaattttaggaggtcagaatcaactttttaaggacttgactgacgatcgtgcgcctcctttgaatctttgaaatacattttgtatagacgatcgatatcttgaagagcgggcagaatgtaaaaattaaaccggttcacgttggacaaaactgaggtcaataacggctccctttcattgttgtatatagaggtgtttgtgatgctattagagggggcagtatctagctcccagacccttgtttctctctctctctctcccttcctttaatttttacttgtacgtgaaaatgaattgatactataatgacttccgattacaaaggcatgaaccaggatctgacaaacaaggcgacagatgactaatagacagaggaacaaactaaaaagaacgaacgacagataaacactacagcgtaaagaacactccagtcgtacggaacaccagacggaaccagaaaaagggatgagaagtaaaaagaaaagaaaagacttttctttacttggagatcgcgccaacgacctgatcggtcacaactttttcaaccacgtcctttccaattacctctgccgcgcgcttggcaagactgatagtcttttccgcgctaggtagcgcttcttggacatccttcatcgcttggaccgacttcgctcggatttgatctgtactagggacagagatgttggcggcggcagcggccgttggcttaaacgccttggagaacaaaagaaggaggaggaaagtgtacgactcgaactgatctttaagcatgaagaggatccctgcgaacagtcgcaacagattaagaagaataaagtatgcccaagaaggacaagtcagcatcttgaattcctctacatgcactacgaatagaacgaaactaaccttgcgaaagaacggccttaagaatctgggcactcataccctggtaccatcccgtgaagccctgtgagaaagaacctgtatgtcagtatatgaagtataataacaagaacctaagagagtttttaattatcgaagctgaccttcttgaggtaaacctgcctcaaaacattcacagcatccccgtacttttccttttctgccaaattcttttgctcctcttctcctgtgactagctcagtcgatgatgtcttgacgacttgagcgtatgagacaggtccggcgggagattcattggtcggtctttcgatggaagcaacctccgagggtcgaggagcgagagaggagctataatcgacagaagttgaactaggaacaggaacttgttctgatgaggtggttcgagcttggagtcggactttggccatgatctgaacaaatttaagagtagcatagaatatgggcaacaatcaatacgccgggcccaatactcggtcaatcgaataaatttgacgactcacgtagggataggtaacctattgcaagcattccaatgaagaaatgtacaaggcttaacgacctgatccatttgaaggaacattaaatcttgacgcaaaaaatgatacgtacaacggtggccagactcttggaagtggctcctaccaaaaaggccatacccggagaaagcttttcttttccagtggatctcagagcggttcccttgatcctgtatatcgttgagcgtatggcctatcgttagcaaacttcaattagaaagggactatcagcagaagaaacatcgaggagaatcaacgtacctttcgaaggctccgtaggtgatagccggattgatagtcagaaccaatccaggcttgagtcctcgccaaagtccggtgattccgtcttctctaatgacctctcttccaacttctaggaagccggtcttgtccgctgatccagagagctgttgtctggtggcaattacggccacagggatggtgaaaacttgggcgaacgcgccggcaacggctccaaggaatagttctgccgcggttgaaagtgttggaggaactatggaaccggatttacgagcgagacgcttgaaatagagagatcggaccagagagtagaagaagaagtaggcatactctgttggcaaagaaacggtctgatcgtcagttcttagtctcgtttttgaattgataacgaggtgcattcatacgcatagagaatgtgttcaacatattggcgagaaacccctgaaccccggtcatgcgaaaatacacaagtcgtcagcctaatatcctacagaaaaaacatgatccttctgtgacatcgcttaccttgtagtaaccagcaattccctcttccttgagaaccctgactagaccggtgatcacatcatccgccttcttggatgtaacggcaatcgaactgctaacctcgccatctgtcgacttttcagaatgcgcgttctcgatagctcgtggttcatcttccgatccagccgcctggatccgagttttaatctgagcatatgaaaagaaacgaaatcagaatctctcatatgaactagaccgtaaggatatagccgaaaggagcacgaacggtgtcgagaggatagatggatctaggattcggttgtggccgtaaagtgcgtgatgaaggaaaggaagaaagacaggccgccgctcagcttttctcatcaaaccgactgaaatctgatgaacgatcagctcacgcgttagcaaagacagctccaagtgcacctgccaaagcgtgcctacgatggattcgattcacccgatgcgatcgaattagatcagccaagcgagaagtagtactaagtgatggttctgtccatagatagaactgagagatagtcccatggaacgatagactcacccccaaggtgaaagttctctggcttgtttagatacagacatgtaaaccttctgtttttcgaaagcaaaagggaaaggcaacagggaaacgatattggtggttgagaaagaagttgcaacccggtcaagagaacggaacgttgggcgactaccggcaagagttaatagccgaaagatgattagggttacgattacgtcagctttcgattacgttagatatcgacctgattacgtcagtcgctgattacgtcttccgttcgactacaaacccttcagcttcttcgaagggccagggtatgggaacgccctgtgaattgattaagcgggcggaatgaatagccatgaccaaggtttccctaaccaggctaggcccctgaccaacgacaagcccgatcgagtgtttcatcatgcttcctgtatgctcccattgttcttctagatttgtttcatagagcctttgcaggtatatttttctcccatgcacattgtctcgctgttttctctctgcttcgtgttagagaatcgatgctgtctagaggtttaccaaccaaaaataaacaccaaatgttaaaatgatagacaaaatgacatacatgggcaagacggagtatatcgccgagggaagaccattggggacctcgctgaccaagctgttacatctcggatgcgaacaatctagagatgactcgctgggatcttggacacttgggccaattgatggcgatcgggcacgggctcttctccggaatcggaccaatttgctcgaatcttgcatgcccgagtgatcgaccggcagctatttgactattactcgagtaatgcggaggtgattgaccttatcagaagtatgggttctcatacagcatggccgaccttggttaccaatcattgaggtggtgggaatctcacaggaactcaccgggcatcgagccttcaacgctcggtcagccaactatccagctagccatctggccaattgttcctctcctcgttgtatataaatcaagcattgggcaagatgaaagactcaacatcatctgctcttctcacacttacaccaggtcaacttcactcatcagcgtactcaagctcttatcatgtcgtctttcgacaatcaaactcacagttcaagccctgctaatttgatgccagcgcaggacacgcattcaccagacccctctctaagcggcacgatgatcggtgttgaggcaccgaagaagacagggttgcttcaagaaaagcccgcagatcagccaagggttctacctgaaagcccgataaagatttctcagctgaagaaatggtcactcctcgccctctt

SEQ ID NO: 1701 - DNA, 5095 bp, Xanthophyllomyces dendrorhous
atccactttgggttttcgttttgttttactctgttttcattccgatcctcttccttcgggtgttttcttctttccgaccaaccaaagaccataattgaatcagcggaacacggttctcgaataccgaacgagatgagacagaacagataccacggtgaatggtgatatatatcaagacatattaagcgaacgaaggaaagaggaatttaaaaagaaaacaaggttcgaaaaggtagactgtgtataccgaaacaaagacgacaagagggtcaagagtaagaataagaataagaataagaaaacgagtaagagagtcgaaaggagtggaagatgaaaaaaggactacatcatatcaacacacagaacagaaaagagaaaaaaagaaaaagaaaacatatttcgatatttaaagaaaaagggaagaacggaataagttcaaaaaagaatcacccaacagctataagatcgatcgactgatcggttgaaagtttcgtctctagattcaagatacccgacgtagaacatcgaacaatcaacgcgttcatctccccggagttctcccacttttaaagggcgtcgtcgccgttcccgtccctcgcctcggtgtaggcggaggaggcacacctgactttctccctttcccttgcacactctcctgtacaatcgcttctgataaaccctctatgcttgctcctacgcctgctccaacggctgacgtcaacccaagattcgggccggaggtcgcgttggacacggtggatgaggttgcgagggagagagctggattaagagaaacaggaccggttgtaggtggtggcggtaacttgttcaacgtgtctaccaaccgagcggtctcctctgttatactcggtttatctttcgaagccaatacccgtaagaatgatcgaggcgaggtcgacgcgactggtgatattgatgtggaagtgagaggctgattcgttaatgatgaggaaagtgaagtggaggtaacggtagtagaagggccaggaaggacggtctgagggagagaaagtgaaggaggaatagctggtgtggttcgagaacgaagagtttgtgtaagtgaagtgaagatttgatcggtcaaccgggtggtctcggtcgataggtgagctgccgtctgggtgatttgattcataaagtcaacctgatttttttcacatgaacagacaagaggatatcacaaatagaagtttatgagcacaactccatagatttccccagcgtggatggaggaaaagaggactgccacaaagaaaaggcgataacaagggcgatacctgatattctaaatcctccggcccgtcgatttcgacttctctctccaaaacctcccgaacgtattctgcgatttcggcattactcgtgtcaagactactgagatcgacagctgagcttgttgatttggtagctagagcttcacatgtttttgtttgaagggcgtttgccagcttgacggctgctgaccagagagcttcttctgttttccctctagtcaggagcaaggcgatgaggaagaagagaaaaaaccccgaaaagaaatgtattgaatacaaacgagtccgataaagcaaagaaaagctagaggttcgacatactttttgatgaatgcctcaccctcttgttcagcctttcggttcaagacattcccaggatgaggtcgggtcggttttgagagtagattcattggctaaagagaaatgaagatgagattgaaccgcgtcagttgatgctttcgctaagaatagctagaaagtgacacagggggagaaaagcaaagaaagaaataaacctgtgaactagacccctgagggttcgtatccaatttcgcacccatcaaagcctttaaaagcgcgtctaccacttgccccgcgatctcatcaccttgagggtttctaccgtcttctttccctttccctttccctttccccttcaacgtggttccaagtgcggaagcggtggtaagactgtcggctgtgaggcccatagcagctgattctcgatgacctaaaaagacaaggaggtgtctcattcgaatggcttctgggaactctccatcaatatgtttgtgaaacgcggatgtagggatcgagtggtgcggtgcagctttggagatagggaaacaagggttgacagagtaagaaacgcgtctcatgaaaaggaaagaaaatctgaactcactaggttctcctttcccaaaactcgcacttgctctctgacctctctttccaaacgagcttttccgactgacattccgcctcatttcctgatttcgtttgatcatcggtgtatcacttatctgaagtggcacggtcgtgtctccagtgacgtcctcgtaggtttcgttactattagatcgttgaggaggtagagaaggtaatgaatagtttgccgattttgagctattggtcgcgtgaagattctgtcgagttgatttggaagctgaggatgtattggtggaagtggacggtttaggtttggatgacgaggggaccgggggcggcttgatgttgaggaaagagagacctttgggcagttttgccttctgcatagatatttgtaagcaggttgaaaggaaagtatcgaggaaagagtcagtcgtcagttttgacatccatgcctgtatgtaaagcgacacaaaaacaagagcccatacgaacccctacgaccttgcttctctttgttctctcgtctgcaacctggtccaccagaacatctgacgtgtttgacgcgatctcgtccccagttccctgccttgaccctggatttatactactgtcatctgagaccacgcgccttcgtttaatatctaatctgtcgaatctagggggagaggccatggttcgggagaactgacgcggtgaaagaggaggggggaaggcattcgaggacgaagaaacgggaggaggcattgggtcttgggcaattggtatcggattgactagagtggttgcgtggcatcagacatggatgggttagatgagtgtcgtatgatagacgtgaaattgaatacaatcgaacaacagccccggagatggttgtagagaaggaaaagacaggaaagaatgagagagaagcacgaaagcaagacgcgtcgaaggaagggggacgtacgcttagacgccttctttggtttcaaaatcggtggtatcgactcgacatggttcatgaacgatatatcgtgtgattgagaatgaagcgcttcgataggaagctgaagaaagagtgtgaatatacgaggtttatccgtcagttggtttccgaacgagacgagctatgaagaagagttaaaacatgagaggatctgccaaagcaaggcaaataaaaacccagaccaacactcacttcctggctagcgatccttctcttgtttctagcagcaataccaaacacttcttcttctgttgcatccaaccctgggagtccgagaccgacagaggaagcggaagcttgggaagcacctgctatcggacgcgacgaggctgaagaggaagacgcgatgggaggagccaaggacggaagcggatgactgcccggtgagttctctacggacgaatctgaaccgttcgatggtctgtatgatgttggtcttctggctgccatcatctgggactctcacaagctgtggacgatgctggaacgagtaccaagcagagggagtgtgccaaacttgatgggatggccgttctgggttgaaggaggcaagagaacgataagaaggcgggctacaacaagggaggctgtaaccatacatgtaaccgccttcgtaaccatggtcattccgcaagggaacaccctctctttccatccttggtttgtgtgtttggtcaggtatactgatatgtttgcgcgtacacgatgaagaggaaggagtggctcagtgagcgggtgggtgcatggcaactggtgcttgggagtaagtgcatgtgagggaagaatgttgaagagaaatgaaactttacgactcctcataagctcacacacacatacacacacatatacagcagtactcttataaagtccttccagaagacgttgttcccatgctggtcttcatttgttgcgctgtgtgcgttttcaaggaaagcatgggagatactatcaagagtcattcatacagattcgtggagagaagacactccattgagatgcttgattgaccagagcgagtgtagatataaaagaaagactgcctccgacatctgacgggtagagaaacgagtgagcaatcagaccatcagctcatattccacttggccatccgtactggcgctctcatacacccttctacgttcgctacagaacatgctgagctccggacatggcaaaccatccagcctcggggataccggattcgatgaagggatggccgaggtgactgagtgatcaaaccagattgtgttggaaatcagccagtcctatttcaacccccgaggttgaatatcatacaccgtccattttcttgatgctccctccccaacatactccgacaatctgtcttctaattaaccctttccttctaccttctctttaactctgtcacgtttgatctaactactgtccggcctcggtcaggaattatacattctgacggcgccaagcccgatagtcgtgtgcacaaggccggatcggacgctgatatcttgattgttcctaacctctcaaccccaatgtgtagagagcttgtgctaacccagactttgttccttccccattcatttctgtgaacggtgaccgagatatccgtcgtttgggtctctttccttttttggtttccgttgtggacagtggacaggtgtatatatactgatgcttttcgtccgagagtcagatcaaaggctggccgtccacacgcaagactcgtcgttttgatcggtcgtacatccctctctcgagaaccgcttgcgaacatggacgacttttcaccatctccatccacgtcttcctctgcccgttcagtcgacttgaaacatcaaaaggacccatcttcaggagagggcgctagcctaccagacttgatgcctgaaaaccaagccaagctttcccagctgaaaaagtggtcactcctcgccctctt

SEQ ID NO: 1702 - DNA, 1221 bp, Xanthophyllomyces dendrorhous
ctcttcaccgtcagccgactgaggactgacatatgttgccatctgacgatacgctcttcccgatcaccagcttcctcgccctgggcatcctcaacctcgtgatctccttcctgcccgacaaatactccttcttcgtcctccgcgcgatctccggcatcgcaggcgcctgcctcatcccggccgcgttccggctgatcgtcgccgtgttcgagccccacgagctcggcaaggcgttcaccctctacggcctcgccggcgcactcgccaacacgaccggcacgatcatcgccggcttcatcgagtacatccccaacggcggccagggcgaggcctggcgctggttcttccgcatcctcgccatcctcatcatgccgctcgccatagcgtcgctctacgtgatccctgcacccaagggcgcgatcgccggggcagacgacaagtggaagcggctcgacgtcgtcggcgcgttcagcatgctcgccggcatcgtcctcctcatcctcggcctcaccctcggggcgtcgtacgggtggaagaaggcgggcttcctcgtgccgttcctgctgtcgtgggtgctgatcgtgttcttcttcttctgggaggccaggctgtcggacgtgcatgcgcttctgccggccaagacatggaggatcccgaactttgctgtcttcattgcgcttgccttgttcatctacggatggtgggcagtcaacttcctgccctttgtcgagctattcgtccaagttcaccatgatagagctatcatcgccgccattcgactgcttccacaaggtatcgctggtgcaatcatgactgctgttttgaccacgtacccgcaacttacttcgaacccgagatggccaatctcggttggtttgatcggcggttcgatcgggtacatcctgttcacccagtcaaaaggagacattgttggctctggctactggcgatgggtcttcaccggtggcttcatcggtagttcgggtaacgtcattgctttcaccggtaccaatgtagccatcatgacatctgtacctccagagatgtctggtgtcgccggtgccgtcctccaagtcgccctccaggtcggctcggccgtcgcgctctccatccaggccggcctgttgacgatcaaggaggggaacgtggataactttgagaacgtcaagatctcatggtactttgagctgggatggaacttgctttggctcgttgggttcc

SEQ ID NO: 1703 - DNA, 39365 bp, Xanthophyllomyces dendrorhous
gctttggctcgttgggttccctgcgctctacaggccggtcaagaatgatgtaagctcggctgaagatggagcagagcaaggagtcgaggtcaagtcgtaggatctttggaaggtgcctcaggcgaaaaaatatagagttcttgttataatatatatatgatgcctttaatttgtctatcaacgacttgttctataaagatatctgtgaaccaaggtgctacaaagtttcttcacagaggttgcgctctctacattttgaagagagaaggtatgtcgaacaatttctggatgaatctggtacgcaaccctaccacgcgacgatgactaagcatcaagatcttctaccactcctcttccaacaaataccctatagagcctcataagactcgaccgccattcgatctccttcttttctcgacatgtctgatagatctcgctcggcttcacccagaagacagtccaaggataaatctcgctcatcaaggcgcgatcgagacaaggatagggacaggtcaagggataggggtagggaccgttcgagagatagatctagaagtagagagagggaagtcgaccttcaacaggaatttggggtagacgagttgtcggaggacgattacttgtgagcaatctacatcctctaatcagcccaatgtccgatggagagctcaccgttcgtctgtcgatcaactgtccatccttgggctagtctcaaatcagcagagttcagagtgtggctcaaagaagaaaagaagaaggtaagtccattttcgtcatccatccttcgtatctccagatgggttctgttcaaacgttactgtttatgttcgaatcacatctcgactcccgggatgatagtatctcgatcaactcgccggagatgacgctcggcgatacttcaaaaagtttgtcaaagcgtggaatcgagggaaactagcaagtgggtagttgttattggtactgtgtttctgctcggtacacactctcacaaacttgcgaccttctggtttgaaacaaaggatcattctacgcaccgactaccgcgacatctatcccatcttcctctcagacttcctacaagtggtccttcgcgaccaatcgatccaaagtggatactaccgcactcacttctgccagactagctgtcgacagcgccacaaacctgtccactttcgccgtttctggcgcatccggtccggagccgtccaggtcgagtggaggcgggagaacgatgggaccgatgattccaaagtcattcgctatgatggaggctgatcgaacgttcgagagggagaccgagcgagatagggagagagatgagaggaagagagagagaaagtctgcgagagatgaagagaaagagagtcgatctggtggcagagaaggccggatagagaaacgaaaagagtcagtcggttcatcatttgcgttcctcttcctttccaaatccctccttcgatagggctttgaaacaggggttctaatttttttccccatctggtcgaacctcaggacgaatgcgttcaatcgtcagatgagagatcgttcacctggaggactcgaggtagatgaatctacgttgatgggtacatcaggtaacgatgatttcgccgcaaagtatgtcctttcgtttttctttccatcaacatgttttctcactgaaagagaaacgaaagagagtctaacgggaaagacactttgacgcaatctccgaatgtaagaatcgccgctagggataggaaacaggcagaggtgaacgaacgtagggctcgtcaggccgagtctaaaaaacaggcatttgggacgtcgtctaatgcaatggccgagaaaaacaaaggtttgtctttgtggccgtgttgtgtcctctttcttgttggcttattgctcactcatgatttattctgaatatactgtattcgtttggtttgagaatcaatcagccacgatggctatgttccaacaaatggccgctcaaaagtacggggctggaggaaacatttgatgaataagatatcttttgtcagtctctctacatgcccgcaaggttctgaggtgtatatctcctagaatctcgaaacacatcatctcgcttgtctatattcagagattttgccagtcatgaaaggttcatcaaggagaagcagtaaaaaacaatataagcggcaaatacaaaacatgatcaaagatcattgacacaatcacacctggctggcagccagttcaagcagaagggtcgttagccttctgctgaacatatcctttgtcatgctacagaatttccagaacaataagattagataacatgtattcgtttctttacgatgacagacgagagagacagacaggcgctaaccttggcttgaccctccagctgctgttgcttatcgcccgtcacggcgcctgtgaatgatgtcgagccaaatgccggaaacccgagtcattatgaggttaattttcaagttcttccagccaaagtccaaaaaatgaaagatattcaaggaaaagaaaagcaagggaagaggcaaagtgaacgaaccgacgatgttctctacttttccactgattcgatcactcgtaccctccacgtattctttggtctgggcagctttgatttcagctgattcgcagagagaaagaaagaaagaaagaaagaaagaaaggacatcaatgtctgtactcagaatcaacacatggctcaagctatatgcacgagcacggtgtagacacacgcgaccagaagaaaagaaggaaagtgatctcgtaccttcaccctctgcgtgctgtttctttccttcggcaatccacgacgatccatccaagccaacagcgttcaagccagctccgatgacggactctttgatcgttccagtcacagagttgatctgtcctgtggtctggttgggttcctgtgggtgaggcgagatgaagatgacgaatgtgtcagatagcaagattcgttatcttatctgatgcacgagacgctatggaaaaacacaagtacattggtttgagaggaagcagacatcgttcacgagtgatgcactattgatagattgtgttgatgggtggcaagagggagtatgagatggttgaatgtgaaggagcaacccccgacacatagaggttcttatactctcgacaatcacggatgtcgtcagatgatcgcttgaatgtgcgtcatggcgagactgagcttcagaggattaagtgctacgctacaattaacatgcacgattgtttactcaacatcgcagttccacagatgagaacaatggaaaattcatggctgctgagacggtaagagacagatagatccattgacaaaacgctcattctgatagtttgatatcccacttttccatcgactctccaattgacggacacagatccgccggtaggctatctgcccagtcttccaaaaacaccgaccgtcgttcatcctcctctgcgattttgaattattgacattgtcataatgtcgattgattcagagagaaaggaaaacatcagttgatgcattcgaaaggacggacagacgcaaaaacaaagaattttttttaaagactaaccggcctcccatttcctcataatctcttgccatccactcactacatgttctctttccctcctcgcactctctctcctatcaacctctaacaagagcgcaccaaatgcttccctatactgaatgaatgacgtgttgagatcttcgactgactgaaactttgattgcaggttgggcaaatgagctgatattatcgtttggtgagcggctttgtgttggtttagagtcggagttggatctggaaccgtcagcgggtggatggctataggaggtcgcaaacttgagctgggttgtcaaggttggagagaagtaatcgagaattagtagggacggattaggttgtgaggctttcactctagcttactcaagacgaatcatggcttgatgcatatgttcgatatcattcaaaataagcggcagatgagcggtatcctccatcagaactaatcgttcaacaaaacaaaataaaaagaaaagaaatgaaatttcatgagtatgattaggacacggtgctttcaaaagttgaggtcaaaaagatcataccttggagttcttcttcgtcctctactccatacctaccatcgtcccgtccatgatctgcctcgttctcccagcctgcctccttcatcgctcgggatacctgttcccagtgccttgttagaccatctatctcttgctcaacagcctcaacaattttgcttcgctcagctttcgtcttccgaattattgtctcgatttctcggtcggtgatcactttgccgttcaataagatgacggcatccgtcgaggatagaaccgagcttggtagtgagagaaggacttccaattcggtctcgatcgcctcttgttcaagatccaattcgtcaacaagccggtctagaccttgttcatcaataaaatcccgtagcgtctttgatttctccttcgatgaaggtagttcagatgccactacggaacgggtagatgatcggtcaagattgtccccaaataaagaagaaagcgagctggatgaagctactagattctggtgaatcgagggaggaacaattgtttgggaaagagacaacagagtttgagaaagggagagcaagagatgttccctggtctcgttcgctttctaaatacgtgtgaaccggaagactcagtctcatctgtacatactcccgcacgcacactgcaagcggaaacaactcacctcaagctctccgagcaactgatgattttcactttgcatctttatcgagatacctgagaggacctggatacagagtagaaaatagaatatcaatgatgtttcacagaatttcaagaataaaacgtagcatacagaccgagagctgatgttgcctttccgccttggtcgctatcgtctcggcccatagggaacacccttggtcgactttgtcgcgcacgagaagaacctgggaacgaacatgctgagcttgagaaagtgctcgtttagaggttagcacgagatcgagcaggctcgtctgagaggacatgttgagttgagcttgatgtttggagatgttggtgatggtgatgacgacaaaggtgacgaaagaaaccgagcgagtttgaatttatattgggaactgaccgaacaacatcaatcactcatcgttcatcacctcacttcacctcacctcaccttctctgatctcatcctgttctctctttattcttcttctttctcctcgtgaaatgaacggtcaacttccagaatgttggggacacagaggcgcctcagcagagtttccggaaaacacattcgctagtttcgaggccgccatcgccgaaggcagtgactgtatcgagagtggtaaatactccttccttctcctctctacctctccctagtgaaactctgacatgttgattttgatttttgttcacgttctgcgcgcctctcatcataccagatgtacacactacatccgacgaccgaatcctcatgttccatgatgtttcgctcgaacggacgactgatggatctggcattatcgccgagctgccttgggaagattgtatcaggttcgcacgttcttccttcagtttcaacgttcaggtctgctcaccgagtctgtttctctctatctgtatatatgtagcaaagtacggacgttgaaagctcctcatcagccaattcctctgtttgaacaagccttggacttattgatgcggccagatgccaaacatatcaagttcaacgtgcgtcagagttcattggtcaagcggcaaaccggacctgctgaacacttttgactttggttgcatgtctggtcgaatataggtggatatcaagccctcgaacgaaccagagaggttgtttgagctcatggccagacttgtcaagtagatacctcaccttggtccgtgtttcatcagatagagagatgttgctcgactgacggaagtcaaactggacatcaatcaggaaaatacctaattgggaaactgatctcgcccctagactcatccttggactctggtaatggtccttcgttgtcgtgttttgatatcattcgctcagtgcttacagcatgtttccgtttgtctcttccaacatgttgacaaaggcatccctcgttcatccttcccgccaaacgacacttgcctacagcgacccttatccatatcaccgcctccctttccgttgctgatgaatactttttcccacacgtcaccggattttctgtcgcgtttcccttgctattgacctctaccggccagaggtttctagataaggcaaaacaggaaggaaagtctgttggtgtatggacagttaaccgggtagatgaaatgtgtgttgcctcaaaattgggatgtcagtggattctgacggatcgaccagccatctggagaggcgtccgagatagagtctgtcctttctgctcttttctcgtcatctctcccccctcttctgggcttttcaggctgatcgccatcttttctttgtagcttggacaagactttgagtcgacttactcgaaagaagttcccagttctttctggtattccactccgacttactatctagtggcccatgtatgtctagaccacacttgattcatctttcttggtgcctttctatcccattcaacaagcaagatgctccaaatttaccaagcatgcgcgcttctgtacctgcgtgaaaacagaaacttctcaactactacgctcgaaagaaaatcatccgtttcgcgggtccgttagttcgaatcccatcccctgcttagagcatggatgttttccctgtacttggccgtctttcctttgggccctctcaccaagtcggatcgttcaaagatcactcgatgtcttcgaagaaaacatcagctccaatatcattttatccgcttctcactttttttcccccggaagaacactttagacagacttgcttctctccaaatttttctcttttctagacgcctgacctttctttatgttttcatacatctatacatacgtttcctttccttttgtcttcctgtctcctcttcagaaaacctgtattcaatcaataagacaggtccttcttttcaaacctgttctgactgttctacttgcagccacacaaaatgtgatagaaacgtctcattcgatacacaacacccttcaaccactcatccgaccgaccgacaaatctcccaccttcttcgcctaccacaaacgcgcaatataagacaaagtaagagaagattttcacaacgaaagctacacgaacctcccgttcgccttcgcccagttccgcagtctacatctgttactcgcccctactccatctccgcaccaactcgtctcctgataaaatattaatgatggtttcttcgttgcctccgagagatcgatcctaaaatttcagaagtctccctcaatggccgccgtctccagtgttcggtgtcggcgttgacgttccaaacaagacgccttgcgggggtggtcctccctgaggtccgtttggcgggtaaggatacacatgtcccactgtttattcaagacacaaaagaagaactatgtcagcaaagttctgatcaaaggcatcttgacgtggagcgtcgacacgtactttggggactgatcatttgaccaggctggagctggtagtaacccatcggagcgtttcgcccagatccgttagcgaacccctggggctggccatatccagggtctggaaagagtagaacaagaaggcaggaaagaaggaacacaaaaagtgtaagcgatttccattgtctcaagatggctcgctcctacaaagcaaagatggaaaaagtaaacatagacgactcacgaggagcaaacatcccctgggtgccaggtggcatgcctaccatgactggacccattgcgtagggtggtccacctgcctggacacccatcggaggcgggaattcacctcgacctcctccgttccccccatttgttccgtttgagaacatctgaggaagatatccgccagcaggatgcattggactagttccttgagcatgagcgaagccagcgttcccttggttgcccgggaatgagccagcagctccattgatagacattggggactgacccatctggtaaaggacgtttcggcaacgacgatgcacgatgaatttctattagtaattatagatcaaggcgaacagattcttttatattttcgtttctaaagatgaaacgaaatgactaacaggaccgttgaaacgatactgagggtagtagcctgagtaaccaggagggaacatctggccctgctggtgttgaaggtgagcatgcatgtgtccgggcgaagagcccatgtgaggggtcatgttattgcccatgcccatgccagagtggggatggccgccgtcaggatggaattcctgttcaggcatagtgaatacaagagggaacagtttcttgtatgacgtcccagggaaagaccaattggaggctacaaacaagattatcacaaaaatcatgttgacgcacttagttcaatcagatactcaaagagacatcaaggctcaagaaagacttacgataagtactaggcaaagagagcttagacaatcgatgcgggttgaagtcttctcgaacattgacaggcaattcgaaccgcttcaacggcttggtgccgaagaacgggttgggtgtcgaagatactgattgagaggttgaggctacaggttgaacgggagataagctcggctgagcaggcaacttctgaagagactgaggtggaggaagctgaatttgagcagctgattgcggtttaggcgtctcatggaaaggaggctgggaagaatcaagattgccgtaagaagcgtatcagctcatgaactcaaagcgcaatatttagttgatccagctgcttacgatttgtcggacaggaggggatttgacaggagtagcctatgagaataagaagaaatacaagatcagttcgtgtccggtttcatttcgttctttggtcgtggagttaacatacaggacttggcttgaacacaaaggttggcgcgttagcgttcaatttggccaatgctgcttggctcgaagtcgcactgcctgtcggagatccaggtacaggaacagtaactcccagtgcggattggctcgtcgcgagcgtgctactagccgctgtcctgctcttgtttggattgaatgggggaatgtctgggatgaccatcccgcctctgggggaagacttggggggaatagccctaggggactgagtagctgtcggagggtttgccacaggcgtcaccagagaaggcacgatggggttcagaggagaagttgtagatttggcagatggggaagcattggcggtcgtctgagctgctgtcttagctgctaacgcgtctgcagctgccttctctactatggctttctgcttatcggaatccttggctagaatagggactaaatcggaggggatggccgttttgagctagaaatcaaaatcattgttggagtacgacaggtcattagcctgatatacacgatgaagaaattaggacatgctgaaagaactgaaggtgctgaccttaaaatcctggccaaatttgaccaactcctttagtctcttatccttctctgtcttcgctttcccctctagctgcttcttcttctgctccaacctttgtcgatctgacttgacaaagtcatggaatgcggaaagggccgacttttcaacgctctgaatcgagacaagggcatgagatcagtaggacgtcagatcatactaacttgagaatcagcaggcaagaagtatcataacttacaggactatcctccgcggacatcttgatggtcggatttccctgttcagctgttccaacattaggtattttcagcttgctgggctcctccttgtttcctgcagaggtgtccgtcttgttcgctacgccattcttcggagcagttaaagccgcaggggcagcacctgatggggcagggacagatggctttgagagaggagcgatagggggagttccagccgagggtcgtcgtgcatttggaggtacgtaagcgttggccgaccggataacgcccgagtatctgaagcagagaaggtttacataagatcagaagcgaatagactagatgataagttcggcttggcaaaagaggctgatagccctgcaatcagaaagtatgaggcttacttctcctcttctcctaaggtcgagtcttgtacggcctggtttcgctcttcctgcaagtgcgggttagaggatgtggtctacatatgaaccggatagacgagatgaatgttgatcagtaagtggctcgtaaagtctatttcatcatgcttgtatgttctacctatgacataagagaagaaagaagtagtatttacccctaagatctcgtttgccagcctctcggccttcttctccctttctctgtagtcttttccagttcgatcaagcttcgtagtgtagaactcttcatcaaagtctgtccgagttccgaaccttttttcgttctctgcaaattgatcccatgatttcttgcctccaccgttgtaagtgccgaatgtctcgaggtcagagtccatcttgccggtagtctgaacaggcaaatcattagaccagggttgaagagttcgctcttctccaaaaggggtggaatgagagatatcggtatctgttcggaagccttaatgatggaattcgcgcaacgatgagtcagtttgaagaagatcggcgatgacagtgtatcgggctatctgctagcacacatccaaccacacgagatggaaacataccatctttgccgcctctattcaaactacccgtagcagatccgggaggagtgatgcctgatgccagtgccttacgaacctcgctcacgtctttctcggggaactccatctggcggttaaaagcgttgggaggcatgttaacgtccctgacattcctcatgatcacagtcctgtcagagttactcccctcgcctgtaggcgtaattgattgaagaattccctcatagataattgacttgtgggtcaatgcgattttggatccctgtatgagacaatcgcaggggtatgcgtcgagagagacatcaacagtatcagtttgtttgtgtacaaattataaggtcaagacaatactaacgatgagctccgtgaggctgggcgcagagatggaagaagcagctgaaggaggccgagaccccgacgagacaacagctgggtcatccaatactgcagacacacgaggggcagtcgtgggagcagcagacggtgtggaagagatttcggtcacaggtgctttatcgacagaatttggggtggcttctttctcgtttgtgctgaatgatgccggcgaggccgcagaaggcatcgatgatttggaaggaggaggtgtaggattagaaatcgtgggagcagccggagctgaaggtgacgaggcaggcagagagggtctcccagcgttcgcatacgatttgaatgaccctgctcccccggcggctgacgcgaacgacataggaggtcgagcaggacgaggcccattagcagacgtcgttggtggtggcagagaagtattcaaggtctgttggctagaactgggagtggtaggctgtggaggatttgctggtcggaatgattgacgacttgaggtgattggatcgaacagggcgaacaaaggaggaacacaacgaaaaagatgttcgcaatagagaacagcgaagtcagaacacagatacgaagctgcaaaacttccttctcccttgctgtctccagctttggagtatgtctatatttgagatagctctacttaccgttgctgaccagggggagctggagatgatacgtttcccccgcctcctccgatcgggccattaccgctttctcgtctcaactttgcgttcttgatcgacatgaaagatgtatccagtagatttggttatactataggtttgaatagtgtcaagggtaaagcttaagccgcaaatggctttgtagttgaaaacaggaggatggtatcagagagatcacacaacgactaggactgtgatctggaaggcaaagagaatgaagatattgttgagtatgaggtctttcgagattagaatggatcctcggatgcctggttggggtaaagcacatacctgaagatgatgacagaggctgaggtattgaaagagagatccttcgtatattacctggtgtgtatggtctgagatgcccggcgaaaggatatcgactgggactcgatcaagcctgttatgacggtttgtctgcatagaaaaagcagaacaaaggttagccagaccaagacaaggccatgatgaacagagaccaacatgtgattgatccagcaaagaaaacgatgccaatcggacatgtctagcggacctttgagatctcgagatggccggaatgaaagaagaggatgtttatgaagaagagatgaacgctcccggagaattctttgacactctatcctagcccaaccagagtacacaggagaacaaagagacaagaaggagagctctagaaggcttggatactcaccaaggaaacgaacaggagtgggtatgttgaatgtaaaactgggaatgatagaaagaagagaagagaaagagaagagacgaaaggaaactggaggaggctcattggaaaacaggcacaactaggcacaactaggcacaactaggcacaactaggcacgcgccgttccattagaaaaattctctaatcgaccattaggaaacccggttgactttttctaatggaacactcgttttccgttcttacatccatccgaacactactcacgccctcgaccatcaccatctcatcacactggccacttttgttgaacgtcacataccttgcacacatcaatggagcctgggtcctactcgtcggacgatttggtcgtggaatctgttcgtatttcgtggaacctgttcttcgtatctcatccttcatcgacccaaacttccgttgtctttcgggctgatacattctctcgtttcctcttaatgtctatgtttcattgatagaccaagttgtcctccgatcaggctcacttatatatactccaatttctatctactgcagaggaagcgttggcacatttgtccatagtgagtttaacatccttgttatcgatcacagtcaaccccgtgtcctcgcaggcctatctaacgatcacacttcgcaacgcattcacccatctcttttgatcaggatgagattaaaccccaacagtccaatctcgaaactacccttcttcagattctcacatcaacatccccagcaccaggcagacccatccgaaaccttgcagccagatgtctagttctccttcatcgagtatccgagaaccgaagcttgtttgatttcatgagagagctcctcaaggtagcatccggagaaagcacaggaaagatcaaaggagaagcgaataaggaagtgcgagtgtacgtctacagtgttttgttatctagaagatatatttagctcccgtatctgatgttgttatggtcataatatacatgccattcagagcatgctggtacgtggttggagaggtgatgagggagttgggcgaaaacaatatgtcgtttatatcagacatttgtctacactccatcaagcttctcagagcatcatctcacgtgagtctatctcctttttaggtaattcaatctgcaagactgactcctaattctttcaacagccggtcatcttgaggtataatgccatactcacactcaagaagtcatttatcaaagcgggtaaggccgtctcggaccaggcagccagagacattctcaaacagcttcgaaatggcttgagtgacaaagctctgagtatccaacgtgtctgcgctgatgtaagtgattgttggcaaagtatggtcttggtgttctgcacaactgaccggtgaatcgttcccctctcaaaacctagactctactcacgattcttcaatcaactcctttccttagcaacttgtccgagatcgagccgcttcttaaccaagcgataaagtctctcgatacctccgattcacctacgcgccgctccatcgctctgttgattgctcacctccttgcttacacacaaaaagaaggctccgccccaccaactgttccaagcaacaaaaagaagtcttcgactggaaacaatgacaacgacgaggaagatagccggcccgcccccagctcaacatccgaagcaaacaagacacttttcactctaaacgagatgttcaaagtcctctctgtgcctttcaataaggttggcagctcccgaaaacttcggaacacgttgatcgaggtctatgcaaccttgtttgctactcttggttcagactacgtagaggcgcattatccagagatatctcgacaccttcttatcgatctgatctctcactcgagaaactcgaccaatacttctaggcaagagatcttacttctccggaaatctgtaggggtcttacttcgagttcagattggggtccggctcttgtcagagcaaagtcagattcaagccatccgagagctcactacgaactatctcaaaaaatacccatcgatgcctcccaatcaatctgtgccccctcctcctgctggagttctcgtacctgtcttgacagaagtcgcaggattattggatcagctcggaaacgcacctttacctgtccaggaagtccttctggaccccttgttcaggttgatcattcatccgtctacagccgttcgagtctcagccgcttggtgcttgagatgtttctgccactcaactccactgaagctcgccggtgtcatgggaacactggtgagcgagttgacaaaggagattagtatgtcgatcactcctgtcgctccgtccgacatttcgataagaatgattggtcactcgactgccatctcagctcttgtagccatcatccccgagaggccactctatgtctcatacgatgtctcggcaactatcatggacttagcaatctcgttgttgaaacgtgcgggcgagcacgatgttgcgctggcgagcgtggagattcaagtggcctggacactcattgggtcactcatgacgctagggccaagctttgtgaagttgcatctgcctcaactgctagtcctctggcgaaatgcgctacccaagccaacttcgaaggattcttcagtcggttctcgttcaccatccgagtggaaatttttgttagatgttagggaagcaacgcttgcctctatgctttctttcttgaggcacaactatgtacagctggtcaatctggatgtggctcgaaggctgattgccctcctttcgaacactctcactttcatcaactcgttttccagtctgcactccgaagcactgagagaccagcctatcccgactctctcgactacccctcctacatctcttagcttgctcgaaagagaatccaacttgcgtcgacgaatcttccaatgctttacagtagttgcacagagtccagcggcagagtccctccgaacgaccttggtaagcgccacacttgaggtatttgccgagccggaacgatatgctggatcagcagctcaggcggcaattgccgctagtgcaggaagctttgcaggcgtttgggcggcagtggatggatacgcgtttggagtcaccagtttggttaggggtgacgagttccctggtgatggggaaggggaagaaaactcgaacaccggaagaagagtgagacgtgctacggaagacaatggattgcatcgagatcaggtcgaggttgagatctccagctcggtatgtttgctattagtcaagtgtcctgtgaacaaccctttgactcaaatatctccggttttcattcttatccaaattagcttcatacgccaattctaggatcgttggaatacgatgctttagagctttgcttttcttcctcctctgacgcctctaatctagtatctatcgaacagccgttaccctcccctgcaccagctttgacttccgtcgtagacgccgccatcgagttgtttgctcttgtctttcctagtgaagatgcagaccttcaggcaaagacgatatctcagatggtcgttcaagtcaaatccactaaactggaaaagaatccaggacgtaagatggcagtgtttgtgaactctgttgaggctctgaggagaagtttacgaaatgtcgtcaaatcagggagaccggcaagggatgccatgggtagtttgaaagtggccggagttatgaaggagttactgcaggtaactctatttcaaaagcctgaacctcataccacgacatcacaaactgatgatgttctcttcttttcatatcaggatgcaattcttgatagtgactccacgctgagatcaattggaagtgaaggcattggacgtctaagcagtcttagtgcaacgtccttcttgaatgctcagatccaatggctcgtagatcagattgtcaacaatcgaaaccccgaatcacgggctggttgtgcgctttcatttggcacaatttatacccacgttggtagtttgatcggtggtccactcctcaagacaatggtcaacatattaaactcgcttgcgaacgatccccaccctgtggttcacttctgggctttaactgcacttgccaaggttgtcactgcttcctcattatcttactctccttttatctcgagcacgttaggtcagctcgtgaacatctatctcacagatctgcatgagcccgaagggggaactctcaacagcgtcaatatccgaggagatttgcctgcctatcaggccgtctgcaagattatcagcgccatcctcggtgtgctgggtccagaattacaggaggctggtactgttcgctcgctggcattcatcatggtcaatgagttttcactcgaactcgatgaaggaatctcggtagaggctatcaaatgtcaacaacagttcttgatgtttgctccgaaacaagtcgatgtgcccaaattggtcgcatccttccgtcttcaccttgcctctacccgacggcctctcaaaattgcttcgattgatgctctctaccaactggttcagagggatgctcctctgatgtcaaagatcggtggaaaccagcttgtagaagacttgtttgggttactggacgacgaccccagtatcgaaggcgttcgtgacgtgattctcaactggacaaaacagacttctgctgctgctccctctggatggatcgatctttgtcagcgaatcatgaaccgtacgacggcttcgcaacaggttgccctagccgacccatcgaacgcgcataaacttcaggacgaggaagtgcagtcgattgtcacatctgaagctggaaaagccgcgggaatcaggttgacatcgcggtggaggactcagctatttgcccttcagtgcttgcatgaagtcgttttagctgtcgtggcatccggccgagcggagcatttcaatttgtcaatggccaaacagatgggaatcaacccgaaattgatgctcgtcactcgagtgggagatctcatcaagaccgctttctcggcttccacagctcaggtgatagagatccgattgcaaggcttaactgttctcaaggatgttattcaagtgagctctgacatatgtcgtattcctgtcccatttcgcatcctgatttctgattacgcgtgtttcgatatctgtgtgttcgtagtatttccgagcctctccagatccggactttgaaggggctttgctcctagagcaacatcaagcacctattgctgctgcactcacgcccgcctttagttcagactctacaccagaagttttggcgagtgcaattcagctctgtgctgttttcgtcggtagtggagtagtgaaggaggttgagcggatgggacgtatattgaagcttttgacgagcgcactctcttctttccaaggttggtagctggtttaactatgcggtactgttttgacagaagggttatatcagctctttcgctaaccttgcttcctgattgcaacagatgcgaacatgacctcgttaggagaagtcaaagatctgtcgatcaacgctgcgatcatgctcaagatctcaacgatgactgcctgggcaaacttacagtcgtcgagcgtcaaacagacgtaccttcgaaacgttgttggacctcatcgagccatgctagtccatttctgggtgactgcccttcgagactttgctcgactacgaaccgatccggaagctgggcctggatcttcaataggatcctcggccgatccaatgacaacgggagtgggtcgagaggtcctgttgccctactacgaagcctcatgggcacctatcctacaagcaattgcgaccgtcatggactccgacgatgatgatgccccacttgtcagagctatggacggactcgatccaagcgagacctcgaccggatctataatcgtgtctccgtcggatggagatcgaaccgaaccgactacgaatttctttgtgctatacggcttggcattcgaggcgcttgctaatcaaggaggagaagccgcaagttatgcaacttccgaccgagagataccggtcccattgatcgctttggaagcgctgaggaatttggttggacgccggttctcaggctcaattttgagtcagggaccaatctttgaggagttgtgcacattgttttacagactcgcgatgacggccccgccagtcgctcaggcccggctcgtcatggttctcgcctcgtttgtcaaagactacgcctcgatcttgaacctgaacgcatcctcgtgcgtatgattttttttcttttcccttttagaagagaccaagtgattgaaccaagtcaaaccatggactgacgttttctttttgtctctaatggacacagaacggtcgaacaagaaaccagtcagctgtctcgttgtttggctatcgtgacgtacgttctacgacaggccgtgccgtctttgaacggcaaccctccttgtacgttctatgagccttgaatttatggatatgccatcgtgtggtgtgactgaggttctccatcatgccttccttgctatagattggagctcgacaactgcgttggatcggatcgatctgattaagacgtcgctgacggcatacatgaatattgtggacgtgttccctatcggtcaacgagaggagcttttgtgtgtggccatctatctttattctgatctgttgaaggacgagacatcgaaggcggatctggctggaccgacgatatcgatggtcaaaacgttgtgcgatcgggcgtacagcgttcgacaggctggcagtcagctttacccccgggttcttcacggattactctctgcttgcatattgcatatcgacgagatgagaggtcggtccggtccggtagcggtggcaaaagtgaggaacaacctgttggcgcttgtgttgttgatgacaggtctaccttcggatttgaaggtcggtcgcgcactggtcgaacggacttgtgagattattggccagaaattatcggccgaggaggacgaaatctcgatggccgcgatccagtgtacaaagacgttgtttgtgacttcgagtcgagggagcccggtggttcagcactgcgtgggtcagttaatcccgcacttggtgacgtacgttgcgagatcgcttgaagtgatggacgagccagaagctgggaccaggttcggagggttggaagaagtagtcaagacgttcatcagttttgtgtctgctctcggtgaggaatctcagagtcagtatctgtttcgtccgctttgcttatataccgtgaatgatttgatctagtttgcacttgatggatatgctaacgaatcatgtttatatcgtgggaaatgatctcgattgatggacggatagaaactcgaggatacgtagtgttactaccgacgttggtattgctgatgaacccaaagaagccgaataggatgcacaacacggtcgttcagcagttgctccagctagccgggcaatctccgacttccttccgggaggctacgtgtacgctcgatcccgaggctcggtcgatactggagagttcaatcagacagtctgttgaggcttcatctagggcgaaggaagattctgaatctggtggtgctgataagcgaaaggctgctcctgcgatcgctttgaggagctttgggtaaaagttgaagggattgtgattaactttctaatctttgttgtttacttttttagtgaatgtatttccttattatgtcgctattagttttatcatcatcatcatcatcattattggcaaaaatgtggtttgcatctaaacgaacaaggttgcaaacgaggtcgttctgaaaataaggcactctttagcgggcgtcatccaaggaacccatgacggcatacacctgtatcgatgtaaatgatcgtcggtggggatgggactcaataattcttatcaattgacccgatctttccgaataaaatgaggagggggaggaggaggagtcaaggggagaagaagaaggaaaaaacgccgaaaggaaaaacaaaaccaaaaaagaacccagtccgacctgagtgtcggccgctgaccttttgtccgcggcgtcgctgttaattagttaagcgattctttatctttcgtctcttaacatttcatgtgtcaacatattttgggaaagcaaactgccatgtttggacgatatataaagagggttagctcaagtccgaagaagacgaacaagcagcagccatcatcgcatcatgtgcagactcttgctcttcgtcggacagatccgaaacgaatccagagaatgaccgtcagctgtattctgtgtttagccttttataaactgtctacgacgtctacccatttccacacatggcacatcacaatccacctacgagtcgtgtctccgacactcacacatccaccaacatgctgtcttctatccgaagaggccagactcgggcaaggacaaatatctggcggttcaggaaccgcgtaggcggttggaaccaaattaaaatcaaatatacatcatctaagataccttaggtaacacatgaccggtagaattttactccctcgtatcctatcttttgccaaaaatattttctcgaccgaaagacaccatcctcccaccttttcgtataaagagggtagccgatcgagcagataacgagacatggatcccgatcatcttcatcatccgtcctcgtcttcatctcatcagcagcagcagcaacaacaggaccagcagtcggttcaagctgatggaacttcacccgctcctgttcgtcctttctggttcttctacaggctgcttttttcatttttttcttttcgctcttttttccttcctcgtcctctgtctgcctttagcagccattctttctttttatactctttcttaggctgacgacattctcacgtgcctgcacatgatttcttctattcgcttcgtcttctcgctcatccattcgaatagtatactcggactgaacaacgtggtcggaaacgaaacaatgaccttcctccttctagagcaagagaggttcaaagagcgtttcgagccagaagagccgctcacctcgccgctttggaggctagggtgaaggagattgaatcagaaaatgcagagctcagagagttgcttcatatgcctcctgccaacagggtgagactccatctttcttctctggctacgtctcgcagaacgaatggcactgctggacgcgcgtgaccttacagaagttgcgtgttctgactcggtgtatactcctgctatctctaaccatctcaaattcacgttctcgacacgctctcatagccggctatcagatccggacctacaggtcgtggaaagttgatcgacgttggtgcttcaaactctccttcgagcagccggttggatgaccagtattcccactcagattctggatctcccggctctgaagaacacttctctcatgccaacaacggtaacggttacgaagacagtcgacaaggtagaggcaggaaacgatattctgtcgatccagcttcatcgaggaacccttcatccggtggctctcaaagcttctctcctctgactagagaaggttcgttcggaatccatcagagggcgtcttctcgtccgccaggaggggctgtcccagggatgggtccgtacggtggtctattcagcggtggccttggaaacaacaactcgcagctcggcctcaacgcagatgctaggttcagttccttcctcaacaacactagtctcaacgcaccttcgccctcggctggttcttcatcttcaggcgtaccccggttggaggatatcttccagtaccagcaactcgttcagcaacaggcaggctcttcacagctcaaccagccaactcagcaacagttatctcagttgtctctcgatctgaatgatctataccctccgttgtacggaggcaacggcaactcaaatggtactgcaaacaacaacaacaacaccaacagcaacaaccttcactcgatctcacattcccctcatctgtcccatctggaacaccggtcaaacacgccattctcgcctctacaccgctcatcaacagagagccggtcgagttctcataaccggacatccagcccgagtagccgcctgggtgtcagcagcggtgtcggcttcccttccggtcattcgaattacctagcttcgtttggatcaggtttcgcaccgtctcccaattcgtttaggtcaccttatggctcgactccttcctcaaacgttcctgccaacaacaacaataatatctcaaacacgaatggagctgacccagcatttcctttccacaagccagtcttgcatgggccagctcagactctgagtgtgatggataggcttagagcttgctgcaagctggatgacaagcttgtcgctgccgatccgggcctgcttgctttctgcaacgatatattggcggctgtgaacgcccttccttctgatgccgaaccgggcgtcactgctcaatcaaacggattggatgacgatcgatcgaatcccccccgtccattcctaccaatccggcaggcctggcagattcttcgaacccactttccgcttcctttcgatccagccgtcagagacgccatggcagccggtacgagggcagcagccgtcttgcttcatacctcggccgcagcggaaaaacaccggttgatgcaagatggagtgatcaaacctgagccttctttgaccagtggaccaagagcgttcggagagttcattgtctgcagaaacaaaaacggaattgaggtcgatcaagggttgctcgtcgagctggtcgtcaggcttgaagagggtgcaaggcaggcagctagtcaacctccccggggaaaccagccgtcgcaccttcaaccgcatcagaaccagcagtcgcaacattcacaacagcaacagctaccgtcgcatcaacaccaaacctcgctgaaccaaacccattcgcccgctcagtcagattcatcaatgggcaagcagagtgactcgccgaacgttggtggatcttctgcccagccgagacatccttcccacttggcttcagaagtcatggccgatcgtcagcaacaacagcagggagatgtcataataccgggttcgtcagagggtcaacaggcattaggaaaccataatggaaacgagatcggaaacggaacaaactctcctggggtgtctctttaagtgttcctccatgttcgctacacttttcttgtttttgtctctttataatccaatatcgaaagtatatcgaaaaggcgactgaagctggcaatgagactagatccatttccacccaagccactcataatcttaattcttccaaaattcttcttttattctttcatctgctcaacaaaaatattaatagttggatagattatcttcctttcaaatctacttctcctattcttatttagtcgtctctgcgctccctgtattaaatgctctctctattggcttgcaagctatatcttctgggcacaacgaaagagcgcacaatcggcaggaattttccgcagtctttgacccgttgcatcacgaccggcgacggaacctccatctcgacttcacagtcatctaagcgaccagtcgagtctcgaagtcatcgtctgtcgacgcgtcgagcaccccgtaaagacagctaaacaagagaacatgtacaactatcctggtcaagcccaacataaccaggggacttataactatcctggtcagcaaggacacaagtcagtggatccactccctttttttttctcgtgacccagcttgcttttcctcgtccatgcttctggctcgtccattgttctctatagaacatctttcttctctgactggatgacgtgttgagaaatcagaggaaacctcagagatttggtcatatctgttgttgaaagatcggtcctttaactgacccctggtatcttgaaaatgaaacctcgcttgacgacacatgcaatcgctcttctctccggtacttcagtcagtacggtcctccttcgggcgcaccctatcagcaacaacaccagtcatacggacctcctcccggagcaccacctacctctggaagctacggcggccatcagagctcatacggtccgcctccaggagcgcctcccgggcaatatggtggacagtcttatggagcccgtatgttccgagtttgctttttctcgaaccctgttctcccaaagaggtggatcttcgtggaacagaatgcttatagagcgcgttggatcgtcgacttttgacacttgtagcatctgggcctcctcctgtgaacgattatagtcggtacgtcctttttggttctttggtaagatggatttgctactcaaatcaggaccagagactgatggcaatcgatatggttttttctgaatctatttctggcagaccgtccgcaggtggatatgcctcgaacggaggtagctaccaaaaccaacagtgagtcaagctgaatgtatatcctggtcctgtttctttatactgatagaagggttcgatttcattttgtcatctagatatggaggcagcaactctgggaaccggttctctcctcccacaggtatgttatctcgggattgtccagaaagtgcagcaaattgaacgcttgaaccttcaaactctggtcttcataggtcctcctcctcaggcagtcccaaccactgtccaacattacggtcctcagtaccagtcttccggtggtggtcaacagcagccatacttcaagtactctctctgcaacggtaaaagaaaggcgctcttggtcggaattaactacataggaacgagctccgctttgaacggatgtatcaatgatgtccacaacgtgaagcagttcatcatccgttcgtcccatcagttttatcttccataaagtttcgttctcagaccgattctgacccttgtgcacgtctttcatataggtcaatttggatataaggatgaagacattgtcgtcctgacagacgatatgaccaacccgagacaaattccgacccgggcaaatatcattcaggcgatgcattggttggttcaaggcgcccagccgaacgatagtcttgtatgtactttgtaatttttactgtcggaaaagacgatgatggtcaaaaagattggaactagctcatcggatcggtctactttctctttgccgagtagttcttccattactctggacacggtggtcagacccaagatcttgacggaggttagtcatatatagattttccactatatttctctctgagaccctgtatcgctaacttgcacgtttcctttgcgattcactccccagatgaggacgatggatacgatgagggtatgttgttgacgttaacactcttattatctgatagatagctcagttctgacttctctacatcttctgcagtaatctaccctgtggaccataagcagaccagtcacatcgttggttcgtccatctatctctttaccttttccatttctttacagatgtagaagtcaagtcttacttgaatcttgttctggttgtttccgcttgatagatggtaagcatgaacacgcaatcgtgtgaatctccttacatagaatgcctatgctcaaccgatctgtacgcttgttttcacgccccagatgaaatgcacgatatcatggttcgacctcttccggctggttgtcgacttaccgccatctttgattccgtacgttcggcggttcatttgttcaagcatcgttttgggcagttcatgtggacgaagttgacccaaatttttctctttatattgtagtgccattcgggaacggcacttgacttgccttatgtgtactcgaccgaaggaaagattaaggagcctaatcttctggccgaagccggtcagggtctactcggtatgttgaacgtcaacaatcagcaaacaatttataatgaaacttaatggtttggtcttggtgtgaaatgatcgaaaggtatgggaacatcttatctgaagggagatatgagcggtatgttcagtagcgtgatgagtacggtcaagaagatcagtaactcgggcggagcgaacgccgagagaatcaagaaaacggtctgttcttgtatcttgctatcctgcctgaattcttgatcgctcatctttcgttattgtgcagaaaacttctccggcggattgtatcgtaagtaaagacttagcttaaccaaacgtacttgagcatttcaactcacaatgttgttttgcatcttctcttcttttctttcaaacagcaattctctggatgcaaggataaccagacatcggctgacactcaagaggctggtcgggccaccggagcgatgtcttatgtatgtgctatcattctttgtttccaatctctttttcgttctctgttgttccaaaaactgctgactaaacatatcgttcgtctatcgattgttaggcattcatccaagcgctcagtcagatcacctttccttcctgcttctcgtatcatgttcaagtttgtcgtcggatgcttatctgtttgccttttcaccaatgccagcccaataccccaaacagtcatatcagcaactcctggtaaccattcgaggaatccttagtgccaaggtcagttccgtgtcgatctttcaaatccattcgatacagtgaatcgtcaatctgatgttccatttttctggcgaacaaaatagtatgagcaaaagccccagttgagcgcttcccaccccatcgatgttaacctcgagttcatcgcttgagtgtagaatctttttcttgatacttgtctaccttcccaggtgtactctcgaattttatgctcctttctttccttttcctttttaataacccatcttcgatgtccccataagagcaagaaaagagtgcaaggcgcaagaacgaaagattgattagtcagcagaggaaaaagagacatttcgtttttcctcttgtcccgctccgattgacctttaccctcgtcctcccaacaccccacatccctcttcgcccaagtttccttgtgtttgcttgtccgaccatgccttctcctctgatcagatcccacgtattccagaccgccctccgaaggtcgtttgcctcttctccgcctccggcgaacgtggtcgataaggctgccaagtctgcccagagcgcgatggactctgtcgtcaaggttgccggaccgactggaaccaagatcatcaacaagatcgctcgttcgttctttttttcttcccctgagttcactcacagacagattgagttcttgatgcgttgatactcagagaggcagagtctgtaaggaacgagaacgaactacgagacctgacatgcttatcttttttttgcttgactcttttttctttctttctgctcgtgtgtcttctttcgcttttttcttctttttttcccttcgattcttcgttgctctctccagcctaccagagcaagctcatctacaacatccgagtcgccggtgagctcgccaagcaggtttacattggccagaagcttgctcctcctacctctgtcggagaggtcacttccgcctgggccaacgctgttggcaaggccaccgacaagaactactggtttggaatctcaaagaacggacagtggaccaccctcggcctttacgtgcgttatcgtcttctatctcaggtcgctgctacgtgtttgatgtcttgtcgtgtaagggtttgtgaaggcagttggaaagaaggaggcaagagggtagagggaacgagatgggaacgtgagagcaaagaaggatcgttgggcgtcagaatctcgagatagcatgacggactgtgggcatgatctgatcagacgattttgaactgatcctctttattcattgtactttgcctttctacttatcgggatccatcttccgccaacttcacagggtctccaggcctacggtcttttctccatcggcgagatgattggtcgacgaagcatcgttggatacaaccttgacacccactctgagcactaaatctcttgtcaatcttttctcggaaggcagaagtcttgatcgatgaagggacggcgatgtgtgtcaaaaaaagatggagcaggagaagggaggatcgtgtgtttgggaggtgttggcggtagtactttgaagaagtgataccaaggttttttatctttctgttgtcgattcttttcagtctgttcagtgtatatcttgttctcgttgcttgctcgcttctactgataaggtctgtcgacatagagacagagacagagacagagagtgcacttctaaagcatatatgagaagccgaaaagtcccgactaggcggatgacggaggaaagatgagaacgtagattttccatcagcacgacttctcttccttacgtcccagagagacgcaaagctgttgctgggcttgaacatcgtatgagatacagtccatgttcggctgtgtatatagatgtatgtgtatcaccagacaaacggagcccaataggaagcgagatgaaagctcccacagacagttttagcggtaaaagtgaaacgattccatgaacaccatccatccatcatcacgactctcgtcaaccatattcatctttttttggttcgccctcttgtcgtacagacacgaaggaccgatctcccgaagatggccagattcaggcatccacctcgtctgcccatccagctcgctcgccctcgaccgagtctcatcccgtttcggccttttccgttcgttttatcgcaaccatcgtccggcatgcgtaactttgggatgatacgtcccaaccaaataggcatcagttggtcaggctcagaaagagaaagaggaacactcagctggacagccgggcttcaatctcgagcattccatagtagtccggtcagtcggtatctgtttgtttcgtttttgtcatcttgctctctggtctttcttacaggatgctcatcgtgtggcctgatctacctttcattcttatccaccgggaacatttgatccacgtgggaatgtacaatacagaaacaccaagttcccctgcctgctctgctttttggtctcctcaaggtttatctcgtctattttcgttgtggtttttctgattgtcactttttaatgtaactagaagctgaagtaaagttgatgaaacctttgtggggacggatgatcctgcggtcctctagtcttcgaccgtcctagcagcagtcactactctcacccgaatacttgtctccatcgctccgtcatttctagtcggtcactggaagactcggcggaggctcaaggcgttcaatcctgaacatgaatggtaccttcgtttcagaccaatcgtgtctccagaagctaacgccatttatgaatctgggaaaccggttccggagggagtgagtgatgatgtcaaaagagacctcacacgattggcacagtgggccgctcatgaggctgacttgagaaagacgaacgatgtgctggtcaaacttatctgggcagcgtaggtctttgcttttggttcttctttccaatatctcctcaccaacattctataggtgctggatgcttgtattgccttttgctgattaacttatctgatgtccttccgttttcatccatctggtttatcgaccctcgatagattgggaattccgttagctctgcttgccttggttattctctctggactagaacgagttccgttgacaggccgttggagactcatccttctgtccccctcggaagaagactctattcatgactcactcaaggagcaaggctggttcccgtcagttctttcactcctcatgttggatccttcggctccacctcccaagatcctcgacgcagccgactggcgatgggcctgggtagagagcacgctccgacagctcgagaagggcgcaggcgagtgtcatgaactatactcaactagtgcggagatgaagggaaagcctcgctcggctaaactatcattagaggagaagcattctatagaagcttacccaccggcacctcctcctacgtttccacttcatccgagaccgagagcatcacaacttcttcacgaacatctcagcaacttcaccaacacccagtgtccgtccaaccctggccagacctcgacatcggataacccagagttggaaggcccacctttctcgttgcttctaatcgaaaacaaagaggccaacgcgttctcgtatggttttggaggtaacggtgcggcagggatcgtcatctatactgggctactagatgagatactttcattcaaaccctcctccataactgaagaagtatcacctgcagctcctttcctcgccggacctttgtctcctaccgattcatcgcagtcctcgacatcaccaaattcaccaacacccacaccgtcagccctcgcgacagcacccacacaaccgtcaccatctacattaactaccgaatccactcaatcaaaatctttactctcattcttctttggagatgccttctccacccttctagcaaaaccaagctcaagtccaacgtcgggaccgacagaagaacaaacactgcatcttgcggctatcttggctcacgagatgtctcacttattactcagccatcatctcgagacattgagtcagacgagtgtcgtgctgccgagtatgatgggtcttctcatagacttggcccgagcggctctctttccaataactttcgtatttggacctctatttaagtacgaatcatctacctactttagcaacttccacccgacgtaagagtcagattgtttgatcctgactgcgtcaaccttttatcttgtcttgcggcttgtttacttttcctagtgatgcgatcgccaatttcggaaaaatgagcacgagcacgatcaagacggcaaccgagaactgctcgaatcaagtattggagattgaggctgatctcgtcggacttcggttcgttctcttcgcatgtttctatctgatgtaccacaaaatcctgactctttcttgtctctcttccacaaatttaccctctcagaatactcgcccactctcagagatttaacccctacaaagctgcccaattttggcttccttcacgagcgccaacaggtgttcgtgagtctcccgacaagtcatggttcgccgcgtggcgagggattggtctatcggatacagcttcaaccatcgcaagaaacgagtctcatccaagagatgagctcagaaagttagcggtcgacggtgaattggaaagatggagaaaggcttggagagagaaatcttgatcggattcagttggactggtttgagtaagatcggatttcaagttttgcggcgcctccgtctttctttctttactccttttcggtttccactagtttcataatcttcttcctccgcttccgtccattctcttgttctcttctggccttgatctgcctgggaattacactacactcgtctttcctggactaatcattttgcttcccaaaccattcgctccaatcgtctaacccaatatcccttctcaattttatcttgtcttcgtagtcttttccccccaaatctctcctcatcatgaattagcaatatcttatttttctcaaatcactcaatcctccatagttcatctctttcttttgtttgcttttctcttgggttcgaattatgtcgaatatatatatcttttcttctattactttatgttttctttatggtcttgacactgaccttgctcatataactatagttttctctgcttccccttctgtcttgcgtttctttgactttatgcaattttaatacgggcaaacccccagctcttgtggtgctgcgtagttttcccacacgcagagtgatgcaaagcagctggaactatggtcgagcgtacatgagatagcagccttcaaaacagagcgcgattgaacgaatgcacaagatgagatagtacagtgaggttgattaaggaatacaatacgaatccgagagatgaaatgagatgccatgaaggagaaacgatgaagagacgcaagaaggaaatgaatgcctggtatcatggcaaaagggcaaaagggagaacgagagccggatagactctgctaaacagtagcgaccctctatctattcgccaaacgtgccgtacccaacggccagctcttccctgtcgaaggggttgctccctaccgttgaacttctcagccttcttctgctgaaactccgactcaaacatctatctaacgaatcaacatccctctctaatcctcctctactcatcccaccaccgagaacgaggtacattgacgatcttggtggtatgtcgacgatttccgagtcggagaattcatcagaagaatcgtcagatggttcgtagtcatgctcaagttggtcgaccgtcccggttgccgtcatcgtcgtcgctgcagttcctgaggaaaagtcagaggataaaccacggtcggttgttggttggaagaatgggtctgcttcgtcggatggaacctgaaaacggttatgacctcgtagggatcgaaagtaatacgaagaatggttgggatgaaggaaattcgaaagcccagtcgaatcgtcatgggctggaatagactgttgagaatgagggaaaggcgatgggatctgtggtcgatcgatgttgggggagagaagcgcaagatatgttaactcaagtagatgaaacctcggtcagttcatcatcgaggatgtagatgatagtcactgtacctgtcgtggccgtcgaatgacgaatgcatcacctgttccatacatcctggctattctggtatgaactagttcttcggtcaaagctatcaataccgactgtcatatccggccgattagaggagaaaggtaagagagaaggacgataacggtgatgtctagatgtaagaacaggaacaacttgacgtacgaatatggagagacctatacggggtgcaaggattttcaatccagatagttcctggagagagtcatgattccggtggtcctttttagtgacgttgatagatgcaaggtcatcgctttcaaaggatctgtctttgaacatatatcggtttggaagatgacatggtgggtcgtctgaaggacgggtgaggaagagtatattcagatgccagaacgcctttcgatagtgatatttcggagggacagatcaacaacagcaaaacagtaagctcagcaaatttctcaacactcccatcagagccgataccacctctcagctcaagtctcgattgagaaaagagatctagagaacgtacaagcaagattgtgatctacaaagtttattgtccaagcaatcccgcaatcggtggatacgttgtcagtatctgtcggaacaaagaacctcatgcacaccagatgatgaaagtaagtagaacacaccatggtcgttcctgccaaccaccctcctccaccccggatacctctctttccggcccagcctacccagaacacgatgaccgctctgatacatccccagcctgttaatctccagtcatcgcgaaaagcagccgccgtccctagaagcacgctagatcctagatcgatcacggctaatgccggtaaaatatacagtgcccatccgttcgagcttattgagcgctcagatggtaagaaggatgaggaggcatcctcagaaggaagaggatggataagaaggaacgatgattcagaaccagacctagggagagcccccaaagggttggacactgtatgttttccgactcgaaaggatgttgctcgctcttctcaatgtttctctaaggtcttcggttactaaccggcgtatgttgacgagtttgatcgacacaattgacatatctatcagcagagaaaatagaaaaagacaaggcaaaaatcaagaaatacaggcgaagggttcattgtacgtaaagaaaactcgtcaagaagtggctctaaaagtgccataacataagatggaaattaaatacaggcccaaacccgaaagaggtgtatgaaaagaaaggttacagtggaagaaggaaagcataaacactacactcaagcagacatgacagcgtaggcagaagcggacacagagtcatgcgagatagacaccttgatgttcttagctccaagcgtcttctgaagctcggtagagagctcgacaacgggtccagtagaggtagccttgacctcaatgtccttcaatgaagcaccggctcccttggactcgacaccgagagccttgaagacggcctctttggcggcccatcgtccagcgaacgaagcctgagcagaaggctgcttcttgcagtacgagatctcctcatcggtgaagtttcgggagacaaaggtctcgttccagtaagggaactccgtgatcaactcagtatccacaccaacaccagcgaccgccgggttcttaagagcgagctgcaaagcggcgtgctcggccggcttgggaagaccggtaggaagcttggaggcaaacatgtactcgttcttcttgtccaacgatgttcgaacggacgggttgagaagaacagtcatctcctgctcgggagtgtacggcggggcctccttgattcggaccaaagagttggtgatgagagcctcggagttgtacaagtagctcttttgggatcgaggagctcgcctggcaacgtactgctcgtactcagccgggtccaaagcagcaaacaagtgtcgaggatgcaagatcaagcagtctccaccgacctgtccgaaaccgaatgaggttaccatagcagcctgtagagagacatgctggatgggcttggaggggaagaacaagtgagtgttcttcttgagctcggcagcaatgttgtcggcgttccagttgggagggataagagccgattggaggacctggaagagtccgttgatttgccaggcagcggcggctcccttggggtgaccagtaagagacttctgagcgataacaggaacggcgttacccttggttcgacccaagtgcttgaagatatcctggtagacaccagtctcgttcttgtcgttagccttggtggaagttccgtggatggaaatgacgttgacagcatcgatatccaagttccaaacggcaagagctcgtcggagaggagcaaccgaagggtcctgtccgtccaacataccgtactgtccgagagcagccttctcctgtcgagcggcttccgcctcgatgaacgaaatcttctcctgaacatcgaagtcggatgatccagcctcgatctcgagcttgagaagctcgtgctcgttgtcgagccactgggcaatctgctttcgtcggaaagcaagctgtcgagctctgtacttgatgtcgaggaaaggtgctggggagggaccagagatctctcgggcagcagaaagaacacctcgaccgggagcaggaatggatcgtccagccttatcggtgtgggtagaagtgtaggcgatgataccctggataggggcacccatctcgagagcagtcttggcgctcatgacaacctggataccagctccctgagactccatgaaaccatctcgagtagaggtggtaggtcgggagaactcggtgggctctcgaccgttcttgtactcggtctcggtgttcgaggtagcctgcatgttggcgaactcgtaagaaccctcctcggagaaatcgtcgaatcctccagcaagcatgaccttggccttgccagacaagatggagtcgcaggcgatctcaatagactgcaaggcggtggcgcaagctccgacggggatcttgacaggtccactggcagagagaagcaacaagttgacccaaccggcaacggtgttgatgaagctgaatattcaagtaaagtgtaattttgttagtgtgaatcaggatgccgacaaggacctgaatttactcacgtctcctgaagaatgtccttctgaacgtccttctcctcctttcggtctttgaacatagcactgatggatcggatacctcccataccggaaccgatggcggttccgacctcggatgggtgaacatacttgtaaagctcgtaaggatcggtgactccagacatgaccaaagcctccattgtggcgaccaaagcccaaagagcagttcggtcggtctgagcaatgatatcgtcaggaagaccgtatcggccggcgtgccagccagtagggagttgaccggcgaccaatcggttgaactgaaccgacttggggaccaagattctggctcctcgcttgaacttgacaaaccactctccggattctcgggcccaggtatcacagttgtcgccctgctctcgcttgaacttctcggcatcctcaggagaacactcaaggggctcaagatcatggttgagctggacttcctggtagaaggccttcttcttgggatcgtaaccgttgaacagctcgggctctgtaaacaaggtaaagtaagttgatcagtcaatttgagccgtcgttgatccacaaactcatttgctaggaaaaagctagagatgaggtatactgaccgatgagtcgaataccagcgtgctccaagatgtccttctcgtacttggctcgaacatccttgtcatcgacgggttcctcagtcttagcatcgacccaaccgacgtaagcctttccactcttgagtcgaccgtcgaagtgcttgatgaaacccatgatccacgacatctcgatgagaccctcgatggtgaattctcctcgagcctccatctcccatcgggtcctggaagaaccccaaggtccgacctcagcgaaaccggtgacgactatgaccttatcgaggtcgaccatacctctgcaggcgttgagcttctcgagagtgttgatgtcctccaacttggggaagtcgtacttgaagttggctcgaggcgcgatcgggatcttgtggtgaatgccttcggcgtcgactccgttgataaccttgaaatcagcagagttgtcgatcgcaacggctcgtcggagatctccagtaagcttgagttgggttcggatcttggtggtagtctcggcaagatcaggcaatcggtccataccaccgttcaagtcagcccagacaggctcgatctgagtgatgtcgaacaagagagggtgcatcaaaccaagaatgttgaaggccatctccttggcagagaaagttcggacaccgagcttctccagaccctcggccacagtgttagtgggacccatgagtccggttcctcgagtccaaccaatgacagctccggcaagacagaggtactctccccaagactcagactgccatcgctcgaacaaggtctcaagagagatcttggactcggcgtaaagaccgtcgttaccgaaagttccgtggttgggggaaagaggaaggatgacctgagttggtcgagtgacgaagtgtcgagcagccttcttctgcttgacggctccgaggagtcgcaagagattgacaagcatgactcggtgagcgagctcggatcggtcgtccagtccgtcgatctctcgaccgttctcgggaacggcggcgaaaggaacgatgtagtccaaatccaaagccaaggtcgagtagatgtagtcgaccaaagcctcgacgtcctgcttggaaccctggttgaagggaacgacggtgagggcagatcctcggcttccgaactcctggaagattgtctggtagtactcgacagtctttcggctgtatcgggaggtggtaacaacgacgttcgctcctccagcaagcaatcccttaaggatttcgactccgatagagccctttccgacgccagtcaagagggcgttctttcccttgaagctgtagattttgaggggcaagtgacgtcagaagagaaaagatagcgttgaagagaaaattggaaaaaataacgaacgtagttccagaagtagcaatttcggtcaaaacatccaagtagacctcggtcaacttggaagagtactgccaagcggttccgacctttctcttcaagtgcagcaaaggaagcttgtcggagatctgaccgacagccatcgactcggagatcgccgcgggtcgcatgaactgagaggatgatcgtctggatcggccagcggttcgagtgagtcgagactcatttcgagccaagttcttaacgacctcgccgtaaagagacttgatggcggccttgttacctcgggagatttggggctgagccttgacaagcttgtagagctttgagacgtcgttctggaccttctccaagttgacgttctggttgggagagatctttccaccctgggccatctccttgacataagcttcgagcttcctgacgttctctcgaacgacctcggaatagacgatgtctcccttggcgctgacctcggtgtgaggggcggtggggaaggtcacgtctttgtagacagggtcctccttgagggcctccctgcagttgtccaagagctgctgtccgaattctttggccagcttgaaagtctccccctgctcagaaacacactggtcgacgtggtattgcatgtagtcgataagagtggggtcggctcgattcatgatagcgatgcatcgcgaggtgatctctcgatcgacaccggtcaaccttccaaagatgatatcgtaccacatgatcagagcgtcctgtctgacccagttccagtgagaatcgaagtgtcttgccttggctggctcgaaaacgggctggatacccttgatgtagtcgtctccgtgctcccgatctatgctgtccaacttgtcctgaagggcttgggcgttggccttctcctgctcgtagagtcggtgaccggccctggggtcctgcttgagctttcgcatgtaaaggtcaacgtgctgagcgtggaactcttcttgctcggcctggaacttgatgaactcttccgagttgatgacggctccaccac

SEQ ID NO: 1704 - DNA, 9451 bp, Xanthophyllomyces dendrorhous
tcctcctcctccgccaccggaagaaagagagatgccagcctgctgagcatacacggcaaccacagaatccaaccaagccttggcctcggcctcagagctcaatcgcttcgggggctccatggtgactccgagaagcaaggcgccatcggttcggaacggaccaagaccccaagtcttggaaagatgtcctttagcagaagaaaggttgaaacctccaggcatctttcctccgatcattcgggagaccaaagcgctagtgcacttgcccaaagtaccggcgtaaccgaagttaagtgcagctccaagctcgtccaagggaagctcctctcccttctcgggagccgaaccgaactcaagctgaagatccgacacgatctcgttctggagggtagactttccaccgacaaggtctttgaccgtcttggagagcgggatctcggccacctgcttcttgagcttctgggcgatgatgactcggacggtgtccacggccttgagcggctcatcagggatctcagcagcgggaccggccgaagcttgaggggagggaggggcagcggcagcggcaggagcggctgacgcaggagccgaagacggagcagaagccgcagcaggagcggcatcagcagaggcagcttccggctcggcatcttcgaactggtagtaaacctccttctggttcttggcgtgggcgagaatagttcgagttcgggagatgggtccatccttggcggcatacttgagagcgagcgttcgggaagccattccagtcaatgttggagaaggaccgacctcaaccattcgctcgaattgatagtaatcaaacaagagatcctgagtctcgatccatcgaacgggactggagtgggaaacatatgggtcaatcaaatatatccgcgagacatgggatatgaacggggcaagcaaagactcacgaagcaaactggtaggcgagaagctcgatgaggatgttgtaggcaagtcgttgacgatgttccgaagcgtcccaatcggcgtcaggcgtcgtgcggattaacttctccattcggggagagcctgtaaattgatgagtgtttcttcagtcatgatgctgacaacaaggcgtattgtatgggcatgttaagcacttaccagtctggtcaagaatcttctgcgcgtaggctttggacacctggaatgggtcagcgatcaagttaggaatatacaatccgacgagaagatcggggttcaagtcggcggccgacaccttcttagaaaggtacttgaggaagggctgcactccagaccagaggtacttggagtggaagggaacgtcgataccaggaagaggaatggtggctataggtatagatcacaacggagcgaaacgatcattaaacgaatctcggcagaggaaagagactgtcaagtgggaagagcgcgtaccaaatcctcgctcgaggatcactgaaccatcctccttagccttggcttgagcagttccaagagcgtgatcgatgatttggttaagctgtaagaaagatacagcgtggtcagtgacttggtcaacagacatggtccgagaactgactgagatgactactgacctttgtgcgaagctgctcgactgagagctcggcctgaaatttcttcatgtcaatcttctgaaccttgatgacgttcaacacgtttgttaatgtggccagggccatgttctctccggcggcgacgtactgagtacctgttgacaaacaagaacatggtccaatggtatgtgagccatatgcgctcaaaacttccgatggattcccaccctgttttctccgaaacaggtgaatccagtaggacacacacaaaacaacaaaacaaaaaggacgaccgaccttcgacgttgaagttgacgagttcgagcagcatgcccgtcctatctgcgatcgaagcgacaagctctcggagaagagtctcctttcgggcgagttctgcggccatggtgatgaaggactgaagtaggaattaggagtgtgagagatggagagagaaagagatgtgtttatgtatagatcgagaagcccaaaagaagagaaagaggaaggagaaaagcgaacgaccgaaagcacgaagagatgaagttaggaggaagataagaaaccaaggacacaaagatcgaaggtggatgttggggggattaaaagaaggatggtaaacgtgaggacggcaagttcaagatgtttaatctcttcgcgctttggccgcttttttttctgttggggagacacccggtgggatcccccagcggttgagggtgagtaaccgtgatggggagggtgattccgagaatgttacatgccacgtgtgagctgtgttgggctgtaaccattgaccgccacatactcttaattctttctttactcttaatttcgatttctttctgatggcattctgtctttctttttgaaagagatcaaccgtgtgtcggtctgtgtagattctttcttctttctctccagtttggactagacgctcggatagatgctcgtcaagcccacctcgagagcgctcaggacgttgctggaaagaccgtcgatcgtttccagtcgtctcgttccttctcgcgctttcacctccactcctatccgttctcgcactcagcccacctctcgctctgaacaccaatctggaaagttcgtacagcagcacaagcagtcgccatcttcatcttcatcgtcatcacccaaagttttcaagcagaaatcaccgtctgttcaatctcagacccaagtggaggaaccatgggcgaatgaaatttcttgggatgacttcctttcggacgaagtcacaaaaggaaacaagcagtattcctatcagaagttcgacgacaagggccagccaattggcgaaccagtccttcatgaggatgaccgggtcatcttgtttgagaacggaacgatcgtcgaaaccaccgagtatgtgcccaattacctttgctcacgaggctttcttgaatcaaattcttggatggtctacaagctgacgtgctggagttgctcgttcaaagtaaagcaagctcaaacttaggtgtcgtgcttgacaccgtcctcttccagtctcaaatgaaacttcgaatcatctcccctgaaggctcgatcaactacctcagtcctacacgagtgaccttcgcgtttcaacataagcaagtcagcccgagctgggtcgcgctttgtggacctggggacgcagagacccgagctgacagggtcaactaccgagttggaatcgccaagcgagctcggatggtcctaaaagagaccgagggtcaccgtgtcaggcttgatggagtgatggaaggagcatgggagcgacttaggccgaaggaccagggcatggaaggatccaggcggctcatgacgactaaagaaatcgttagagaagtcatgcgagaccacccgggagggcataaggaagaccttgaagtcatgacctatgctgtccatagattcctgatgacctgtcccgaaaggttcatttgtgaggaatccggacagtggaagagtctgcggtggtggctcaggagtgcagaagaggtacaggaaatggagaaaaccaagcagtgggctcataccaagtgggtctctgattcttcttttcgtgttgcgcttggtgaaaattacctcattcactgaattgattaaccgtccgacatcaacagtgacccaagaatctctgaatttgtttcaaaatgtgtcaccttgatcgatcattctcgacctgccttatttgccatgccccctgctcccgaagaacacgtccttccgagttttctaccccaaaacacatcgcttccaacattttctccctcagatctccaccttatctctcatatccaaaagtctctctcaatctcgaccaagcagattgaccctttcgcatccacagtacctctcctgttgaagcagaccgagcgatatggtgagatcatcacaaaacacacgatccgtcaattcctcgtcgagatcggcgttcgaaccgaatgggatgatcttgcggccctaagtagtagtttagaggttgccaaagaactcgggttgggtaaaggagagaagagaccattcaagctagagatcgatgatgggtctgatgatctaatcgagcaaggcatgatgcctggacctggagaagattcattagcgaacgtaggaagaagttctcccatacagcttttgacagaagagaagcatgcttcttccacatctacacccaaacccgcagccatggccacaaacgcaccgactccagcatcccacccagctaccgtctctccgacttctcgatcctcttcagtgccgctcgccgcccataaatccaatacactgcttggtccggatgagctgtaccctactgatccaatgtcaaacctgcgtcatgatttcggtgatctgcccgtattcgttatcgatgaccctaacgcattcgaactcgatgatggagtctcgatcgagccttcccggtccggattttgttggattcacgttcacattgccgatccaacatctatccttcacccaaatcatcgtctatcgaaggctgctgaacggatgggtcagaccctttatcttccacaaggtaacaggtctcttctacctgatgatgtctccgtcgacagattcagtttgggaggtcaagggctcgatccgatcaacggccagccagctttgaccttttcggctgaagtggacgagaagatgggtgatatagtgaactacaaggtccgagcaagtaccatccggaacatcaaggtgacaagctaccaggcggtcaacgaggtattccgatgtgaaacctcgccgatcgcattccctcttgggttgacgtacattcgacccaaactaaaaaagcctaagcaggcagatcctgcttggttcccggacttgaactacctatacagagtctcggaatctatcgcaattcgacgtctcaagaagggtggaatcagttggtccctctcggactttagcgtcgctttaaacccgtccccgccgccgtctctgcctttggatgctgaacccgtcccaaagttcacctctggctcgcccgtggtggagtatatcgttcaccctcaacgaaaactggcaaacgatcgagcccagctgatcgttcactcatgcatgaccttagccggtaacgtcgctggtcggttctttgccgacagaaatcttcccgcgccgtaccgaacgagtccgtctcctcgtgcggcccaacagtcagcattggaggagcttctcgagaaacgaaagtccatcaccggcgaggtcgatccttacgatgtagctagactcggagtggtgtttgtagccggtcgattgtcgatgaggccggaaagccattggatgatgggtatcgagggtgatgacggaggctacgtccgagtgacgtccccccttcgtcgatacaccgatattctcgctcattggcaaatcaagaacgctctcttgcacgaagccagtcggttcagtgttggtccgtcttcggtcaagaaaggagttctctggaacattgccgagatggaggagatggcttcttcagtcgacctcacggttgccttaggaacttccgttcaacgtgaatcaaaagctttctgggggacgtatgcgcttgagcgatatgctcgtcgcgaagacccgttgccgaacttgtccgagaattttccgccaccgcaaaagacggccttcagtccatcccctagcccaacgatggctaggctaggtccgttcgaagcctcgttcgttcttcaaccttcccaggtgacatatgaggatgccggcacggccaaggtaacggtgatgattcctgctctgggattacagcttgtggcttaccatccggtcacaaagatgtacgaggctggagaacgagtctcggtcttgctcgataggtttttgttagggccgcgctcttctgtcacgggaacgattgtcgagtgataaagctgtatatttgtattagaagactgagcaggagaagaacgcgctcgtcccttttttatatatgtctatgtggaaatttcttttctgacttatcgccttaggtcagggttgcgtcaaaaaatctgaggcggcggacaactcaatgagaaaaaaacgaagattacccgccgttaccgaaaagtctcctacgattcgaaagccatgaatttgagcatacaaagcaaataggccagtcgtaaagcgtcatgaaatatgtctggtattaaggccattaaatctaatcgtctgcgattggaacctacacatggaacacaatacaatcacctccatctcagcaagttatcgagatagacgcgaatcgttaggctaacagaagaaaggagggcttacttcttcttccataaaccgaatgagttttacccgaagttccgtttggtcatctcctcttaacacatcgctcacgaaggatgcttcgacctgaagctggacctgttacccgattaagtttcccaagttgcataaatgtttctttcttgaggataagaatgtagaaaaacaaaggactgaccatttctaaggctcctcttaacacaccgcagagcacgttactaaaccaaagtccgccctcgatagcatccccaggtagttccaccatatccgctagcgggttatcttccagtatcaacgagaactcttgtgggctgcccgatcctgttgctggtgggaaggtgagggtaggtgtgatattgaggaacgatttgaatccaactttagagatgatttcgcctgtttgagtgaagtcagtacatcgttgaagagatgttctagagaggaaatcttcgatcaaccgagtgccaatattgtatcccctttgtgtatgagaaaaatgcttggatcagaactcggtcggagagaacgatgcaaggaaagatataagcaagacataaacgagggtgaatagaactcacatcttgttcagctgcttgttcacctcggcatagtcttcgtagtctttgatcaattgaacgactagagctccgtatgtcatcgtgaaaatctctgtgttctacgaattttctcaaacacgatttcgggcttattgagcctatgaatctgaaccgaaccggtggtcttgtcatgtcaaacgtaccatcttctcccttgtcttccagagatcatccttataagagaaaccaaacgtagaattgtcagctagttgtgagatggccagtaaagctctgaccaaacatactcctagttgcttgtattgtttagcggttgctgacatggttgctgattgtgtcgagtctccgaacgttagatgaatgtttagagaatgcagatcgaccagaaagaagcgttctgcacacaagatcatggccatgactggtgactaaccgttcacactacatctaactttcgaggcactcgagctttgagagagaaacttcttcatctttcacaccttctatatcgctgttaactttccggatatcgctcttactgatgccagggtacagtctgtctatcttaaacgatcaacagacatcgtgctccttgcttctttctaatgctaaccgaccgattgcgtatgaaattgtgccagatatgctaactttgtaggaggctcgaagcacaagattatcgaccggcgagttcatcccgagcgtcacgctcagaagaagtatatcgccgcccgtcggtttccatactttacacaaagagagaaaggtctcgaaaagaaggacgtggcgttctctttcgggtgggcgccagtaaacaagtcgacagagacggatgctcagaagaagcgaactctatggcaggaagggagctctaagagacctgcgcatggccagatgcaagacaaggtggaactgactgccaaaaattcgatggtgacagaagctttagactctgatccaggtatttgcactatcagttcctttctcctttgccaccatctttcgcacgccttggctctatcgaaaccctatttgaatagaatcgctgatgaacgaatctgtcagtcaattcttttgacaagaaccgtcggcggctgctggcggagacagactggataggtgcagaaatgatggaccgagtagttactccattcagagctcctatatgtggtctggcattaggatatggagatccttcctcgcctagctcggtaagcgccccatcatagcatgaatatatgcacgaaattgtgcctatatgcggtctccatctgacgtgaaagcttgaacggccatagaatgcccctcaaccgcatgactcgagctctgttgctagggattcaagtcctccaacgagcaacagtaagcaactaccaccttacaggtttgttgaaccccggagcaaatctcgaacaactagtagcacgcagcaggcggaagaggaaagacaacattggaagcttgatgatcaatcagtacgggatcatgagtatatgcgctcgaattctgtggagagtgatccatttaatcatcgctcgcctcgacctgatcagcgattctcatctggttatccaattttgaaatctcctacgccttactgcaatccattcctctctatgtctgcccacaaggctatgtctgaagatgtttcccgagaacattctttgttgcatcctcaaagtcaatctcaacagggtcaggctttttccgaatcacctggcttcagtgtcttgaggacatacctttcctgatgatagacttgttcgtgtgttattcaggtccgatcccgatcatgcagggcacaccattagattcttcatatcagaccgatagtttgaatgagaacgacctaaacttggaccagttgtctgcttcctcccactcgttcactgccggccagtatttgttgaatactttccataatgactctttctatgcaccctactcgcggtcctcctcctccgttaaacctgacatcgttcgatacgagtctctcttgccgaatccttttcgtgcactttctattttgacggggttgccggatatctctggagacgcgccctgacgtattgatcaagattatgttttcaaagctgctcctatgcattttcatcatcttggatcatatctgacattctgtatatcaagtcgtatgtgaagaaaaccagagaaaacacaatgtcggtgtcggcatcaaacaagttttccacgtcaagacaatataacgctttccagtcatctttgaagatgcaaacatctcaatacctctttccagtgagcatcactctgattttgattagggagaaaaattctcggattcatattaagcacattgaggtatgtatacagtctcatgatactctaagctagattggtataacgacgggacaaataaccagtcggttttggctacaaagcctctagtgggccatgacagggttttttccctgttctgctccatcttcagccgaactcaaagcgttctttactggtctgtagagcacaaggaacccaacgagccaaagc

SEQ ID NO: 1705 - DNA, 305 bp, Xanthophyllomyces dendrorhous
gatggcaagagaaaagaagagaggcccgaacggatcgccctgtctgaccccctgctgggaagccatcgtgacgacctggccgtctgatccggtacagaccagagtggtatgctcaccgtatgcccaccgaccggcccgatagagctcgggagcccagtccttgagtccgtcggcgaggtctcgtctgctgacagtgttgaacgcgttagaaaagtccagactgacgaggtggttgtaagtgccacggagatcacctctcgttgcctcgtcaaccagtctgacgatcggctcgactccgcccttgg

SEQ ID NO: 1706 - DNA, 679 bp, Xanthophyllomyces dendrorhous
ttaccaatgccagtgtcaatgccagtcacaccatcgactggtgcgaccgacggtacacctggccatggtctgccgggtgggcctgacagtcatcggatcgattagctcagttggttagagcgtggtgctaataacgccaaggtcgcgggttcgaccccctcattgatcactttttctttctttttctaattttcgccatctttttttgccatcttttttgcacccctcctgttctcgaccgttgcggtctgtgtggcattgttgtcgactggcacgctccatggtgagcgatgcagtgttgtgacggtgtgacgatgtggtggtgcagtggcgacgatgggaacgcagatatacacccggctgtgctggacagtgtccgaccagacatgggcctatggtgtctgggctgggctgggaggcatcgtgcatgcttggtgtagtggtatcgcgccatgttagggtctttgcgccttgtctcatggaggtcctcagttcaatcctgggagcgtgccttttttccttttcctttcgttctttgtttccttttcccgagcgcttcctgtcgctcttcgttgttttctgccacttttcactcactttttgccactctccgccactttctcggcagcagacaagcgatgtgtgcacccggtggagacgtctctgacgcatggacaag

SEQ ID NO: 1707 - DNA, 424 bp, Xanthophyllomyces dendrorhous
taactatccacagaggagagggccacagaacgttttcctctcccgtcgggtcccacgcaggcacagaggcccacccggcaccacaaacttgagtgtgttattactttatggcgtcaaccgtttagtgtgtttcgtgacgcagcgcgctggccaagccggggtgcattgaatcgctttgcagcagactcgctcacagccaccggcaaccagacacgccttgccttatcccccggtactcactagttctcagcacactcacacagtcctcggcaggcgaacccacctagactgccctcatggccgatcgtgaagtctactaccattgagccagcgattccagatgaggtacgatccccaccagtctccgtcccggaggacgtgctggcatgttgatcaatcagactggtcggctacaacggagcgg

SEQ ID NO: 1708 - DNA, 332 bp, Xanthophyllomyces dendrorhous
ggtcggctacaacggagcggttctccgaatgattggttgcgcgtcgttctacccatagggaaggaatccacaccacaaatcatcgcgcccacccggaggctaccccgggtaagcgactgcttgggttgcgagtgagcaccaacgacacgaatgccattgccaccgtccactcgagagctccatttactagaggtccgggcctgatctggtcgagggggatgctgagtcacttccctgagccgttggatcagtttccgccgcgggtcggtctttcgactcgactgtttcgttctctgtttctctaaacaaacgggggggtgtttgacgttccc

SEQ ID NO: 1709 - DNA, 339 bp, Xanthophyllomyces dendrorhous
taaaagtactctgactcatcttgtcctcttctctatgctctcaatcgaccatagtccaggacctgaaaactttacttcgaacggaagatgatctgcatcggcaggaggttcgacgtgcgcagggattggatgaagatgaacgacccttgacgcggagacttcctgcttacgacggcaagcacttctcaactcgtccgttgcaagagctagaacgggtcgagctaggtgatatgatgtggcacaagatccatcatgtgagcttcttcccgtcttatctctcttatcttcgtcttatccttaccattttcctatatctctatgcgacttgcggtgaatcag

SEQ ID NO: 1710 - DNA, 490 bp, Xanthophyllomyces dendrorhous; identical to SEQ ID NO: 388

SEQ ID NO: 1711 - DNA, 1906 bp, Xanthophyllomyces dendrorhous
cgagggtctgaccgttgacagcaagcatattgtgctcagacttgaccgagcgcactgccggatccgactctcgcggttcagaggcgcgtttgtcgatggcgagcatgcactgcgtggccttcttgacgctgtacgcgcggaggaacctggacgggcggacttggcccagtcggatctgctgcagaaggcataccactggcttgtgctagcttcgatcggtctgcgcgactggtcggtcgcatatgagcactgcactgtgtttgttgagcggtttcctgattatgctcctgcgctggacttgctggcgttcacacaagccagagtggacgaggctcggacgggtgtgtacgactggccgtcgatctttcggggtgatctccagccgggggggacgaggaatgtagttgctgactgggtgtcgccttccttcaagataggccgcagccctacgttaggtgggatccggggcgtcatcgctgaccgaacgatcgagcgaggcgagctacttgtggtgtgcaagccgtttgtatcggttgacatgaaggagccaaaggaagggccgctgacggagctggtgaacgtgccaattcaacaatacgcttcagggtctgcgcatgcatatctagtacgagcgatggtggacaagattcaagacgaaccgagggccttggacgtgttgaagaggctgtatgctggaccgggatcctcggatccagagttggtcgatctaagcgccttcgaaccgcctggcgcaccgggcgataccgaggatgaggaggaggaggtaaagtcggtggatgtggacgtgtcgagactggagggagtcaggacctacagctcttttgcgaccgggtcagtcatcatcgccgagaccgggcccactatgcatggtccacatagaaatgagccgtgttcaggtacgtctcgtacttttgcctctaagataatctcttttctctctgtctactacgtttttttgccttttttctctcttgacgattctttgtattgctttttgtgttttgatgtatcctgtttcatcaaatggtatcgattcgtcatctacgtaggcatctaccttgtcccctcgttgttcaaccatgcctgcttcgccaacgtcagctgggtattctggggcgatatcatggtccttcgttcctgccggactatctcgcccggcgaagagctgacgatcagctacttccctggtagctcgttagcctggcgaacaacgttgattggcaagtacgagatcggtctatgcgactgtatcctgtgcaaggagaaacggcttgaccccttggacgggcgtaacatgtggccagatgagctcgaatgggctttggaatatgatgaatacatatctggagttgccccgatagtcaatggaaagatgtataagccaccgagaagaaccctcaaaagggtcatgaaaatggcccgttctctcgaatcaaaatacgatcccagacgctcacctagtttcatgtctgagctctgctgtctctataacgccttgtcgggccttcacatgatgaaggtgatgggcggcatgaaggaccccgaggatacgttgctgttgatggagcaagcggtctactggaagaaacgtgcgcttgagtgttgtgggttcaaagggatagagtccgatggaagaggtacactgacgtctagtccgttcgcatacgagatggaatgtttgagtatagggttgtcgatcgtgtcgatactcggcagaatggataggaagaaggatgcgcaacgatgggccagagtggtgttggagatgcatgacatcgttttcggaggtgggaaggaaacactggtcgttctgtggaggggtccgttggactcgatgaacttgcttccgtacttcagttgacctcgtgtggatgagatcgcatat

SEQ ID NO: 1712 - DNA, 889 bp, Xanthophyllomyces dendrorhous
gtgtggatgagatcgcatatgaatgcatgtcttgctttgtatcacaacagcgatagtactagggccaggtagtcgatagcatatggtgtcttcccgtgtgtcaagctagacgcatcacgatcgagtcgaacaagcagaggacacagagaatcttgtcatttatacacattcagtcctcagccttcgttcgcttctgcttgtgcttatcagcaggcacaacttgctggtgcgcggctgggtgtcaagcgagttctgagatccataagtggctgtgttgaagaaaagaggaaccaatgtttgaaaatcatttgaaacccaaataaaaggagaaagggaaagagagaaaaaacagtcagaagtaggcagaaaagagaacgaaagaaggaaagagaggacgaacatggtttcctcacatttctgacacatgaacgtgatggcaagatccgtatatccagctcgatcggtatatcccatcacttgcatgcggagggcagaacaaggaaatggatcggaccggttcgacgagcgtaagcctcgatcgcatctgacatctgccaattgacgacaagcgggacgatcagtacatcgttccgtcgtgcagcctgtgtgagcgagcgcagatgccgggcattggttcggccgtgagctgagtgggctcatcggaaactgacaaaatataagagagccgaatcagattgtcggtgaagctagtatcgcacgtcccgtctcttgagacttgacaaagcatctttccgccggtcctgcgacctgttcgagtggagcgccataacagaagactgaagctgagtatgggaaacgggaatcaagtcaacagagtcacgtacttgaatcagcttgtacaagtcaaagatgaagagaggccaagggt

SEQ ID NO: 1713 - DNA, 1389 bp, Xanthophyllomyces dendrorhous
acagaaagggaagtaaagaagggcagagaggaaagcagaaaagtcgaagagacaacggacctctgctcgctgagcgctctcgagaatggtattggccgtcttcttctgtttgcgaatgattaccatggacggtgtcaagccagctgtaaggggtatctgtatgttttgtcgttcatcgcgatgagcaacacgccagagcatagtaaagcagaacgacatataaacgatcggaacaagagagcaaacataggtagagaacgaaggacagatctgatctcatgttgtcgtctctctggacgagctcgacacgttgttggactgtatcgactgtacggattgtaccggctgcatcgacggcctgtcgagtttacaatctcaagcacccaaatgcacccaagtgttggcgatcactgcgttaagtgatgcagaacatgaggctctcatcttgatcactggaaaaaggccatggcggacgctggaggatagaacagaaagagaggatagatggagctgcctgaatggaaacaagaagaggcggtacacacgaccaagtccgttccaatagattctttgaggtttttagtagtcggccgttggagatcaaatcatgtccttttttcctttatcttatctctccgtcttgatcgctttccttttccccttaaaaccctaaccaagaattcgttctaccatatgcttagtttcaccatctccggcttttcttcgaggccgctcagctttctcgttcaccactatccctgcacataagcttcgccatccttccacttcttttctccgtctcggtcaccaccagaaacccgctcctgtgggctgggcctttcgtgacatcttgaactcgatcaatgccggagtagatggagctgcctgatctgtagatctactgctctcagctgaagttccctcgagaaatctctcgaatgatcaagacaacctgatagatcccaagatgctaataacattgatgtgctctatacgtctctgtgatccccggccgctgtcgagggcgttttctgaaccagactgctgactatcgcgcccttaattcaccaagatctttcgggacacgagcaggctgattgacggtttgtgaacattaagaaccttaggggctttcctttgtcaagctcttctttttcggcttgcttaccaccagggagggcttggccaaaggtgcgcttatgatcggcccccttcgttcggacggcttcaagacttgtggaggctctatgaaaccgatccgaaggcgacatacacttgcgtgcaacaaggattttagttcaagccggtccagtgcgatgtcggccggccggaagatgacgaacgtcagatggacgattcgtatggttgggggtactgacaagtcggatg

SEQ ID NO: 1714 - DNA, 419 bp, Xanthophyllomyces dendrorhous
ctaccatggtttcaacgggtaacggggaataagggttcgattccggagagggagcctgagaaacggctaccacatccaaggaaggcagcaggcgcgcaaattacccaatcccgacacggggaggtagtgacaataaataacaatatagggctctatgggtcttataattggaatgagtacaatttaaatcccttaacgaggaaccattggagggcaagtctggtgccagcagccgcggtaattccagctccaatagcgtatattaaagttgttgcagttaaaaagctcgtagttgaacttcaggcctggtcggccggtccgcctcacggtgtgtactggtcggccgggccttacctcttggtgagccgttcggtcgtttacgcggccgggcggggaaccaggatttttactttgaaaaa

SEQ ID NO: 1715 - DNA, 1900 bp, Xanthophyllomyces dendrorhous
accctaaccctaaccctaaatgaacgagaaaatagcagggctcaactgagaatatgttagctatttatagtatatcgttacagatacaatgatatggatgaatcgaaggaaaacatctaacttcaaccctctaacataatttagacagttctccttttgcttctgttccgcaatgcaataactgaataacgcgactgatgtgcatttggttcttgaaacagattgaaggataatgtgtctgtaaatattatctgaaatccagcctgaaaaaatcgagatctttctcggtttgtaaagaaaatctttggatgatcaacagattttttcactttgagttttcatatcaaaattttcctgcctacaattctgctttacaaatggaacttcaagctagtctacaaatcgaagctcgcgctattcagatgctcgattgtttgaccagagattattaacgagaacaaggacttatcgaagatgttggttcgtaagtctttctccacgctccttgaatagaatgacgattctatcccggtcagaattatactgagatcgccaaattctgataaattcaattctaatagcttatgttgatctcgtactaaggtttgaaagcgagggtgaacttttcgctttggcactcgctctcagtcatgtcctcactccttcctcaaagctatatacacaccaccctagtgtctcggtgagactgaattgaggaaccaggaaaacagaagggaaacagctagacgttctacacgttctacagctgttcaaaagtaggctcttggctctccgcgtaaaaacgaaccgagggtgatgcctcaagaagatatagctatttgaagctggaataacgtaaagactgctgagattctgaagattattactgaaataaaagggtgaaaatggacttttcgttctggcacttgttcccaatcaagtcctcactggtttcccaaaccatatacacaccacccaggtgtttcagtaaaatggattgagaaaccaggaaaacagaaagggaacccgctagaaaatttatagctcttcggagagagaggcttgggactccgcgcaaatagaggcaggcagatgatgtctcaagaagagattacaaattacagatgaaattatgtcaagactgctgaaatcccaatacaataacctgttcgtgcatcttgaccgtctaggttgcttctgaccgtatgccaaacatcaagatcgtatagtatagtggttagtacttccgcttgtggttcttcaaccgaaacgcaaagtcgcggacgacgggtgttcaattcaccctacggtcatttctttttggggttctgttcttgcgccctttcgtttttgcttttcttgctcaacacactcattccgtccgaacagtgttcacaggcagatactgtggcaaaaaagtgtatgaccacacatttgtgcctggacacatagggagatgccgaacgataagaagacacactgacacggaatcacaaagatactagaacaactcaacaggcctcgctctatggaatcatctggcggttgaaatgtcctgccggctgaccaagacctgcttgacgatgacgttgccaagaaagaaccccgtcaaggaattcccattgggggcttgcaggctgtatcgaacgaagagcctgacaactacacgacgtcgttggcgcgtcagtgaacgcacaccggtccatctgatttagctttcgagcgaaagagagaggtgcagagaacggagccagatatgtatatgccagtgataacacccagaatttcggccagcatggacaaaaaagtcatcactatcttttcctgattatgtgtctatttgttgcttcgtctctctgtatgttcatgtctccgtctgtaaacggtagagccggcaccg

SEQ ID NO: 1716 - DNA, 16131 bp, Xanthophyllomyces dendrorhous; identical to SEQ ID NO: 393

SEQ ID NO: 1717 - DNA, 9046 bp, Xanthophyllomyces dendrorhous
gaaccgagatgtcaatgcgttgcgcaacatgctgcacctggcccttcatcaggaagagaacaagggagcaaggctgccgggctttgacgctgtcgctagtgaggctgaggatgaggctggcacagactcaacccatgacccatgaggatttgatgttctgtggtctgagggcacccaagtccaaaaggatcatgtatcgatcaccatcggttgcggttgctttctagtagccaaggccatatattgtaaatatatattctttcagctttgattgaatatatgaacattttggtgtcaatgaggaatacattgcggctgccaccagcaaccgatggtaccataggctaattgaaaagcagaagggatataacataggtacagaaaaagacgagagaacaagacccggaaaagaaacagaaaaattaaagtgtaggtatcgaattaaatcccccatactaagcatcaacagccgctcctccggctttttcgtttccttgtggtttggaagacaagcttgattcactgtggtcttccggtttaatgacgttcggttgcttgtgttcagcatcagaagtgacgaccactcgcccctcgtgatgaatgagtcgggcctcaggatccaaccccacactgttaaagaaggtcagaagggggagcagcacgatcagcaagggagactacacaactgatatcttgaggcttcattgcgaagcaacttactagtcgtatgagaactctcctagctcggcatcgtccaatccgacgatctcactctcttcagaacatctcaacctgagtccggggatgtagtgcataatccagagaatctgaatggcaacagacgtatggcagatcgagcggcaaaaaaagatcagaagttagcctcttcgtttcgatagctctaacaggttggcagaggcacctacaatggtggtcatgacaaaagagtacgaaacacaggcaacagagtcggccaactgataaccgagttggactatcaacagagaaacaaaagctatgtgatcagtgtacgagtggcaggtgaaacgaattagaagaaaccaaccatagtgatgatcaatccatccaccaggaatttcactaaatccatcgagagaggcaatagaggcctgggcgaagagggctttggttattggagacaggagaatagaaatatcagccagagttttaaaagcacaaaggcatagacacaacagggcttaccagtcatcagatttccggcgattcctccgagtccgtgaccagcaaagacatcgagggcttcatcaacgccgatcaagaactgttgaaaaaacagaagagctcagaaaacgtagtctagattggaggtggagaaaatgtgaaggtggactaaccttgattcgagtagcgtaattgcacaccgctccaccgacgacaccaaagaccaaagcagcgggagcgccaacgaaaccagaagcaggagtaatggcgacaagaccagagacagctccggaacagaaaccgacggccgaccacttcttctcaagacggtaatcgagaatcatccaggtaagacctccgacggacgcagccaagttctattgttgaaaaggcggaatgagtcagcgctaagatcagacgtgtagtaattcttcgaacaagatcacttacagtcacaatacaggcggatacagctcggaggttagcagaaagagcggatcctctgaagacaagaacacagtggttagtgctgtataggtaagagatgaacatatatgggaaaatgtactaacccgttgaagccaaaccatccgaaccaaaggaatgctgtacccaggataacataggaggtgttgtggggcttgtaggcaagtctgaaaggagggagaattacacaaccgcgcacaaagtaactatcagaattcatgcccaatactgttgactcgagatgacggacgcggaacatacctctcagttccgtagcctcttcgcttgcccaaatataaggcgatagcgagagcagccgttccagaagaaatatgaacctgtcaagtttaccaagagaggggaagaggcgagcaggatgaaatgagtatctgggtaagagaataagcgcaaggaatagagcggaaggtgactaaccggacttccaccagcgaaatcaagtcctcccattacatagatccaaccgttggagttccaggtccagcaggcaatggggtcatagaccagagtgctccatatgaatatgaagaccaacacaggtcccattcggcatctttcctattgcgacataccaggttgaccgacagaatcaattttgggctctcaaagaagtgactttctaggttcgagaatgcttacagcaaatcctccaacggcaatgatgggcgtcaaagcagcgaacatgcactgatctattgcgtttattagattggaattgaaaccgattcaatgtgtgttcctaccggtgatggcttgcgagaagaaaccgtgagacgtacagacggcaaagagagagctcggtattcgggttgatccaatagaaggtgcatcgagaacatttcgcatagcaaagtacttgagatcaccgatgtaagccgacccagtttcggagaaggcaagagagaatccccaaaagctgtattggcatgatcaggtatgagaagcaattagatgagaaacgggatcggcgactataagagataaggaaactcgaggagagctccgcgcagcgcaagccaaggaaagagagaaagagactactcacaaccactggaatgagaccactgacaatccggccatccctaagaacaggaaggacagagcgttcttgcggcgaacaagaccagagtagaagaatgctagaccgggtatctttagatgacataaacagcattaatcgcaatgagttgagcaatcgagtttcttttctctggcaaatattcggtggataagaagagaagcacgcaccatcaaccagacaagagctgtactggtgaggatccaggagatatctcccaaattatagactgcattgtcatagccgagtgcaatgatgtctgtgaaacaaaagaatccgacaagatcacaatgaggttcaagatcgaggaaggagaaggaattgaataaaggacatactctcgtctgcggtgtatttgatggccacggttgccatgttgcggatatgtacgggtgagagttgtactttgtgtaattaaatcgagcgcttagaaagccaaggcacttgctctactttgtcttcggtggaagaaagaaggtgagaactgggtggaaggttgagagagagagaaggaaaagagggagtcaagaaaagaggagaaaaaaggaagaagaaaagagtttatgaggaatgaaccagcatattcagagaacggaagtcgttcgagataagagaaccatgctttttgcccagaaatgggtttgaatccttatcgtcggtgtttcgtcattgtccgcggcatctatcagaatcagaagggatcagccaggctttttcaaactaagaagccaaactttctatgactcgctcgcgatcggtgtaatccatgtctccgacccaacgagatcgaggacaagtttttccttctttcctatctccttcttttgcatagccgttgtgttcatgttcactataacgaacatgtgaatgcatgtagaaatataagcatgtatggaaatgtctgtgggatgcttaaattttctgggcttggccaacgcgcaacattcatggatctctttcttttggcttgacatgcggatgatcgagttgattgagcttccaaatccatcagtgttgttgagccttcttccatctttctcgtcctcttgcggagcttttgtctttatccgaaagataagagctgaaacaaagaaagagtgtttaccgaacgagcggagaaaggtaagtaagtggtttatcttttaatttcaaatgcatttctcactttagagaccgactgcgcatcctgtcttctatctccaactgcttgctcgagcccactctagggttgtgacgaaagctattgggaatcatcgaacataccatctaccctccgtcttgtcatccctccattcatctctctccttcttcctctttcctttccttcactttctttcttcctttcgtaacaacatttttctgctttcctccttttagtttgtaaaaggaaaagacacgcaaagacatacctacatacatatacacactcacacttatttgcacccatgggctttgacgaacactccagatctaggtccagaggtagatcagaccacatgatctccacgggaagaggaggggccggcaacatgagatcaagcagtcaatccaaagatcgctctgttcgtcttactcttgtttttccttgttgttctgtcttcgaaatgactaatgagacatctttccgatcgaacagggagccggagatgacacgttgatttaccagtccgagcgaggacgatcgccccacctgccaagcgttgaacgagtccagcactccggccgaggtttgtccagtttggcgtagtacttttcttaggtctcccccaagcccgagctgataagaccccattcttcttcctttttacccttcctcctcctcactggcacactctcttggcgttcttccaaattcaaaggcggaggtgggttcttcttgttttcctgatcagcccgcactactatagaatcaatcaatcaatcaatcttactcattccttcgatctcaacttccaacagctggcaacattagatctccatccagagaccccaaggaacgtgaacgagagctttccgaacaggcctatgaaacccaggtgattgaagccaggcggagggaggaagcaggccggatccattcggccggccgaggaggcgcaggcaacatgcgatccagatcccagtctcgggacgctgcgtccagatcccctcttccagactatcagcatggccagcctgactcgtacagagcagcccagtctggaggcaggggtggctacggaaaccagtattacccccgggactctgatgtagaaggcctcaagaagttagatgaggaggatgaaagagcgagggcgagctgggaggaaagccacccaaatgaaatctggagttccggtaaaggtctgtcttctcacttcttcttttcgactcgcttttcatctcgttcgatcagagattgacggacgcgccaccggaaatacgaactgctttaaccttcttaaacaggaggtgctggaaacatccaaagaactcacacgaacgacagtgccgctacaacccctgaagaatttgatgaggcgaaagccatcattaacgaaggaaaatccggtcatatgtctggtccgtaggatacgtgatcttactctcatcctatagtttcttcagaaaccagcgaagacgcatgttgaccttgtctttctgtttctgaaccaaccaaactatcggatgagaacagggagagggggcgctgggaactttgttgcagagagtagaggtcggtcccaaggaacgactaatgggtccaatcctgtggatgcagtcaagagaatattcaggtgagtttctataaaacctctcccctcttgttgacgttttgacgtggtgtgaatatccgattgatctgtgggactgccactatttctactgttctcaaaggtcgttgagcaggtccggccgagattaaggttgctgagatagaattgcattctttggatgttggatactgtttattctttttcgatttttatcgcgcctatgattctgaatgtgtagttggaattaattttataatattcctctctcccttccgcaaatttatatctatccttcttacctgacttatttctcttgtaccactcgagccaagacgtgtttctctcctccggtgtccgggttgtgttataggtaattctctcgtcttcctcatgctctcgaatcttctttatcttcttcatctttgtctcacctgcctttctacatgtctgctttttcaacatcttttctcttcgtgtttcgcttttcgctcaatctcgactctgttcggttagcagctgtcggttttagatggagggaccggataggccaggatttaggaaaaatcatgacgtttgatgtggaaaagattacagtcgtagtatccagtctagacgcttacaagaacagagtcccggaatatgtggattcgcaagatagcaaggggatgaatgggcaatttgaaggcgctccgtcgaacgctagaacagataagaacattgagagaaagagagaaagagatttccgactttccagccggccctctcaagagttggcgagaattattgtacggctaacttgggttgtttggcaaagctcggccaccgctcatatgtacatctccttcaagaactataggaaaaacccaaaagagaacgtatcaataaagcgacgatcttctctcggacagaacaaaccaaaccggactcgaaccagacacgaaagagggctgatgaaagcgtctgactgacccatttatctgtgagaaccttgagccacttttcgtcactcgctattcgtttttgcaggagcgactttttgtcggagtcgatccaatcaagcactcttcgagagagcacagattgtctcataaacggaggaataaacctgtcgtgaggttgaatggcccttcgtagattactgatgaacgcttcgtcgttgtatctttcaacattgtacacctgagttacagatcaacaagcgcagagtagagacagtcaccaactgatacatattcagtcagataatggaacccagaggtaaacctggttaacgcacatggggttcacccaaagcaccggcggtgaaatgctgggagtcccgaacatgagagtgtccttgtccgtctaccgagatctcggccgggtttatgaacggagttccgaagcacagaccataccagggtgtggggctcacgaggggatcactagaatgatcggagagacgaacggttaaatgacccgcaactataggattgattcctcgaacatgattttaggaagacaagaggggaaggacaaactgaagaccgacgatggccagactatttttgagctgctgttcaaactcttccttgttcagatgatgagacccgggggcgagtaacagatttctcaaccctggcatagtactggcttcctcgccgttccaagaatcaaacgcgccgacgaattcaactccaagcttggcagaggctttctgaaaaatatcccgggagtacggaaagtgagacgaggacagataagtcgtgtgttttccgaggacccagacctgtttgggacgttcatgatgagggatgatctggatacaatgaaggtgaatttaagtgattgttggattatataggatcacctctattcagaactatctctctactcacgggtgcaaccgcacattcttctatagattcgtggattgagcaaatatcttgagctatgcatcatctcagaggatgaacggcaagacgcgaagtttatgaactctacagacaaaccttcgatagagtaaccaatataagtctctggatcggtataatcatatttttccggtgtaatagtccctgttcaggcgagcagaagagggcagagacaaagaagagttcctgttgagacacgaaataaatgcgttgaattaagagtctgtgaagatcgacaagataataccaacactttgctccgaacggatttcctcccttgtgaccaaagaactgagcagagtataggactgtgaaggccggaaggacgtcaggagaattcatattggcaagcgcagagagaatgaggcgagtgactgacgttcgatcggtagaccgagagtgttctttccgtccataacacatccccagtcgttccagcatgcctcgagatcttgctgcgagagaagaattgctttggtttggtttggaaacatcgagtaaatcgactctatgatcgtgaagaaatttacagcttgatcagcccgcaagagagaagtaaaattgatcagacgttccaatagagagaggacctagaacgtacggacgaatgataggtccctagcatatgcataagatatgcccagcagatcaaaagtccttaatctacagatagcatgtccggaagagatagagtgcattgatgaattatgatacagtggagtgcaaacataaactatggagaaggatggtcgagaccactcacacagatcgggcttagagggggtataaacaggggagaagaggaaagagagcggacgagcaagtagcggttaagaccggatggaggtagaagatgcgcagagggcgaaaaagagacaaacaccatattctttcgcctccgggagttccggagtatgcttgcatatagtcccagtcttctaatatgacaagtttgtcttggtttggtctagaagatatatttgagaggcgctcagatagaatagcatcagagcgttaagatagactgctaggacgaaccggcaattttcgagaagtaggcaggttagtagggcagacagcgtgtgccggttgtgatgtttccagatgttatcctctcgatctctaagggtataaatcaatgagagcagaaattataacagagagcataaaaaaggatcagttcaggaatcttgaaagaatagcgagatagaagatcgtgtgctcactgagagctgttatactggtcggatagggagaagatctgggcggactgaagctgatctacaacggaaacatgtttcccagtgaacgtttcgatatcgaccagttgggagaatgagaacagaacaactatgccgagcagtacaagcactcggggggatacaggcctagtcatgacggtggaagtgaggttaaacccgtatagaatgatcgtaagtgaatgactgaatatctgtataaatcagttgaggtatcaacgaatgggtgaggaggtgtacaagaaaagaaacagataagatggagaggtagaacgaataatatcctcaaacaatgtcccgagcagaccacactgcaagtatatatatatatac

SEQ ID NO: 1718 - DNA, 12343 bp, Xanthophyllomyces dendrorhous
gtatatatatatatacaaacacatacatatgtgcacgcacactccgaaacagaaggtgagagcaaaagcgaaacgacatacatatgcagaaccatcgaagtttgaacgggcaagtcgatcataccgagacgggcaagcacaggacaacgtggttagtcacctgcaagtccgctcgatcgctcatagctcttgtcggccagcgccctcctctactctgacttccggcccgccccggtcgtacatgagagggcgagtggtccgtcgtccgcagccgtatagtcaggaaccgagaggatccatatttcaacgatgtatcgagttcccagtgatccggacgccgctgacataatggtgtgtagaagtacatatcgaatcgatcacgtgatttgaaatgtatgacgtgtacttggttacgcctccgtaacctgccagcattcttgtgttcgcccgggccctcattcaaccccaaccggtcttgtcatttcctttctttcttttttttgttcatttttcatcatctttattctagtttatcattcttttcctctccatcactatctattctgactgtccttctctcccattcctccccgttccctctctcctagatttcctaggacataagcaaacgcaatgctcggtcggtcaaggtcaatcagaaaaacttcttccctctcggccgaagatgcttcttcgtccgtagtggaccggacggatgaacaagacgttctcatccatcagcctaccggactcatcaatgacggtgagccccgccttgctcttaatttctcttatgctactttgctcagagggtcttcttgttcaactgacttgatatctactcgctcgtttttgggaatcctcgcccaattgcttcctttgaccggtcgcatgaatccgcttggaccgtcatttttaggcaacacgtgttatctcaatagcgtctttcaaagtgtacgtccttccgactctcgtgacatgcctctcttcctaagactaacacttctcggacgctctgtgcctcctgcctattctacagctcatccatacacctcccttctcaacacttctcgtcccagtcgatgtcaaaaatcatccgtactcccctccctcaacaattaccatcgaccgggccagatgcccggcattcatggccgaccgaaatgaacacatcgacctcatgccgctcgccgcggcctttatcgaaaacgccggaagaagttggcgaacagaactcaaaggtcttcagccaggagccggtgatcgaaagggccagggacttaaaacccttctgtacagtgtgtccagaaaatatgaccaatatggtgatgtaagtcaaccttcttacaatattatcggaggctcaattgactacaacgatctcgtttaatcattctcttcttttctctcctttttcttgtcttttcctcttggtctcgctcctcagtatgaacaacaagacgctcacgaattcctacggcatctgttggacagcatccgcatggaggaatgcgatgtgcgtgccttgctgattttggactaacctcagctggcgcttcttagtctgcgctcgccgtgatatgtactcatactcatccttgatgatgcccattgctaactaggactccctttctctgaaaccaggtgatcaagcgactcaaaggagcatccggcaacccaaccatatccaatgctgatcctcgtcacatatccaccatctctactccttcctctatttcgcccgctccaccttcatccgaacaactatcaaacccctctgatgcgaccaacagcccagtcgacacaatagaatcccccccttccgccgacttgttccccaatattgtgatcagatcggatcctgttcacccggaacaagaacctcaccagacaaatacctctccagcggcccaccgcccagactatcaacgaagcgccagttttgatgacgagagccgcccaacgatgaaagatctggagagtatatctaatgagcaacgtaatcaacaagagcacaaagcggacatggtgtcctttgtggatttgttgtttggcggtcgtttggctagcatggtcgtttgcgaaagctgcaaatcggtgcgtctccctccatctgtatacgacgtccccgttgagtgtgtgcgcgcgaatgattctttatatgttctcaatcctaacctcttctgttggtgtcttatctggttctgaatcaggtctcgcacacatatgaggactttatggatctcagcatgagtctacccgaggaggaacccagagagcgcaaggtacgtgactcctcgtgttcaagagctttcttctttctgttgtctgtcctgatagcgaagcttgattctccgtcaaatagagagaccgtctcaagtccattgcgtccaaatggaaggcaaagctgacaaaaccggacaattatgagacaaacgattcctctgccgtcgcgtctgacgatgaagatgatgatgggcctccaccggccgcctatcagtctttcgcctccagacggatgacaaacgtagaggaaggcccgaaacgagtaccgggtgggagacgtatgacagtcgacgctggcaaccagccagataatctcggcccaccctcgactaacctcggtcggcgaggatcaatttttggcggtataggaagaaagaagagtatctcctctcttggtggatccaaccggcgagcctctatcgctcaatctgaagcagagagtgcaaaggcggaaagcaccggcagcagagcttccagccccggcccaggtgacgaagttgccggtaacggatctgctctctccactactacaggatcttccataaactatgccaatgcggttctacagtctcaagactcaaagttccccaaggtcagaccttctcaagcggcatacatccttcggatcctaggcccttacacacccactcagacctcactctccaaacgagtgggctcgtcctccttctcggagcaagctcactcttctcccaaccttatcaccggtctgaccgactgtctcaagcagttcacagcggttgaagtccttgagggtgataacgcattcgcctgcaagaagtgctggcggtgggataacccaagggcagacggaaagccatggcgtcggggtggggaacatccaggggatgatgatgaagaagacgatgtgagcgtaacggacgggctttccggtgagaacgccggtagtggcggtggcctaggatctatcacggacgtggatgaggcaacggagcacgtggccactctcaaaggaacagacctcgccgctctagaggcgatgactctgaacggtcctgtagaagagaccggttattactccgaaatcgcctcacaaggacccgcccaagctatctccggccttccgccaacaggcctttctaatggttaccacggaaccatccctactatctcacaaacccctctctcgcctgagaccgagttatctactatcgctccctccgtagccccgcaccgttcaaaatcctctctggcgcctcctgtcgtgaagatcaatcaccgaccggcaaacacccgaggaatatccttcactcagcatcagaaccccgagctagagacgatgtacgtatcggactcggatgattcggaagatgacgcatcctccaatggaggcagtcccgttggaggtggaccgaaatacgtgttaagaagggcgttcaagaggtatttgattgtccatcctccggccattctggttatccatttaaagcggttcgaacaaatatttggaggcaaaggattcaaccctttcggaggattcgcaaccagttcgtttccaactttttttttgttcttcttaacctagaaacggtaagtcagactgaagttattgactttcttgtttcccttagactttagaaagttagattcctacgtctccttccccgaagtcttggatattgccccctttcttgcgcctgctagggtcggagcaccggtcacccagctcaatgcgtccagaaagattaagagtgtagaggcggtgtccgatgcggttctctatcagctctgtgccgttgtcgttcatatcggttctatgggtggcggacattacggttcgtgtctaggatgtcttgattatccaaaaaagcatgtgtgatcaaagtctgatacctgtgttgtcttgtttgctcggtcttttgcctccacgtagtatcctacgtcctgagctcccctagtgatccacctcctttgcacacaccctcgagctctcctcaaccccccaagacgggacaggattacctttctcctagctcggctattctgaaacctcaatcgagttcgtcggcttcctccatacggtctgagacgtctacttatcagaaggaccctagagtatggtactattgctcagacactgtcgtcaagaaggtcgagattgacgaggttctacgagcgggagcttaccttatattttacgagaagacttagatgcatctcgccaaagcttttttttcttttctttttttctttctttctctctcaatatccttctcacgtatgttgaatttcttcttaaataaaaataaatcccctcatatctctggacgaaaaaggaaatgaagaaaggcgtcaactgtaatctgcatctcaattatctctctcttcttgtttgcctctactggtttcgttctatactcaacagtagactatcgtgcttgtctctgccggtccatccagcggatgtttctcttcctcgggttcctttccctcccgaaatcctcacagattggatcgggcgggtgtgtttgtttgtttcaggtgtactgtttgtttcaggtgtactgtttgtagcccttatgtgcggcattgtgtttgattccaacgagattaaattaaattcgcagaaacggattgacgcagaacgtcttcgatgctcatctggctggtgaatttcgatttccttcaaaatcttgatatcgcattctttctttcctcctctatacaacttatctgagacccaagagactacatgagatttcctgattgtagacaacactgacaagaccaaggaagaagaaaagaaggaagaacgtcgcgtcccattttcattttttaattgtcaattatggtgttggaaatgacctgggaaggccattgcctctaaatcgttcttctcagagatcgccgttcttctcctcctctgcccttctctcttcatccttctcccactgggctcggatcgacagtcgctcctgctcggtatccagacctctagccaacggccactgtttgctcgcttgaactctaaactcctcggcacgactgctctggatggatcgaaggaactcccagccggacaacacagtcgatggggacgcagtgacggatgtgtcgagcagcttgaagacagcgggctcgacttcgttttgcagcaaagacggggatgcgacgtacagtgcctttgcagacgcgaagacgtgcggtccggaggtggcgtggttgataccgatggactgggcaaatgcctgaacagacgaggcatccgagatagagggagcaagtgcagacagtgtggactggagaatgacttgagtggcagccggaagatcagtcaatgacgatgctatcaaacgaattcggttaaacgtcaatacaggttggcgtgcacagacaaaacaagcggatagaattcaggatatcatgagaagtttcgtactcttttgttggaaatggacaatctcagcaagtagctctgggtgttgaggatcgaaagcgaaagccttgttcaaagccctggaggcctgtaggtatttatctagtacaaccaaagaagaaaagagaatgtgaacaagagctcgaaaaaagtaaacgaaggttcacctgggcttacttcgtcggatagcgacagcatatatcgccagccagacatctacagactggctagccgctcgagcagtctccagcggtttgagaagcttgtaggctgcctctaggggctgagatgtattgagaagcagagcaccctgggggtcgttgtctttaggggtagcaggctccgtgggggcaggaggcgttcctttcttgtcagtagctgatcaatagaaaccagcaagggtcagatgtctagaaagaattcaaagcaatgcgaggaagcagattagaacagaagcgtacccttcttagcagcagctccagctttggcagcagccttcttggctttctgcgcggccttctttgcctcctctgcagagatgccatctttccattcggtgtcaagaagaatcgaaagttaacgtctgtgagagacaatactgtcacatcgcaagttaagacaaaagacctactgtccaaggcgggtgcagctgatttctttgccaactcgggatcatctgcaaggttgacgtaaatctacacccgatccaccatttccctcaagaataaatgagcaaagctatcaggatagaggaatgatcgagacgtgacgaaccttggaggccgagatagcggccttgacatatgtgggctgcgatcgtagatcatttccgtactcgatagcgctaaatcgagtatgggtataagcacttgatcagctttgcctgccagccaaccagacaccgtttcgagctgaaatagatggagcttacttgagatatgcccggaaagtagactttctaatacagtatccgtggaagtcaaactcatcatcttcaaagtcatcgtagacctgataggtgttggaaaccaatcgcatgagggttgttagtctcgaacgtatcttctctcacaaactggaacgcgtaaacgaacctttccgatctgatggtatctcttgagggccataccgagatttccactgttcaggttcgagtgcgcatcttcgtgtaagaaccaaaggcactgcatctcgacaagatctgccgcagggctcggcgcatccttctgtttgtgggtgaagacgcattttcgcgaaagggagagaagataaacgagaacaacaaaaaaaggcgttcagattgattgttttatctgacgagcgccagttttgcttggaccaagtgaaagaaagtagatgacacagaaggaatagataccttggtgaaaagtcctaggatttcttccgccctctttccctcgccagctctgagccaatactttccactctttgtgttcaagaatctgtcctgtccgtccatccttcttgcctcttccatggcgatggcagctccccatgcgtccccagcgtattttaatacccgggctttggctgtccagagctctgggagggttggagtgtgctcgagcgccttgttgagcacctcgagagaccgttccggagagggattcgagttgcctgccggatgggcgtagtgaagcgcgaggaagtagtaagtccatagtagcgtcgtcgagggttggatggaatcagttccgtcttctgaaggcgatgacgtcaaggtggaactcgattcgagattgcgcatgtaggactcgacgatggactggacgatctccctgttctgggacgagacagtgtagagaggtttgatgtcggagaagagactcgggacgcctcgttccaaaccggcagctaggtaggcagagatcaatgacttgaattcgttacctaaaagacgaagaagacaaagatgaagaaagttggtaagactacgtgtatgagcggggattgttgcgagacctctccatggtccttaccggtcgcgtagttcaacgacatccttctagggacagttgctcttgggtacagctcgcccatcaactctaaagctcgcaaaatcttgggtcgagtttcatcggtgatgttatctgtttgaagacagttaagagaagaatgtgcgtataggtaaagaccaccgggtcagtcatgctcgagggatctttgactgtggtggatacgatcgagtgacggaaagctcaacttaccgacatccaaccctttgttgagcaagaaacccttgtagttctcgatgcaatcaggatttctgtcgatgagcgctcggaaggcgtcttcggcctcttcctttctaccaagcttgtatagtatccgcgctgacgagagaaggaaaggttagcgaatgactcatgacccacgagcaagggccaaaggatgctagatgatgtcaagtttcgttggagacgaacctcggtatccgatgaccttttcttggtcgttgattcttccatcctgatcgaggtcattgagaagggtgatcgcgtccggccatctctccaacactatcaagttctggatccggagcatacccaattcggagtcttcgatttgactcggcgggttgcccttgattgttggatttcaagcttgagtatggtgtgtacaatggaggaaaagaagggggaaagcgcaagcagactgacctttgagatttcggcgagctttttcagggtgtcttcggctttgtccctctgtccgtcaaggatgtaggccatggcgagcgcagcccaactctttcgttcgttgggtcggagctggagaagggtcactcggttctgaagatgaacagggtagtttcggaggtggagggcgatgtgtgcgttgtctcggaggatttgttgcgagttctaagatgacgttggacacatcgtcggttggtatgtatgtgttggttagcctcctgaaacgtttgtccgaggacacaagatcacgggtaaatcaagaacaagaaaccaacaggatcacatttcagtccctgcataaaggacttgaaggctttagtgtagtctttctgggcacgggataacctggtatataaatttttatttaaaaaaaaaaaaaaagattgcacagacagcatgggacaagacgagtcagcgaatcttgattgaataaacacaagacaggagttgacgaaagcatgtacattcccaacacgtgccagcaaagctgactttcgtgatcctttcgaacacctagcatggccagctctactccttcggcctcgtaatcggcgactgtcttgttcacctccgggtttgccggttggtggaacacaacgagggccttcatcgagatagtttctggcgagataagagaacggagtattagtctgtgcgggtgtgatgagatgattgagggatgtatagtctgtggagataaatcaaggatgaatgcgtacggccatggttcggagactttttgagaatctcgtcggctgctttgatggcctatgtgatcgaggtcgaaggagaggaatgtctgagactggtaagcaatcaaggtgttctctttgtatctgttaacaatcaaagacttggagggttcttacctttttgtagttcttggtctcgtagtgagcctgagatatgagatgacagacacaatggacgagatcaaacaaagagaacaggaaggagaagatgatgagctttcgttcttctttctttttttcccttttccttttgaattcttttggaagtttgaaccagaagaagaagatgtctctaggatgatttgaagttgggcatatccacaaggagcaaaggtattgcttacgagaatctgtctgaacagggtttcctgcttcggagcgagctgcctgttgtctgtgatgggtgccatgatgacggttgtacaggggactggcagatgggctgaacacagaggtggtagtagtagtggtggggagggggagagggatgggatttagatgaatagaacataaatattcatatattctacatattttacctaaattccatagtcgacctcaaatttcttcttgttgggtctcgcttctttcgtttccctcaagccatcaacttcaccatactatctctcgttcttcttcatcctgaccagtgatcccccgtcgtgaggtcccctttattcactaaacctttcaattaaaaactcggtgagtccttcctctgtcttggtgtttttttttcttttctttcttggtctctggtgatcgcgagtctcatttgggcttgagccgtctttctttctttctttctttctttattgggctacaacagatttttctatcatgtctgccgctcctgctcccaaccccaaggctttcccccttgccgatgccgctcttaccaaccaggtaaggaccaggctgctttctgtgtttggtcattgaaagagacggaaacgagttcatcgtctgaccgattggacgaactatttgcttggggacttcttttatatatatatatatctctttttcagatccttgatttggttcagcaggcttcccacttcaagcagttgaagaagggagctaacgaggccaccaagactcttaaccgaggagtgtgcgagttgatcgtcatgactgctggtacgtatagttgagagagagagagagagagaggagaaaactctttgtcaatttttgtttcatttcattgcgtctgttcaagatactttgttggagagacgcgcgttaggcgtttcagtttgagctgatcgagtacactttgtttttatctgtcgacagacaccgagcccatcgagatcttgctccaccttccgttgctgtgtgaggacaagaacgtgccctacgtgttcttgccttccaagaccgctctcggacgagcttgcggtgtgtcccgaccggtgatcgccgcttcgatcaccaccaacgaggccagggagctccaggcccagatcattgccattaagaaccaggtcgagaaggtgagttgttgtccagagcttcttgggtgtcgaagaaatcgttgcctcttttttcaatgtgtatattgatttacatcggactgatcgcgagttttttttgtttttttttttctttgtctgttttactgctctttgttgcttgtgtctcgttcagctcctcatctaagcaccagatgttgagaacgctcgatcgttctttttatttttcctccttgcatatccttttttttttccttctagaaggacagaaagaaaggaagaaaggataatatatgaattttagaaactttctagttgcgttttggaggggaaggaaggcgcccgcgttcgtgataggctatgtgccgagaggggggttaacaagcgagtgcaagtaccaatgcaagtccaaggacgacgaatgcgcacacacacacacacacaaacgcacatatatatatatatatatacaaacctaaaaggagagaaggagaaaacggatcgacgtgtgaaatttctcaagaaaaagatcacacaatcgaccctctttgctgttggcttttccattttcttgccctcggtgtgtctattcttgactgggatgatccttgccgaggccgagtcgggtcttgatgccttcccaactgtcgagcgccggtcggacgtcgaggaagaaggaaatgtcgccggatctgccggcgtaaaagtcgatgatgtaggtgacttctttgccgcatcgggtgaccagccatcgatgtgtgtcgaacggcgcttggtagctggggaccgaggaggaaggaacggagagtgtcagtgataacgttcggtagatgattgaagggggaagaaaagaaaagaaaaagaaaaaaaaaagaagaaaaaaaaacccaaactcacccccaaagaactctgttcataagacttctaggcgtccattcgccgggtgtgcctctgaaggtgacgagtttgacgcccccacagtcctgtccgccgagacctttttcccactcgaggacgtccttccaggccttttcattgacggcgttatggatgggaacgatgttcttcatgtcttcctctctgggcttgtggttctttcgctgcatggccgagaagaactgggcctcggagggatagacccagtttgtctggtctgggtcgtagtaggacgctgcgtctgcgtgtggggagagtgtcgggagggttgactgggagtatctggggatcgaggacgtcacgcggtctgtgccgagggaggaagcagtggagggggaggaggaggtaggagaaggagaggaaggggaagacgagctgaaagggtgaggaccggaggattggttggcgagccaacggagtcgggtggtttcgtctaccggacaagattctgccggggctgccggggtggctgggattgctggggtagaggaggcgccagagaaaggatgaggggagggagaggaggaggaggaagatgtctggttagccagccatcggagccgagtcggttcatcgaccgggcatttgtcttctggagtggatgtaggctggaggggtgatgctatcgggggggtgtttgtgtttgtgtctgtgtttgtgtttgtgtttgcacttgaaggcggggaggaggagggggaagatgctgatgctgatgagaatggccacatgagggagaagagagagagagagatg

SEQ ID NO: 1719 - DNA, 930 bp, Xanthophyllomyces dendrorhous
cggtgtaactggaatagcctggttacggtgtgtgtatagattacgtaagagagagtgtgcgtgccatgtaccgtgtacgtcgtatacacagaagagagaagagcatttgcagtggagagcacaacggagagggagagagggagagggagcagagagagggagagagatagaccagcagaaagaacaataggaaacaggcgataggcaagatacaacatggaatacacaatgtatagtagatagtagatagtagatagtagatagtagatagtagatagtacacacactaggcaataaacacacaagagagagagagagaaggaaaggaaaggaaaggaaaggaaaggaaaggaaagagcaaacacagccacagccagacgagggaaggcgaaggcgaggcaagagaagagaaggggcaagagaagagaaggggcaagagaagagaaggggcaagagaagagaaggggcaagagaagagaaagggcccttggagcaaagagtgctagagagagagagcgcgcgttctgctctgtggagcaacaacggcaagggcaacgggcaatgggcaagagaaaagtcagacgacacaggagggagggacaggatgaatcagggcacatcagggcacatcgaggcacattggagctcactcgggcgaaacacaaaaagcagaggacagggacaggcaccgaggtgaacgtgttagggttatctgagggaatgagagtacaacagggtgagtcagtgaattttctccttaccgtcctttctgtagtgtttttctagtgtatttctttagtgtatttcctagtgtatttctttagtgtatttcctagtgtccttctgtactgtcttttctagtgtgtctgtagtgtgtctgtagtgtgtctgtagtgtgtctgtagtgtgtctgtagtgtgtctgtagtgt

SEQ ID NO: 1720 - DNA, 1866 bp, Xanthophyllomyces dendrorhous
ttcctacccaatccttctactcttcccctcttgattcaccgttaccaccattattccctcccctctccactcttcaggccgcccgaaagtccgcccccgcccaagccaccggaggtgtcaagaaggtacgcgtcttttcttcttttccgacgcgtcggattcccctcttttttcttctttttccttcctcgcttactctttcgtgttctcttcattcatctctcttctcccccctcatagccccaccgatacaagtctgtcgcgtcctgaacccttcctaatcgccgtccttccccatattgacacgtctcttttcttttcccatccatccttctcgaactttttcttctgcccccaaggcccggaacggtcgccctccgagagatccgacgataccaaaagtcgaccgagctcctcatccgaaagctccccttccagcgactcgttcgagagatcgcccaggacttcaagactgatctccgattccagtcctccgccatcggtgccctccaggaggcctccgaggcttaccttgtctctctctttgaggacaccaacttggctgccattcacgccaagcgagtcaccatccagcccaaggtcagtcgcacatcttggcattttctttcccttttctctcttttccatcgccagccgtctctcgctcaatcagattcctttctgttctctctttctctctcacaggatctccaactcgcccgacggctccgaggagagcgatactagacatgttctaacgctccgtgacaacagactgggccataccgggtgagtctctttcttatttcttccctcgttcaacaggccatctcaccaatcatgatccctttctcttggaacctccccccctctcagcccatcttgatcgccctcgcctatatgctctctctttctcgttcttgtccttccttttctgtctcttgttttgacaagaccggtctatacttttctttctcaatgaatattatatgtttttttctctttccttcttttcttctttcctcatcccacccccttgccttttctcccctttggcataccatcaaccaagagaaaagatcagtcaatcaaaacactccccccccctccgtttacatcgtccctcatctaggtccttgaggggggtttgacctacaaagcaaaagagacggatatcattccatccaagtacatatatactctaaggggaagaaacttttttcttcttcctttcctcccttgattctctccctcaagattattccccctccctcaaccgacaagctccttcagattccttcccggcttgacctttgcgcctaacgtatcgacctcgacagctctctcctcaaacagaccctccagctgcctctcgacctcgtcgacctcacaccggatgaacaacccctgtagggcggccatgctgatcgccttgttggatctctcctttttgtcgaggacgaaccgaccgacgagcgccgcccgttcgtccacctgaccgttcaccctattccccgcgctccattcgtccccgccggtgttcccatcgctgtcgccgtcgccgtcgccgtcgccaccgaccactcccttgtggggccggatcgaagccgacgtcgaggaaccgtagaaccggcggaagagctcggaggcttggtacgcgctcgcgtcacccaggtaggcaaccacgtcgacccggcccggtcggacgagcgccgggtcgagccgcgacagatggttcgtcgtcataaagatgatccgggagtccgaagaggccaccccgtccagcgtgttgagcagaccggaaaaggtgatggatgattggtatctatcggtttgagcgtgtgtgggggagtgggggtgggggtg

SEQ ID NO: 1721 - DNA, 2625 bp, Xanthophyllomyces dendrorhous
agaagcagaagcagaagcaagaacaaaagcaaaagcaaaagcaaaaaaaaaaaaagcaaaaaaaaaacgagacgaacccatcttcagatgtctgcgatcgcttggaaaacgcagcgtcgacatcctcaagcaggaccagacttcgttccggtaccaagctcaacaagagtgccagcttgtcatccgtcatccctcgctccgatagattgagcaagcaaatgttgtaacccaacgagccggcgagtgcttggatgtaggatgactttccagaaccaggcggtccgtggaggaggtaccccctcctgtacgggatccctctctccgcgtaccatttgccccgtcggaggaactttaagagatccccctcgacatgctcgctcacccctctgtcgagcaccacactacccatctcccgccgccgccgaggcttcccgaacggtcgccattccacaccccacgcggtgtagaccaccgtcttgccttcttcaccctgttgggcgagcgcccgggcttcggacaacaggtccggaaacaactctcgatcccgcgagagcgtcgtgagggtgagagtctcccacggggaaccgttatgcatgtccatttgtttttgtgatcgatccctcttgacctgtgttcaaccgagtttaagaaggggaccaaaaaaaaaggagaaaagaagaaaagaagaaaagaaaagaaaagaaaaggaaaaaaaaagaacgattgtttttgttatgttctgttgtactttgtttcgcgtgtttctcacaccgtcgagtaccctgcgcgcacacacatacacacacacacatatgatcgatagacatacctgcatccaagccccttggtacttgaaccaatgggttcccggtccgggcaccaaactaaacaaagcctcgctcgccccgttttcgtgtttcttgtagctagtttccacactaagctcgtggctcttgatccctttgagctgcccgatccggttccaccagcctgtcggatccctcaggatcgagagcggtccgttgccggcagcgagcgagcctggcgggatctgttgggagttgaccgccatccattcgagaaaccacgggtacgcatggtctttcgatgagatctcgagtgacaccagcatccgccgttgggctagtgtcgtcccgagtgtgatcaaacgtcgaccgacggcgagtcctgctgttattccctacagagagaagaaaagacagcaacaaagaaagcgtccgggtgaaggtcgtgcggcgtgagaaagaaagaaggaaaggaagaaaaaaaaaaggataaagaaaaagaaagaggagaagcgcaccatcagtccggctcctgccgaaaagtaaggactagtcgaaagtagaaaggaccatcaaacggtccagatccgttcagtataccaagctgcctttcgcctccccgtctcttcctaagcgcataagagaagaaccttacttttgatccattagactcttgatgaacgacacctgagcgttctctgaatctcctaacggggctgaagtcgatgtggaggccgccgaggtcgggaggtctgttccggtcgagctatctgatggaactgccggggcagcggcggcggtggtggtggccatctgttctgacgggcgagctgtagccggagctgcagccggaggtgttctaaacatgacaggcgagcgagcgtgtgtgtgtgtgtgtgtgctgtatgacgaagagcaatcctctgttcttccttccggggatgagcaacgagagaaagtaaaagcagaaaagaaaaaggaaaagaattggacgaaattccaaattattttctcctttttctttttctcctttttctttctcgtctgccatcatcatccaaacatcctatcgatcgtccggtcgttctcttgcctcttcttcgttcagttcttctttctacttcctcgcctttcgattcgttcagcatgtcggtccttagaagggcagtcgcctcgtcgtcctcatcggtcacccagtccgttctctcggcccgtcgtcagatctgcttgaccgcctctcgtacgtttcagtttgccttttctctttgttctttctttccagcctttctttctttggcttgttcatcttgcgtccaacaatctgaccgttcgtccatcttgttgtgtttgtgcccgtgaattctctcttccctcctttcatctcaaaacgaataaacaaaaataaaaagtctcggccaagaaggcaaagtccggtcgggtcaacatcaactcaaccccttcgatccaagaactcgaccaactggccgaggaggaatcacgacctcccgccgagcacgacgccaacccaaactcgttcttcaacctaggcagagacatcatcttcctccgaggggccaccacgttcttcagaaacacccggtcgaccatgcttcgagatcttgccaaccagatccagactcctgcagagacaagagagtttttcgagtacctcaagatatggaggctcaacggtggtcagatcgattgggatctcgcacagctcgtcatcggttcgttctttcttcttttcgctctctcgctctttcttttcttagggaatctccctggtcagccgatctggttgttgatctctctcccc

SEQ ID NO: 1722 - DNA, 13967 bp, Xanthophyllomyces dendrorhous
ctccccccctttccctttcacagagcgatccatggcttcgtcctccccctaccctgtcctatacgctttgatgaacccgacgtcgttcggtcttcatatctcttctccctccagaccggcctacatcgtcccgacttacgaatcaaccccaccgagcgcccaagaaacttccgagatcctcaaaaagatcagagaagaggtctctacccggggagacatcctcctgtttgaccgaagaaaacctcacttcaccacgctttccactcctacacccatggccaaggtccccgcatcgatcgagcccgtcgggtcgatccccgtcccggcgttcttcagagatttcgtcaggttactcttcgtcggctcagaagaaacaggtcgctcgagagatctcaccaaggaagaagtcgcctgggtggccgagcagaccgacagacatctcccgctcgatccggtgatcacctcgttgttgctcaatcattactcccacctcccggacaacagcggacaggcagcgtacgggaacttgcagagcaggctgagcgcggtcgtcccggaaacgttcgcccagcaggagttgaccgcagaggagaagagcgtggtgagagatcagctggaggctagcgcgttccctttgaagtgggctggtgaagttctgttgcccctggctcaaacccaggccgaggcatgagccacatggcaagagaaagaaggaaagtctgaagggagccagatggtgtcttctgtttagacttgtcaacgataaaaagaaaaacaaacaaacaaaccacagtaacagaggaatcatacagaataaacaatacaaagacagagtttgtaaagtaacaagagtatgatttggtcgttaacatgatatacatcgtcaagatagacaactattttaaacacgcaagcgagctagcgatcattccatgacaaccgacgtttcttctacaacaggagcagcgaccgattccttgacagtcgtctccccgcttgcagactctacctcttccttagtcttctcaccttcgacctcatccctggctgtttctacctcctccgtcatctccacatcttccttggctactgcgtcggtcttttccacatccccttcttttttctcaatgagctgctcctgttctcctttgtcatcctcaccgtctccttctttgccctctttctcatcttcctcctttttctcctcctcctcctcctcccccgccctttcttcctctactgcttgatcaacatcgatggtttccttctcgtcagcaggcacaggaacgacggatgctatcggcgatgctgcttctgatatcggcccctgttccggaatcggtgtcaccgagaccacactggcaagctcctttgccgctttctccgctctctcttccttttcggccttttccgcatcgagcagcatcgacacgtagatcggagcgatgttcggtctgcccgccatgggcttcactctactgaacagatgaagagacgaccgggtcgcttgtcgtacagctcggaacgtcaacgaagcttttctcttttgtcgttatcatttttatcatttaaaaataaaataaaaatatgaacagatcagatagttgtttgacaaggcccaacggcaaaagacggatcagagtaaatgagagacaaacttcttcgatttgtaagagttggtcatcagtcttgagatcgggaccagcgatcccagctttctcgagcgatcgttttcgattgcttgccaggaggtcttccctcttcagtcgagttgcgtacgagtttatctcatccagcctggtgatatgtttcgaagcaaggatatgaaattacaacaacaagaagaagactcaagtccgatcagctttcgacctttccattcttctggttgtcagtcttccccgtcctttggctttccccctttgggcacaactcatctactcacggtcttgggttctctagctgatccaatcctgtcagcttgttttcctcccacagctcactcaacgcgggcgtgccaagcgcgaactgcactcttggagcaggcgcgttctcgagtctaattcgctttgcacgaacttcctcaaggtctgaggccgtcaatggcgatttgtcatacggcggacatgccgagtctttccaagcactctgtgtcagagcgataaaaacaaacaaagacaccacatcagtctaccgactttttgcatcttattttcataaggaaaggcaaaagggaggagagtttcaagacacacccatcgggtttctttcttcagcacgtcctccattgttttcgaaaatctgttgccgagaggccacgtcgcgttgatctctctgaaacacgcttcccacatggtgttcaccgatttgatctggtcagacagaaaggcaacacgagagtagccaacgttaaggtcaaagtctggagcgaacactatacgaaaagatgcaggtcgattggcgtcagaccacgtaccatttcttggtccagcgaaaagtccatcattttggttttggcgatctttcctggtccgttgggtaaaccctcggatggaatgaactgccgaagaaagtggagaaggataagggcctgaacgagaatctgtcgacggaatgcgacgtccgatagctgagagaacaacaaaacgaccaaggagtcggtcagagagacagacgtttcttgataagcatggctttgctatcgacctttgaaaagaaagaggagtaaacaaaagcactgatgcgcaaaaaattgacgcacctcaaagtcaagaagacccggtctggttaagaactttgctgtgaaaatctcactcagtccgctcaactcatcttcctcggtctcttctctcgatgcaacctccttgcctttctttgaaccatcgcccgtacctctcaaaaccttttcgcgctctgttcgttccgagaacgtacggagcactcggtccaggcgcatcatgaactgattgaacgatgatgccgaggagagtggggtagagttagatgtaggagtgggtgtgaaaacagaggtggcgcttgtcgaggaagatgttgtcaacagagaaggattggtgaaatatggctgcagacaccagaacgacgtgtagaatggttctttgagttcgactgaattggccatcaagatcggcagccagagaggagagacgataggagagaaaagggtcaatccttgaggctgtcaaaacaagcaaagtacagacggaggagagcgagacaaaccggtgggaccgttggctttagccttttctgaactcgtggcggtctcttcatcatgggtttcgccctcctccagttcctccataatctcgccctcatccttcttgtcggaatcttcctccttcttctggtcagccttctcatcctcttccataacaacatccttttccttagcctcctcatcacccatcggtttctcgtctttctggagatcttcgaaatccgtttcgttctttgtattaaaatctccacgaaggttgactccactccgtgcgcctagaccaaaagcagatgacatgaaggacagaattcgaccgcaaaacagcgcgtcttgagatttagagagccgggagagtaaaacgttgcatgctctaagaagttgaagaccagttgtcttttcctgagctagtggcaggggctgaatcgatcgtagaggcgagagggttcgatatcagcaagagcagagagatcgacacggagagtgaccggaaggaacggaccagtttgaggtcgcgaaacctaagttcgagaaattcgaagactttctcgcatccttgaacggtaaagacaccaaagatatcgtctagtagaaagtagggagccttgtcatcgcatttgcctaggtgtaaagcaacgataagacgttagtaaacaccagatttagccatgaatgtcttgtcatattataggatgcaaatgctccagaaggaatataacagagtagactcaccgatatgggtaaaggcaagaatcaagtctaaacgcgtccgaacagtagcgtagaatgtgtcagtctcgataggtgacagatccacctctttcgtctgagtaaatgagaacgagtttatcatttgaacgaagatgaacattgatagaatcagatggagggcattcagctaacggatgccggtggccagaacgaattcggagagaaagtgaaaggagaagtgacgaacggcgagattcaaggtttcttctttgaagacccggactaaaacttctctagccagcagaccaaggtcatctgaggtttgtcctaatgaatcccagattctctgagcttctttgaccgaatcttgaaacgatgatctagatgcgaggagattgtccgacgcctcaaaggatgccttgatggactgctggaggagggcaaacgagtgatcccgggcttccagcgttgaaaggccaaccatgttttgtccctgaatgtgagagttaggcctgcttggtatatactcacttaagactgtcccttcagagttgtatttataaaaggaaagaagagaacgaaaggatggccgatgggatgctcgttagatgctgaatcagtcgaaagatcgaaggcgccgaatttcgagctatcttgcttttcgttttcacccacgaacgtcgaccagtctggttctcaagcttctcaagctcatctttctcaatcatgccgttcggtcaacttgtagtcggtccgccaggtaagcccgtgtttctgtgaatctccatgctagtaacgttgtgctcaagagtctcacgctggtcttgatcctcgtcgaagctaggttccggtaaatcaacctattgtcatggcatgcatcaggtatagtaatcaccttctcttccgctttctctccacagtctgatggcgggtttaagacgatcccttaccagctggtttggttctgcgcttgttctcataattgatccattcaatgctcccaaaagtttctcacagcgctaaacagaccggtccacattgtcaacctcgacccggcgaacgaaacgctaccttacccatgttcgctttcaatctcttccctcgtcaccttgcaagatgccatggacgagtttggactaggaccgaatggagcaatgctttactgtatggaatatctagaggagaactttgactggctagtcgaagagcttgacaaattggagggaggatacttcatcttcgatatcgctggccaggtaagcagaggactctcaaagctttggccgtcctcgaagccgagcataatgcagctagccaaccaagtagttgatgttataacaggtcgagctgagtacaaatcatggatctttaacaaggatcatggaccgactaagaaaactagactacagggtgcgctcttctccactttggttctcatataagcatccctgttgacccactatggccgaataactttctttcactctgtaagctggcggcagtacatctctctgatgcatcgtacctaacagacgcatccaagtacatctcagtccttctcacttcactgcggacgatgcttcagttggagatgccccatatcaacgttctttccaagatggacatcatcacacagttcggagaccttcgtaagtgtgactcgctattctttccttgtcatacaaatctatattcataaatctcaaacatggctgtcttaatcttgttcaatagcgttcaatctggatttctacacagaggtgcaggacttgtctcagctatccattctactcgacaaagatcctaggttatcaaagtttggcgatctcaatcgagcaatttgtgagatagtagaagactttggtctggtaggattcgagacgctagcagtcgaggtaaatgttctgcgctcctatcaaatttattcttctttgtcttacagctcataaatatggccgttctgcgcgtttcatcacaggataagaaatcgatgctgcacctactcaagattcttgacaaagcgaccggatatatttttattccaccaacacaaccctcttcatcttctgcgaccgatggatcgccagcagatctctttcaaccatcgtcatcgtcatcaagaacgcctaatgcggacgccttgtttggctcgatagcgggacgcatacctggtagagatatcggcgacattcaagaaagatgggttgatcgaaaggaggaattcgatgagtgggagagggaggaatggaagaaggagggcgaggaagcaaagcgggttgcagcggctgccgtaggcaagagaagaggtggaatggaatgaaattttcgttaccgatagcagtagaggaacacacgattgaccaaagaaagaaaaaataaaaataaaaataaaaataagaacgttcctcatccctccagcattggacataacatgtatagattggagggtgtggccttctaatcatatcctgatataagcaagataaagatagcaaaccctcatgttggttgagttatttgttgataacaagcgtcgtatacgatctcctttctgcgtccaccgtgcgtatgagttacggtctcgttcggttgtaccataggttttgcgctaaaaatgcatagaatccaggtggtttgtgacgagaacgatgacgattgcaataattcgattttttggtttctcatgatttctctcttcagaaccatcatttggcttccttcctaaaccttgtactcatcagtatcatttatacaactatggctccgcccagaaggaagcccctcgatccatccaacgctccaaagcatatcaaaaagtccaaagcacccaaatacgagacgttcgaggaagctcttgattatggtgttgagctcgaagagaaaggcgaacgatacaagaccggtgagaaggtaggctctctcgagtttcttttttccgatttcatcttactggtccagatatattgctgattcttcgttttgttttctaacaaactggtcgatcaatgtaaacaggccaaaaggttctatgaggaagcctgcaagctgtatgagaaggctattgaatttgatcctcaggcattcgaaggccactacaacttgtatgtcctgacaatttcgctatatgaccaagacgatatagctctagcttgctgttccaagcctcttagatacatctgattcttgtttctgttttcttttgagctcagagctcgaacgttatataccatctcgcagattttccttctcccaccgctttcatccaacacgctcgagatggcaatcaatcaatatcgactatcacaaaagctgaccgagtccccaatcctctggatagacgccacgttcaatcttgctgttgcgctcctcagtctggcagacttggtagaggatcttcaagaggctgacgaacaagacgcagaggttgagagcttgcgaagagaagcagccggctggttgacaagcgttgcagaaaagcaggaaggtctgttggaagaaatggaacggcaaaacgcatcagtaggagaacaagaaagtattcttgacattggagaagagcctgaagaggacatagataaacatgatcacagtccagatcaagatgaggtgcaggccgagaatggttctggacgggcctgggaggagactgtgacgacgccttcgcttgtgttggatacgtacatcctcctcctatcgacactctcattactgtccaaggatttctcagcgtcacgtccttctccttctgcactgccggaaatccctccaatatttcaaaaattccgcgtactagattcactctgcgcccggtcgggtgcgcctcggactctagacattttggtagcagaagcatctgcaaagctgtccgtcattcgatctgctttcgaggacggccgacccggttggatggaagagtgtcgtatggtgatcgcaacgctgaaatccagctgggaaagtataaaggacatcgatgctcccggttcgtcaactcataatacaccacgaatcgaccaggaaactcgaatctcggtggtttgtacactcggcgacgcctacgcgcttcttgcccagctacaaagactttccgctcttcagatacttcttcagacccaaacagctcctatgatcgaacaggttcaagagatctggacaacactttctttgtcgactcagtgttcgtcaacagcactctccatcctgacgccttctcaacaggcctttccatccacaatgcccaaccgaggggaatcatcttctgttcttctggcacttgcttcgctttctttacagagggctgttttggcggatgaaccgtggagaaacgcttcggccatcaagaacaaagctcagttgatcacaaattctatcacgtactcaaggagagcagcagagagtagtggaacaggatggcagaccgcgcttgctccttggccgtcggtcatgggttggcagtctcgtccaagctgggtcgatgggggttgggaggcggagcaaacagcgtacgtcgttgtgccttcttttagtcaatattctctagaatttgtgcccatcttgctgattgattactcgggacttccttcttcatcctactccatgtgcgtttgcgtttgtatctctctacatcgcagtcgggaggcaatcctgtcaaacatccgttcccaattctataaagctgccccggaagctcttcaagaggttgaaaaaacgttactgagagtcaagaataggttacaaccgactgacgttcgccggtttgtaaaagagctgattgaggatcacggaattcttagaggcggatctggcggggaggaagagcagttttgggagaacgtgatcaatgtgttgtgatgtcaaaatagggatcttttcttaatctctgtccagagcgaatgacgaccagacgtcggatgagctattaggatgtctattttgtagaagggagtctgcgagcgttttatgagaagcgaagcaaacatgacgtcctagcacgacctgaagaccatcaaaaatgttctgcaactgaaatagctgaagtacgattgatcggcgaaactgttcaatcgacgggttgagcgaggctacaaccacatgttatatgaggcaaatctttttcctaaaaggtttcattatatttctgctcaacaagcagttgatttcaaagacaaacaaggtcaaagttcagtttcattctgtcttgaacttcctccacgttacgattaacgaaaggaagaagggagagccgcctagacttactcagttccaagattgatatctcatagacacctttctgtcctgctctctatctctttcccttctttccgaccggcgccttgggctcaaccacgacctttggcttttgcttcaactcgaccgcgccttcactcatccaatcctcaattccactagcaaacggatcatcctctgagttttcagaacctgtggtagcatatttcgatttgaaccttccgatccttccgaattcatcttgaagatccctcgaagagaccttgttcgggtaccaaagcgggtggtttgacagatccttggtcaacttgtagaccgatcgaggagaggtcgtgtagtgagtgaatgaagaaccatcggcaaggacgacttgttgagggaacagtggtggttgagccggaggcaacggcttaggcttgtagacatgagttcgaccgagtttgctaggacacatggcatgtttcaagtcggtctgtctcctagctttaagaagaccaaacattcgtttcgagcttgccggagacggtctcatcttggttccttcctaggcgattaagcgtgtacaagagatagaggtgtattaggggtttgtgcaagtggaaggtgtgttctcttgtttggtggtcgtgatgattttgatggtgaaaagggcaagatattgaaaagcccagacgagccgctacgatcatggttacactcgattataaccatgatcgtaaccgctcatctgagtgaagactgcatcgatcgaaagtacatccagagagagcaatagacgaaaggtcaagagtcggagggtaagtaaggatatgaaatgaacgaagaactcttgtggaacaagaccctttcgtccgagagcaatcagcatatgaagttacataacatatgtaaaaagaggagagacagcttgatgatggtggtgatggtaatgacaatggagctttattgtgtaggggcagagacacacaaaggaagaaaagaagcaagctaggtatcgaaacccatgagggaacgagaagcgaaatgacggcttgccacaggaaaaggaaaagaaatagatagggtggcacttgaggaactacgagaggagaaggaaagataagagagagaacgagcagaggaagcggaggggtagccagagagtttattgaaaaaaaaattgatggaatgaacaaagacgggatatgtcgccagggttgaatgagattaggaccagatggttatgtatcgaatggatgagattccgaatgaacaacagaaaagagaggcagtaataaaggcaagaacaaaagaagagaatttttggaaaaccaggtcggcatagatacaagtcgtaggacaaacaaagatggacaagggtggacgaacgaaaacccttgtccagcaggaggaagaggagagaccggagagaagctgaagagtaacacaaaaaggcagaaggggcctatttgtgatgaagagggaataaacaattcgtttagtaatccgagtttgtatgtccctcgccatcctctccatccgaggcagaggtttgtctggtcttcatcagctcgatatcgaacctgagttcgtcacccttcggagggttgaacactaagccctccatctcacagaactcctcatcgtcggtccggtatcgatgaatagcccattctcggacatatgtcgaggccttcatatacttcttggatgcatacttcttggtaaaacactcggcctgcttctcaagcggtcgaaggatatagttgagcatgagctgggcagccggcagaagctcatcctccgcgaacgacgaatagtgaaccaagttggcgttccatttgcctcggttgagaacatgtctggcaagccaggcggctccagcggcaatcaaactaggtttcaggtgaagcatcttgtgatcgacacaggcaatctccatgaagtatttcgccaccgtccttgtctggatgtcgtagttgtccgccttcgagatccttcggagaaagtgaattgggtttggatatgccatattaaagtcaagcgtctggagtagatacctttcggcacctaagatctcgtcatcaccaaagccattatcggccatgaacaaaaagttctggacagacgggcagatgacctcctcatacttggcggcgacgaaaagggcggtcgtaccaacgagctgaagcttgacgagtgagatcactcgagcggataggaaccgatcgaccaagttgatcgcgaggaacaaggtttctggcaacaatcggaacttgccgtggacctcgatcaaccagtcaacaagaattcctcgcatcttccactgtagctctggctgaattgacatgtagtctggattcggttgggttgttaactagtaagatgacaagagagaaagaaagcaggtcagtaacaagaagatagaaggaggagagtgaggccacaggaaagataagcgctaacctcgagctcttgcatgtatttaaagatatctacgacgtattcgctgaccatcatcggatcatccgcatcctcggcatcgagatcttcccatccggcgtccttatccttttcttggtacaatgcatcctcttctgccttggctagagcggccatggccgcgacctctgccggtggttccgagagcgtgcttccggatctggagtttgtatgagcgatttcaagtttgacgggggacgaggttctggcccgcttagcagggacggcatcctcctcagcctcgagaacatcttcgactggcaagccggctttggtgtcaccttcgccggcgtcaaatacgtcacggtcgacagcggttgtgcgtggcgggggcttgatcgccctagtcgtcgaagaggtagtagcagctgaaccagcggtcgatgtcgttcggcgagccgcggtagatactataggacgaggcacggcggaagtgttggtcgaggtggaagcgtgagaggaggaagtagcggttcggtgggtagtgacaggcacccggcgtctcggtgcagtctcgacgtccgtgccgtctgtgttgtcctgagtatgtgaggtgagagcggcggcctgttctgctgccaagctggtccttgttcttcgtccagccgttgccctggttggaacagaagcggtggtggccgtcattttcttttcagccacctttttcctaccagcgtcctttgctcctattgggtttgaggcaggaccgccgttccggtcggaaacctcgccaaaggcagcccgtttgcgagtaccgagaacttgttttccattagcgacacccgtgccgccatccatggcattgatcgcgccgttcggatctttgaccgagtgggtggacagaccagctgctcgcgaggttatcgtcggtttcgaaggtccagattgggcggcgatggcttctttgccgacgaggttaattgtcttgccagccacggtcgcccgtggggcgttttcatcaagggtagcagtcgctcgagtcactctggttgtccgacgggtggtctgagaggtagaaaagaataaagagagagaaaagggatgttgagcgagagtcaaagtacgggaagggtcaggaacgcgacgacaagttgaacgacaaatgaagcaatattcagagttgtagtaagagaagagagctggcagagacatggacgaaactaggaaaggaaagaaggatatacgcacagggatgccgctagccatgttgaacgacggaaggaacgcgagtgtgtgtattggagattgagatgttcaagtagggagggagtgaacgtttagggtgagaggtcaagaatgagaagcgaaagaaagcggatgcgaaagggagcgaagaaaggaaaggaagggagagtagaaaaagtgaagagagaaggatgatggtggtagcactggagagaacgtatccaagtaccaaggtgaagagaacgaccaagaaggagcagacacggacgaaggggaggaggagaaaggacaagaatcaaggtcgagggcagaagggaaacggaaagggcagagtgagaaaaggaggcgggctcgacaggcgagtcgcgtcaaaatgttgcctgaccggattctctcacacgcgacgcgtcaggcctacctgtttccgtcaactttgaacgtgaatgtgtgcctgaagaactgtgccgtttgattcggtaacacggatgcaacggagacagcaggaggctcagagagtagatcataccagcttactagttcgcgttgccacattgatatatatacagatacagacatagacgcacagacgcacagacgcacagacacacatatatacctacatacatcccctgttcagattgagacagtctctttgccctcctcgtacaacacatgacccacaccaagacgctcagagaatgggacgtcaagcctacctcttcctacgccttctcctcttcggcctgaggagccgtcagtggtctttgctgtagcggctagcttagagagagcccgatgacgtgctcgttcctgtctgttcctcttgagcgtcctggctggcaaagaggatgaaacaaggggggcgctatgttcttctgactctgacgagagtggcagagagtgaaattctgtttcgcaacttggagaatacaccgggggcgcgggaacagaccgggtagtcgagcagtgggtgcagacctctgttcgaactttctgatgagacgacgaggctgatatgtagatgcgtttcaaacaagatcaacatataatttgatggaaaactgttttcagtataaagaagaagagataaagagaagatatatatatatat

SEQ ID NO: 1723 - DNA, 22224 bp, Xanthophyllomyces dendrorhous
  misc_feature (12698)..(12707): n is a, c, g, or t
atatatatatatatcatgagaccatacctttgagcttgactctcgaggtcaccccagggaggagaacggtatgacatgttttgcagatcgatcttttgaatgttggatcccttcggttgatcaggaacaaaatagcaaagatgtgagcatgccgtgaagagttctgactatcactgctctgtatactcacagttgagctcggttatgtctggcgacactgccaatatctctacctatatgtcttgctagcctggataggcattcctcacctcctgcgttaccttgagctccatccaactctccagctctatcttctggtctcaactctatgagcgctctttctttgcctttgtgggaacgtcgcggttctgagaagaaatcagccgtgggaggaaggagtgcactggcctggtgaagataggtcgctgcatggtgcatataagtgagcctgaggagaagatccttattcggaatttggtttacatttggttgtacgttcgctgttgccgctggttttgatttggccatctttccagctcaatcctcaaagtccctgtgggttgtgcttgactaagagacggtaaaagcatagacatgggtatacgggcatataggtagcagcatccaagcatgggaatttaaacaattccgattacgtaaaaaacggaggtcaactccggggtacgaacggcctcaatgggaacggccaactctatggcttacgcatcctgcgctctcttcgcttacgactctccctgcccggtttttgatatataaacatccttcaggaagttttgcaacactatctcttttcctttctcatcttcatctttgacttctttctcttccaccttctttcgaatcattcttcgacctcagaagaaactaacaacgttggcgccctccatgggtcaattccctaatgacttacaattcactgcgcaattcggacaaccgtccgacggacacacgtgcccgagttctcgccttttctgctattttgtctttttcttaatttcgagcgaattttgtccacagatctgtccattaatcgtgtcgtttcttacatgctcgttcactagagcacagtcgcatataaaggaacccgctaaccaggaaacaggggcccagaaataaatgtgtttttgagcagcaagtgaagagaaatgttgtgtggtattgagcttttatcgaacttttttcttcacaaccgacctagtttctgtatttactgcgtacgtgaaggcctgcaggcctgcggaacacaaggagagatcctttcgacctcgtttcccgtcggttggttcagcacttattgttctcggtcccacagaacatgtgtgtctatgggtgtgtgtatgggtacatttggacggctcgttgtcaataaggtgtaaatcctgttcttttcaggtcgcgctttaacagttgttgttgttgttgtcccgactaatggtactgggcaccgcttccaatattatttgccgctgacccgtccgcctacgccggtgtctatggcctctcctactgcatctttgctccaaaccccttccatttgagggctcttatcgatgttattggggctgtcctgaggcaggcttaaccagatctcatgcttttcacccattttcttctttggcctgcctctttgctttctaactctctctgcattttaaatacttttcgttccttccctctcttcctctctctcacacagtataacccccttcgtctctctcctcccttacgcacacacacacacctttcgtctccgattctctctgcaaggccgttcctatccatccatctacacttgatcttacccttccatctgttcagtcgcatgtcgtttcattccacactggatcttgggatcaagcccttggactttcccctgactcctgtggccacaccttgtcaagaggttgctgagtttgacttctctcagccccaaccggatggatctttcacgatgggttcccttcttgagccggtaactgtgtctcactcgaaaatatgccttgagaaagatccgatctcgccaccgatctctccagatacgtccccagtacttcgaccagtttcagtacccgtcgtcccttccaccgagcatctagactactccgatatcacacagagaactctcactttaaatagagagaagatccaaagagaagttaaattatggactagagaagcgatcgcacacgatgtgagtcccacaactattttattttatttttcaggcgtctcttgcaatggaaatctcgttcaggctgttacccgctcgaattgctggagaaaagcgttttggctagccgcagcgtgggctcagagcgggaaacgatgaattttgctcccgagcggcataaagagaggcaaagcactgagagagtgaaaatgaaaaatgaagcaaatgaaataaagattaaaaactaaaaattagaaaaagcgtgatcttggttcagaaaaacttacactgctttctttttaaggggctgaaactgccgcttgtttatagttatcttatctttagcatactaaacatttcttcttcctattcgtagatcctcgacggacaccttctcctcgtttacgacttcaaagtatacaaggtcaacaactggattgttacccatcccggagggaaacagttgcttcttcattttattggtcgagatgtacgtgatctcttcctgcttcctgcttcatgtttctcttcacttatctatttattaatcgttcaaccatacgttcacaggccaccgatcagatcaacgtttcacatgcaaaatccaccatcaaactgctcaaagcgttttgtgtaggagagctggcagacgctcgagctggagtgagtgccttgtcgttcagacgtctgattcaaacatatatgctcatcgcttctcttgtatcgtccgttcagtcctaccgatcgctgttgcccccgtccatgcttgggtttcaccctgccgctggaacaatgggcaaaggaaagcttgtccggtgggtccaagaaggagagacacgagccttcctcgaaggccgagaaaggcaaggcctcctggatcttgatgagagtaacagggtaaatattttgtttttatcttgccctccaatttcagaatcgcatttggacttattaactccttttccttctcacaacatcaccaccagatcacccgacagctgtctccgaaacctcttttgaactacttcgacctattccctgttgtcattcagccgttcaccgaggatgaagctcaggcctcccaaaacttcaaagaactaacaactattatcgatgaatccggcttgatggcttctcctccgttcctctcaggttattctgtcgagatcgttcggtacctagtatgcgcgaccatcagcttagcttgttggtgggctgctaccaattatgctggtgcttggaaccatggttggcgaatttgggttgccacttggggtagtgccgtcgggttaggagtatactggcacctggtctcttttacagcccatgatatcgtcagtcctaactttataatccttttctgtcgtaatgtgctcgctcgttatgttttgattctcatttttgttttattttttggcacaaactggcttttgtcatcaaaatagggacaccgaagtgtcgctaacggatcattcttctggaacaactttctcggtgtcatcctgtcttgtttcaccggaggtctcagtctagactggtggtgtgccgaacacaacattcatcaccgttcgtctcgtcaaattctcttccatcattgtcgtactctaacatctgtcggaaccacgccctttcttcttgatcttgcctgcgtctgatcagatatgaccaacgatgtagaacatgaccctgatggtgagtccatcccgccctacaactttcccctgatgatgtcgagtgcaatgagtgttgatcgcgcatgcatacgaatccatcgtttgtttcagtccagcaacttcctttcctttgcctcaacgaagcttctttgggcagcttgtggtccactcgatacaagtcagtatcgcttggtgattttaaggttgaaaacagactatagcttactgatgtctgtcttgggttgtttggctatagagaatacaagatgtttgacaaattggccgcgctcgccgttcgggtacaacatctcagctactattgcttactttccgtaggcaggttcaatctttgtattctgtcataccagcacctggctatctatgccaagcgaagcaaaatgtatgtctactccaccgtacatctacatctacgtcctgatatgctgacccaactggctttatataggtgggtgtttgagctagtgtgccttactgggttcttctactggttcggcggagtcgtcatcgccagttttcctagttggaaacttcgggcatttttcttggtcgtatcattcatgaccgccagtccgcttcaccttcaggtatgatcgcctatcaaagtctctcttgaatccatgcattgatgtgctcatattttctcgatcactcttcttgaaacagattgttcaaagtcattattcacgatctatggaagacaaagggtgagtgtacattcttatcctttcatccatccgctgcttcgattgacgtgtctagtcgttgtgggggttcaaccatagcgtgctggagagtcacatgaaccacaatctccggactactatggatgtgagtttgaaattctttggccgatcgaatcgtgaatacgcgcagtccatgactgacctagaacttgttgacactctgtgtctgatagattctgatccatcctgccctcagattttacttcggcggacttgagcatcaagtatgtccgagccgttggggtttcctcgactgattctcgatgcgtgctgaccgttctatatctttgtctctcttttcaagaccactcatcatcttttcccgaggtaggtcgtatgattatttattctgatgagattagtgtgatctgacttgagtcgatcatttttcttcgcggctgatctcaaagaatgccccgacacaacctaaaagctgctacagtcatcgtcaaagaggtgagttatcctcgttccggtaatcttatcagtagctcgttgcactaaccacgtaattcatcctctgatcacatggctatagtggtgcacatcgcatggctactcgtttgacgcttacgggtttgtcgagtacgttcaacgtttgttagtgttcgaatccgccgccgaaggaccattgaccatcttgcttctgctttctattgacttccaaagaggaaataagatgacgctatccgtgatgaagagcatcgccgaccaagtcgcatttatgggaatcgtcgctgccgactcgtacgttttctcactcaggttctctcgatcaggcgcgtggtctgccgtgttgaactgagcctagccttgcctttcccgtactcaaattttagcgtggatgagatgaccaaaaaaggagtcgttcaagcgttcatgccttagttgaaattctcttcctggaccttctatctctcttgctgtgtatcgttctttctctttctcagtgaaacgcagagccaaatccgaatttgaaacaagaataaacggccggtttcatttccttactcatgcaatcttttacgcttaagattatcgcactcattcattcctgttcgtcgtcttacatctctttcgtcttctttgcttcctgttcatctcgtttctcctctgtcagttcgcttgttcgttagctcttgttacccctttcttttcacgttttaaaaagccgctgtctttcatcatgacacaacgcacttcatcttcattcacggatgtatcgctttctttccttttttccctgttgtttgccttctttacttgtcgcaatctccttgtcgtctctttctgttctatttcttgtcttggtcgtaattgcatcccagcgaggagggtttcctcagcatgtctaacattctctctgttgttctggttcttgtcattcagttctcacacttagaaaaaaaacggcttttctcaagcgtgatgcatgctcttttcctctacccaacaacttgaactatttagtatggcccaaattcagagtacaagacaaaagggaaagatgagattggtcggttgatgacgtcacatatcaactattgttcctataagtacttcaattatcaaccaaatttcacttcttgagatctattccgctttgaaatatgatctcgtttgcgtaatccttcttgtctcgtacagcttgagacagatgtcatcagattcagacgagtttgactcatttcccgatttgccactatcttcttcgttttatgagcgactaaatattctcgaacaagccgttccaagcgataaatctgatgcttccctcatcgacaaaatctatcgagaggatgaggatgaggatgaaaatagggaagctttacaattcaagacgccaataagagcgaatgaagaaatgaaagacaatgacatctcgaggccgatggaggatggcgatgctagcccagatctggagaggaaggaacagcaggtggacagtaacgagccgttcgtatcgatccttctcatctaaactggaacacggtggaaagactgactctccacttgagaccttccagtgataaaacgaggcaacgaagcttgttttctcaattcaggaaaagagggtttttctcagttactgatttgactgctccgacgtggtgtgaggtccaataccagtacggtcttcttgggaggaagcacctccccccgtcggagagaccgacttcgattatcactccgaaaggaaatgtgatcgaattggatcagtctcgggctatcgagaaccataagaccatggagtacgttgaagtttttccatctttcatactctatcatgggctccgtcatcaatcattaacatcgtactattatagacaaggaaccaaaatccatgcggctttggagaaagagattcatccgatccaaatcaaagtgaaagtatctactcgggaagagacctgggctttgagggtaacttcttcttcaagaatctatgccagacaaagcgccgctagctgatcgtcctctcttgcacgttcttcgggtagatcataacaatgttgtctagcttagaagctctcatgactcttggaatctgcgtaagtttttcttgttcaggtcgtccttgactctgagcatgacctaagccttcatctaatttgtagagagagatgcccgtgatgggatttatcaacggttttctcgtcatgggaataatagtaagtgtttaaatcgtatgctgagctgagcttcaagactgatattctcatcagcttacgttctcaaggatgagattcagcgtcggccgatctcggtgctctctacatcatcaagcggctcttccactgtccgcacatccaaaacaaagcaatcatctccaaagccgaatggatctttggatgatggtggtgaaatgataacgaactggttcaagcctttggaaccattctctcggtctgatggatcaaaagaaaacacacgtagaaggcggcagaaacaaatgtatactctcttgttgagtgactccaaaacgagacagacgaagagtctgcccaaagaggatgcgtcgttagctggtatgtgtcgatttgcgcgtgttctgctttctgctctcttgaatatctaaactgcactaatttcggtctttgattaatatgcaataggtaaacttcaggtccaagcttacaaactcttgttggacaatctccttctttcacccacaagccattctttgtccccgccttctcaatcgggttctccctcattcgaccccatgttctcatggtcccttttgttttctcatctcggactcgacaaagatgccctactctctttggaattccaacaagaggcacaagtggtgatcgacgggaatggcttaagatttttcgaccaaggccatgctctcaatctgaaactgttgaccgaaatttgggacaagtacgccgatctactagaggtcgaccgaagggaaggatgcgatcgagaattgtcactagtttaccgatggcagtttgcgcaagatgtcggtcggaaagccattcgaaaggaaagtcgaagacgagcagcggcgagtgatgagagaaaagagaggaaggtcagggtagaaaacgcagttcaagaagaagaggaacgagcgttggagttggcaacgagagaaagtttagcacaggcggaagggatggcgatcgaggatgaaacagggaaggaagaagcagaggaactcaagagagctatcgcgaccagtctagaagttgccaaagaagaggcgcctcccacttccgcctctcatactcaaacgtatataccccccgtcattatcgatgttgatgacgatgacgcacaacagcggtcgatcttggcgctctcttctgcatcagtaccctcgaccttaacttcaatctcaactggtccttctgtcacacgatccacagctccttctccctgtcctgatatccccaacatctttcaaaaagcaaggacggaatctccccgaacccgtaggagtttacgaagcgcttcctatgctgctcctgtttcacagccttcaacacctaaggtctctagaagactgtccaaggccactcttgatcaacctgagcgtgctaccgcgcttcttacaaaggtgtacaccccggaggtcctgtcacgaatgaaacgagtggatcttcaggcattagctcggaacaagggactttctacttcaggactaaaagctcagcttgtggatcgacttaaaggtctttcgatagaaactcaatctcatgaggaagaggaaagcgatctatctgagccaccctctcgaacgagacaatcgagactagggtcgcttgaggggccgtcagatgtcttgtctgattcttacgctcgtccatctagttctatctcctcctcctcctgctcgtcaacgaatggcacaagcaagtctggatcgatgcagaatcattcggatatgataggcattatacgattcacctattcagcccaaacgatcaagaatcacttagaggacatccttcgtttctggttgggtgagcgagaaccaaggggtgtcactctagaacatacctcgaggtgtgattggtgtacgtcctttcgcttcatccaaaggaagtatcaatgagcttatgctaatcactgagttcggtttactttgttgtgggtatgcgcgggattcaggtgagttcaaggacggatgcgagtggagagaaggacagagaactcgattgtgggaagaatttcagcagaagaaaaagaacggagaacaaaagatcgattggtgatctatcatatgtgcagcttgtgtccttttctgatccgaatagttatttgatcagattttaatccgtgtacaaccagaggagcgatattaagtatcaaagaatcatgtgtgaacatgataacacccaagtgagggacccagatacgagaaaagatgagaccaaggcaagtgagaatgaatgaaccccaggatacaaatgaatccttgaaaagaaaagcagacgaggggaatagaaatgaagaaagagctaggaacagaacgaagagttgagcgagacagagcggaagttcgatgaaaaacatccacttgaacaagcatgcagaaaagaaagaggaccggcaaaggctatgtaaacagatcatgggaaaacaagacgaagaagataaggtacagaatgatgttgaagacaaaaattcaaaaacttgatattgaagatgtgaaaagagagggagtggagtgagaaatcatgagggaaagagaaaaagaagaacatagacgatcgagacgagacatcgttagacaattgatatcacgccgtcgttccagtcttgaactctaagagaagcaaagagactgtatgttgatccctttgagccgactagaacagaaaattaggtaagaaaagagatgatcagaaagattaaacacacagatagagatctcaaaactaacgaggagatgactgtcgacacttactgaagcctttggcagaggacatcatcgccatatcgatcaacgtaggccaccaattgtccatcgaatcaagggtattaaggactttgtggtcgactcgtttccaaccaagaacatctgtaacttcgttccaccaatgaggattgacctcgtcctggttttatggcggagcagaatacacaagatcaggtggaagattcttcgtggatgaggatgagataagagataactcacactaaacatgatgacatcctgatcgccgatgacgaccccctgttcatctaaaagaacctttttgatccgagtgatttcctcgaggtacgtcgtcgcgctcttgaaacaagtggccgaggtttgatctgagcacggaaaatcgttgtgtctggcgtgaatggcgataaaaggtcgttggtgaccaggtagattggattgagcgtgttgaccaaggacgagatcggtgtatcggtctttcaggttctccaagtgggttgaataacggaggtatttgcccacgtttgtccatcctggccaattgggatcccatctggaaaagatgtcttgtttgtcggtaacccaatacatgtctgcccaacaaacgaaatttctattgagcgaaccaaactcagatcctccattctgagtggttactgtgcgctcatagaaatcccaccagccaccttccgaaaattcgacgaggccagccatcgagatcgcctggttgctaccggtctcgattggacacggccagacattgacctggacgccttccggttggattttattcatattcatctcctcggacatgcggaccggcggtttatttgtgagggagagaataccagactgaggcgcaatacaggccagctggtcaagtgtggttgaagaatttttgagatcacggaaggtcaggctcgggtgagaagtcagctcggtgtatcgagcaagatcgaagatcatttccttttgatattgagaattggacacatagagaaggtgagctgaacggacaatgtcgtgatcagaaaaacaaaaaagaaggaaggtactaaccacaggcaatctatcttggggtggatgttctgcgtcatcaatgatcgggtatcttacgaaatcgttcaggacactgaaacagtcaagagccatcgttttcataagagaagcgactgtgttagcgtactgacgggcaggtatggggctcaacacagaatacagggcgaaatttaccctactctacctgagcgctgggcataatccaagagttctagggactaaaggtggagagagagagagaggagaatttagtatttgaatacatatgaagaaaagaagaatgacgagcgcaccccaacgagctgattggatagacctccttggatcaaagccgtagcgtatcggacgtcaggaagcagggtttgatagaagctctctctataagatgttcatcagaagagaacacactgattcagatttaaatagcgacatgtactctggagagatcagaacgaagagcgtgacttactgaggatgactgacgttcacccaagacttcccctttccatggttccaagcgagtcgtctatgttcggcatcttgaagatgcagcgcctgttgaagccgtggtgccgagtttgcgccggtccatcttgcagatagagcatcatccgtcgagtgtagtgagaccagtgttcctatcaggaagaatactgatatgaggaggacgtgtttgagcctgacggtaggtctgacatgtctggcatagaaatcttcctgttgcatattatgagaatgatgtgaattcagcggaggcgcaatcgttggatgactatcggcgctctgatagcgagatgagtggtggtatctctgccaactggaagagtggtgatgaggtttgggcatatttacggacaacgttcgagaggtggttgtgataatattatgataaaataaaggcgttgggagaataagaaggacgagggatagagaagaaggagagaaaggaaagacagcaatccccagcgactgctgctttatgaggctttcatgtagctctccagagtgttcagagcgggagtaatagacaatgcgagggaaagcacacaaatcccgacagaacctgcaagagatgggtgtcgcagcgtgcatgcatgcagaactcatccatacattccatatgtttaagcctgatttgtatgctcagaaagtgtaatctccgtcggcgactaccgatcgccatccctccttcctgtgtaaagtttagaacataatgagaacgacttacgatcattgtcttcgtagacctcatggatagagaggaatcaaagaaacccaaggacaagtgagcgacagatacatcagaaaagaatgccagaagatgatggtttttgtatagtgagccgggtgagaaaattatgaggtatgttttaaaaagcccgcgtcatggccgaatatgttcactcaggtttgaccttcccgctcccaagagaagtttcatcgtcatgctgtccacatcacatagtcataaagagttgcagaagaaataaagatacggccggaacatgagaaaatatacacagcactcggacaagatatatagaaaataagatagcggaggaaagagacggaaaaaaaaaagaagaaaaaannnnnnnnnncatgagaaaacgtggtttgagtccatcccgtgtcctcaaacttaacacataagccaacacccgaaccagccggatgattaaaaagcaaacaagagacagatgatagattctaaaagcattcggtcaccacttcaacccctccgattcgcttgacatcgtctgaattcaatccaccgacgacctctctcacatctctaatcaatcctcccggtccacaaaccccaaccaccaaaccgcatatcctcggcttttcctccatctcattttctcccttcttctcactcatcgctcctctgaccaacgtagcttcgagcttgtgttgcacgagagttaacaccggcggtctaccctgatggacatgtagatctggatggacggccgagagggcatgggctgtaggcaaactcttcattcccgtcacgtacacgtggatatgaatattcaaccggattccttcactcgtcttacgcgccctcgtcggtcggagaaggggtgtcaagtaaggcaagaacgactcgagcgttcgatcgtgtctgatatatccagcaaaaatccacgtgaggttgagaaacgatatccgaaaacagtcatgcaagaatatcaactcaccgaacgatccacacaacgtctacccggtcggctcgacaaccaccggaagcagccctggcgaccaaaccggcagcctgtgcgagaacgaatgtaattccgctacccccggctaacaacaagacggacgagaacgaggtcgtcaacgtatttcccaacccaccatatggaccttcgattaacactcggacctgtcgactgccgagagggccatccagggtatttcctccacggcttagagcggacagcttttttgtccagccgcccgagcttttgataaacagccggaggcagtctccatccatcccgctcacagagctcggagcattagcgatggtgaatggactttttgttgtagatcaaacgattggaacgttagttaaaactgaaatactgagaatcaaaacaggcacaaatgaaaagagaaaacaaggccatatactcactgcttttgacagatcttgctgaaacccatcccagaatcgatcactctgatagtcacatactgacccgttcgccaaccggtcttcatccgagggatctcaaccattgtcgtttccccgtcggccaacggagtcaacaccgcttggagtgggagaagatgttttttaagagtgaactgatacagcagatcgatagcgtacaatccgagagcggatagacaatacggcttgcagaaatcgacgtgaaagtactgaaagaagtgaaaagtgaaaggcggtaggaattccatcagaatcaaatatgcccaagaagaaagagatgaaggggagcaatatcgaagaaaagacaccccaaacttactagagcaataagagtggtcatgaagcctacccagtggcaaacctgaaaaaactcgaaggctcgtcgacggacgatcgggaaactagaaaccgtcaccaatgccacaccgagccaggcgataaagccggccaggaccaactctgtgtgtagcttcttttcaaacgccttctgccgaatgtacttttgaccaaacacccaggtgtggatggacgatccgatgaaaatcaattttcccatgaaccgatggacataattgaacttctctcgacttcgacctagtagcatcacagcgattgaattcttacatcccagagctaccacgaaaggtaactgagcggtagcgattacaccggatcgacttggatccgtcctcggatcgcagaaccagaacgtggctaagccgacgacaagaccgtacatgacgagtacaaacagttgaccggttgtgagatcgatcgaaaatagtcgctcaataaacctagggagtggcaagtttaaaagcgtcggtagaaacgaaggaaagtagactggtgggaccgttcgggatgagtatgatgattgagtatcaactgtaccgaaacggacaccgacatccaggggtctgacggtcttcagatcgagcgaaccgtccgaagggaaactactgctcatcgctttctcgtccagcgagacttccgacaaaccgtgaatcatccctaccttacctacctggacctcagtcctagtcccagtcccagcctcagcattctgactggcctttgggatgagccaaccagcccagatctcaccgcctttcgagccagaaaacaatctgatgaggatcctcgggtgagcagccacaacaaaggtaccgaatatcaccgcgcacacgatgaggaagacaaccatcacttccgagtttgtgtacaccgttgttgtgccggtggtagagctacttccactcttggtagtgctggtggaagcattcgaagcagcgagagctgtaatattggaggctagaagctctgcgagggcttctgagacggtaagaccagaacgagccgaaagaccggttttcgaatgaagggaactttgccggtgcttgataaagcctgaacgggcgaacgagtgagtcattctgccagagaagactgaggaaagatgcgcgtaagaagggacgacgagctatagggaagacagtggaccagcctactgtcgggtgcacagagcgggaggagacgaaagagggagtgtcggggaagtgtggatggaggaagaagaaaggaatgatattaaaaaaaaacgggactttatctacggtcttcgtttttcacattattcatccacgttcgctccttcacgcatccgtcatgatatccttccaagcaagagacagcgtggtaagataagaagcatggctataacaaacctgaacaagagagctttggcccaggccaacctttgttcagaatgagaagaaccacgaggggataaaagagaaacacaagacacgcgtcattgaccggaataagcgtttactgatcagcaacaaaaataagaaagcggaacattcttttattaagaattctccggcaaattagattgttgactcaagttctaccggtagaccaatcagtgcatccggattacttttttccccggcaagatgaacaagatacacccatgatatacgcacaggggcagaagcgatctctccatcgtacaaagaaaagctcgggacgcgaacgaaacgatcaacagatttgggattgaaggaaagaagaaaggaaaagcgaaagcaggacgcagaaacgagcacacagaaacagataggcacaacatggtttcagaataaagacagaagaaaattaagagggaaacatgagaaaaaaaccatcttcgggatgagaagattttgggatctggacatcttcaaaaaaggaatagtgatagatgagaaacaaaagatgacgagtaatggcagctactgctgctgtatcagagcaagagaaacaaaaaggcagacagaggaaagaaacaaaggtaacaagattcttttgttatctttctatttttgattgtcagaaccgtgctccagtttagcaagtgccgtgtccgccttgttcaaatcctattttcggacagagacacatgcgggtcagtatctccatcgacaggtatgaacaggctttgaatcagactcactcgctcggtcagtcgtagacctccagaaggagtgctcacgccggaatccatcgtgcttgatcgacctcgcctaagaacaagagggaaaggatagtgatcttcctcttcctcatcgttgttgctcatcgcgtgccagactaccaacattcccaaacaatcgagctgtcagtaacatgaaaggtactttcagtatgatacaacataaaaggaagaaacatacactttccgcccatataatccgaggtatccaaatgctgcatatcttccgtaagagtacccatatctccaggggtcatagccccgcttcggaaccgtgggctgctaggagcactcaatggtcggccgaccttgtttcctcctccaaagtcaaactcgtcatcgtcaaaggactgcagaagaggggacgacgatcagttaaaaggtaaacaagatggtctgcagggatgaaaggatttaacaacacgtacatcagggtaagctctcctaagcgccagctgtctagccttagcatactccaagcccaagctcttccaatccagtagatcagacaatcgctccgttctgtttcgctggttaattcgctgtcgcctggttttagtgacgaacgagaacatttgttcctgcgtagatgatgacagggagagaataacatgtcagtggaaccgaaggctttcgagattgaagaaacaaccgagaaaaggaacgaacagctagctggttgcaggagtcttcgacactcttcattcgtcggtcgacgatgtagataccgtagtcttgagggttatcgatcagctcatccataaaacatccgaaaccagacaagttggttgtgatcgaagggatacccatcactgtgcactctccgggagtgtatccccatggctcatagtacgatgggaagactcccaagtggcatcctcgcacaaagtcctcgtagtcgagaccaaggatggggttgttggagttcaagaattctgggtggaaaatcaccttgacacgatcttcctttcggttgaacagctggactcgtcgaagttggttcaacaccggatcgttcgcatcgtcggccatgttgtgggtgacaatcggagggagcgagtttcgcttaagagcaaaaactcgtcgtttgagaagcaccttgtcggccgaggaaagaagcttatcgtcggagaggacttcggtcccgtgctcactatgtgttgggaggaaagaatgaaggtcaactcaacagacctgaatacatacgagcaggatgagagaaagaaagcaagctttacccagtgtatcgagcggcgtgctcgaaaagtcggtttccaactctgttcttgatctcgtccaccgtatcctgaagctgcttagtgacggcttgtcctttcagggcctcaatggtataagactgagtggcagcaggcatgatgatgaatgcaaccacggtagttttggagccagattccttgagcatgtgattcaaccctattaatttaccaccacatagggtacaatcggttgtaaataaagccgagctcaaaattccttgttaaaagacaagggattggggacatacgagcaagaccttcgatgaacatgtcgactcccttgtttctgtactcgtatcgaccagcagtgaaaaggtagagggtgtcttcgagatcaaagtcgtaagatccatagaaatggcctcggataaagtcgttgattttgttcttcgaaacggcgtgaaggttctggaactcgtgcatggcagaaaacttcgtgacattcaatccattgggaaccacaccatctgtcagagttagaggagcaagaagaggacaagtcgtcaggttatgggcaagcgtgctgttgaggagacaggcgacgaacctggctttcgcttcagaagatgctcggcttcgtaagcagtgatgtgcgagactgtagtgaagacgtcagcacagtgggtcgcacttcgctctatacaatatctgttgagatgttcgatacagaaacgagttagattgacttgttgaacggcctctacagaagagagatttagacggaccggtggtagattcctcgctttcctgcctcatggtcgacgtcaaagtactgtaaattgttgtagaaatctacacttccagcacataagtaacgtccaagcaaggtagcactggagaagagagggaacgagaatgagaaggacgtggtatcagcgatcggagtgaagtatctcaggttgtgttggagaaaagaaactgactgagtggtgaagacagtggtcaggtcaatgtgccgctttctgcagagtgggatggccaatccggcctgccactcgtgaaagtgggcgacgacagccgaggtcaagtggtggcttacaaacttgggaaaagagaacccaaaaacatgttagacggctaaaaagtgaggcgcttcaaaagaaaacacaggagtttgggagcggaatactaacctcgccaaggaaccatgctacaagatatccgaaaacgatcgtctcgttagtctcatgatcgttggcgggagccgggataccagcaaccgtccaaagatcggccttccattcgtccattctattagtattgcagaggtatagttcatcgacagattagcatacgagacaaaacttgagaataccccacatatggacctgcttccagatcagatggattctcaccgatggtacatagagctggtatcgaacaagataactctgggagctccttcaatgagccagtttccatagatgagcttaacaccctgagctcgcattgagtctagcgttttagccatggctgatccaggttcaggctcgacggagtcgacctccatctagggagcgccaaagtgagtgttgaatacgtaagtatggttgccaggggggttagaagactttagaacagaaaagatagaacatacgggagcggactgtgatggaacgtgcccaggaagaatcggcggtttggtcagcgtttctggctgtcatctctatgccatgccggatcaagtcggagggaaacattcgcttaccttgtaagatagaggcccaatgagtgtgtatctctttccactaacgtaaccagagaggagcgggtgtcaggcaagctctgaagaaggctagagagattgaaggggaaaacgagcgacatactattcggcgcatgtcactggagctttcgtcttgatgactgtataaattcctccaactgtatttttgtccaagcgatgggagaagagtgacgcggacaaataacgaatcggacggattcacccccgagcgttggagagagtttgagtttgagatggagaaagaggtcaaaccggggtaaacagaattgtgatggcgtgcaagttgaaaaagagaccggggtcagtgggatgaggattgtttgactcgcggcaatatttgatggatggtccctatatctttttttcaatagaattctcgctctaggctcaaattctttcgtccctcatggatacaatgggagatgggaaaagaagggaaagattggacagatacacacccttgttggctacttcccaagcgcattcgaacaagagagcatcgtcgactgtacgttgttgaccagatgcggacatgtcaagagagtaaaaggagatgtgatggagttattgggcgatgaagcaatcgagcgatggagtgatcgtgcgagaggatgctagtgagcgatcaagggaaactagtcagagatgtcttaagggttgtagaaaggaacgagattaagaccgatgaaaagttgggagaagagagatgggaagagatgatgatggttgaagaggaaagaagggaaagaggaacggcaacagatggggacgaagtaaagaacaaaagcggaggaaagcgtagagaaagagagcgccagtgagaggaacaggaacaggatcaggatcaggatcaggaataggaacagaccgggtaaatcgtcgccccgggggggggggagacgtgcgatttcttgactcggatcgacgagatgccctacgcgcgtctagaactggttacgaaatacgtcatcagatattgacagggttacatgtctatagtcgatcagtctcgctgcgcattgaaggaaacgtgcccagaagacctggccggcgaactcggtccgatcttctgtgcctttgccactctgcgttccgtcggtcgtccagacagtcagtcaattagtcagtcattcagttaacaagttagtcagtcaatcaggcattcaatctagccaaccaagcctcccatagaatctttcagtacacccacgtacaaataagaaaatgcttaggtatagttgcagacagttttgcaggccgcggtcgaatccattcctcctccgccggtttcacatcttcacagacttcgagaaagcagcagaagagccagcaggcgatccggatggaaacgaacacgccctttctttccagcatggacggattcaggtggacgggatgagcttgtgagtatcggttattcttgtgggtgggtggtgtgtgtatatcgtgtggtgtggaaatatagtactgatctatcttgctacagctctcctatccatctaagagaccattgcaggtcaccacaatctttccatccgatcactaggcagcgactgtttgacacattttcggtaagttcttttccaatctttgccattcaaatacccccgtttctgtgttcattggcgttctctgatcctcgcatcattcacacagcttccaaaggatcttcatccagtcgtgcttcggagagaggcagacgagatccatatcacctgtacgttccgtccatcatgcccaccatgtcagatatgcataaatctcagacgacgcatgttttcgctatctcacttcacagggtccgacaatggtcatcaatcccgctatccaatttcgtttctccggacgattgcgcctgatgtgcccgttcaaaacaccgaatcatcaccctcaaagtaagtggttcctgtttgttctgtttgtcttccattaaaaattttctctatcccgctgataaaacatgcgcacgctcggttcaacttcataaagaaaaacgctctggacagaaccactccaagccgagacccattcgccctctgtcacctacgattcactgacttcatcccggacatcccttcttcaggcgctcgacctgatccaccaacatggcgttgtatttatcaaatccgttccaccaaccgccgaagcgacagagtctctttccctcctcctctcgaataaccatccccgtcggacacattacgatacgttctgggaattcacagcagacctcaagcacggcgaccttgcctattccaatcaatctcttcctccacatacggatacaacatatttcgaagacccctgtggcctccaaatatttcatcttctggaacattcgggtccagatgctcaaggtggggaaacgacattggtcgatggatttgcttgtgcagaaattcttcggaaggaggatgaacattcgttcaatgtattaagtcgggtccaaacaggcgctcatgctttagggactccaggatacgctttccatactggtccacccggtgcagccggattccctgcacttgaactagaaaaaagaggtagcgcaccgaaggagaaacccacgttgagattaatcaggtggaacaacgaggatcgatcaaagttaggggcaggatggggcgtaggcgaggtcgatgagtggtacaatgcagctagagctttcgatgagatcttgaagagggaaagtagtgtggcaaaagtgaaactcaagcctggcattgtcgttggttcgtctctctgtctttatctgttttttctctctgccttctgtgtctctgtctgaccttgatttgtttctctcactcgtacgtagtgatagacaaccatagggtcctacatggcggaacgtccttca

SEQ ID NO: 1724 - DNA, 8809 bp, Xanthophyllomyces dendrorhous
accatagggtcctacatggcagaacgtccttcacaggcttcagaaagatgtgcggcgcgtacgtcggcaaagacgaatggctctctctccgacgggtccttcgtcgcgaacagaatcatttggctcgtgtcgggcagggaacatcgagtgcgcaggaggatgtttatgaaggaaattgttgatggatttatattctctctatgtctccaaatgcccttgaaataacaaaacaaaaacaaaaacaaaaacactcatttgtatctaaaattcatgtgcagtttcgactcggtcgtatcttgttctatgctggtaactaaatggactatatgcattgactaactcttcccttcttttctctgtctcttctataattgggcctcgatcaactgtcagttcgtcaaacaaatccaagaagaaaacgtcccaagtcagcaagcagaatctaaggaaacaagtgttgcaaggatatcaagccgtacctctaagtatcgaccatctttggcaaccaactcctcgtgggtcccagactcgacaatccgcccagagtcaagcacgtagatcttgtcagcgtcgcgctggttgttttagataaacacacacagagaattgtcgactcaagatgtcagcattacaagaaaataatgataataatagatggaaacatacgatggtggataaccgatgactaaagagattcaatacaagacggatacatagtaaagactagtcagaacactactcccatttcaacagttgtcgatgcacagataaagtgtactcacgcgatcgtgatggtcgttcgattggcagacgctcgatccagagcctgttggacgagcgcctcagattcattatccagagctctgagaacgggtaattcaagtttcagcatacatctcagtgcgctggacaggtgaacattatatcacagaactcacgaggtagcctcatcaagctgtttgagccagaaatgataacgaccaaaacctcttgtcagtgcttttcgctcttctcttcgggtctcagttgtaaatgaaatatatatatagagagagagaagccacataccaagaggatcctggcatctctcaacaaagctcttgctatacaaagtctttgtctctgaccaccactcaggctaagacctttcatcccgatagccgtgtctaatccttggtctaacgagagcaggaagtccaagattcgagcgtcccgacaggctgctctgatctcctcgtcagaaacttctcgatttaatccaagaaccaaattgaatcggacctatcgaattacaaggcaaaacgaagggaaaccagaaagagttaaatagaatgactgtatgagacatcaattgagaagaggaagactcacagttccctcgtaaagtacggcatcctgcgagacaagggcgattcgatcaaagtgatcgtccagcgtcgttgctcgaatatcctcaccgtccacaagaattgttccctgactataaagatgagaggaatcaaaatgaatggatagtccattgtggaaagggtgtagcaacaacaaaagaaatagagatgaacagataacgtactttggttcataaaatcgagcgagcaaagcaattactgagctttttccgcctccagaaggacctatgagatcgaaaaggtagcataccagcgacaagcatgacttgtcagtctccggcaactctatatctgagcatgtagaactaaagatctcgcgcaccacaaaaggcaatcttctcgccgggatggatatggaggttaagatcctcgatcgctcgtcgttcttttcgactagggtatgtcaagtccacgtttctgaacacgatatctgctccctttgacgatggtttggtagacagaatagtcgacgaagaagatggcttgagagtggccaccatcggcttcctttccatccagccagaaagaatagaaaatgcattgctggcccgagagatgtctccgaggaaggtaaacattctagaaagagagaatccgccgataaagacggcttcgaacgtggcatacagaccaaggatatcgacggagccatcggcgagtcgttttccaccgtaccagaagatgagcaaggccataagcttatcaacaggaaaggaagggggggtttaatatcaacacaatagggaagttaacaatagccgctgacaacaacaacaggtagaaagacgactaacgggaaggatggcttgtgaaagcccaaaggatatagaagccagtagcatggctatacgatgtttcttaatatcaggccgttgcttctcgttaaacgagttcaccacgtgtctctctcgcccaaatgcagctacagtctttatcaaccagagcgtgagcgaagagagagaaaggaggatagaaagatgtcagctgactgaagtaagaagcaaaaggtttggagagcttcgaacctttatggcgtcaacattatcagatgcgtaagaagtcgccaggttgataggcttggtcgactcttcttcaaactttacgaaatagatgatttcgccacaagctgccggaagggctaaaatcaatggcgagagtccaacgagaaggatatcccagctagaaaagatgacgagaggacaggagaaatatgttttaatcaaagatccataagcaaagggtaacatgtagtgcatattgggtcttacctgaagatgaacccaaggatcatcgcgccaacgaaactatcggtatcaggtagagtgtttcaatgaactcaagttcagtcttgtgttcaaatagaacagaaatggttcatcaaagacgatgagagtaaagagaagaaaagaacagacttgacgatgtttgagatgatttggccaccaaccaggccgaatagtacaccaatatctgccgggtgtttcgccagatcagaagtcaagccacccgatccattttcctccatctcaaaccaagcgacttcctatatccatgaagtccacaacaaagaacccacccgtgcgcgaaagaggcgtcagtgatgaaccttatgtcttgcctgctttgatcaaaccaatacgaacctgtttgagaatagcctcggttccttcccgacgcatccgtctgatgatcctgatcgatgctctctcactgaaccaagcaagaatgaggcctaacactagatttcctagagacatcacaaagaaccagagtgcccatcgggacgtttggtattcgacctcgttggcgtccgggacagaaagactttcgaccgcgcgacctagcatgaatccggacagaggccagctcgatccactattgagatttttgtttaatttttttaaaagagatattgacaatcgaggcttcagttccatcagaacaatcccaattaagagagggaggggagaaataaggaggaaaggagagaacaaacatgaggaaggcagagataacaccaaagaacatccatttccattgccaagtcgcgtatgacaacagcctggtccagcgcttcccttttaatccctggctcttctcaagctcttcaagtgactgcatagcttgctctgcatcctctactcctttggcataggctcttcgagtctgcttcgtcattccatgttcgtctagagtggcagatagtgcggttgccggtgcagcgcttgattttatcaggtctttcgagatgaatgaaggtgtatcaggagtgtattcggttttacttgagactgatccttgttccatgagattgtcatcgctgtctgggatacggccatggtgtcgctgagtcatcttgtctaaaggaatgacagaacggatataaaatcagatgaaaggaggatcatcagatctatgaatcttacgggcaaaggaggaaaacggaggaagggagagatatagaagagatagagagaaaggaagaggaaaaactgacagtaagctccattgagggtcatcaacgattcgtgagtgccctcttcgatctttttgccacttccgataacgataattttatgagcatctcgaactgtggacagtcgatgggcgattaagatcacggtcatccctgtttgggcttgctcttccatcagttcggtctgaagtcgtcgctctgtctctgaatctaaagccgaggttgcctcactattgaagggagagtagaagaaaggaagtcagccagagcactagcattgaggagaaagatcagatcgaaacgagtcagcaaggaagacaagagagaggaaaagctcactccatgatgagaagctttggccgacgaacgagcgccctagccacagcgactttacacacatcaaataatccaatcaactcttactcaagggacagagaggtagaaagaagggacttacgtcgctgacgttgaccaccagataacaaaccggtcttcattccgttgacaacagtatccaaaccttcgggcaacctactgatgaaatcccaagcctgagccgttttcagcgcccgagtacacaactctctgactttttggtcgttagtcttatcagtgtcatactcgtccggtgtgcctgagagtccgacagcaacattatcaagtatactgccagcaaagagtaagggttcttgagagacgatagccatctgttgacggaggaaagacagttggtaggcggacactggaatatcgttgatcagaacgttgttcgtgagtgagctcgggttgggcacatcgaattgacgaaggagctataagagggcaaggagcaaagaaaacgagaaaacaaaaataatccctattagatttcagaactcaagatctgtgtggggagaaaagagagaaaacgtgatcggacttgccagagctgtcaatgtagattttccggaacccgaatggccaacgaacgcggtgatctttccggcaggtacatccaatgagattccatcgagactcttgtaattcggtctcgaagggaacgaaaatgtaaggtttcggacctcgacgcttagctttgccaacttctcttcgtctgtagtaccaagagcgtaggaagaaggcaaagcagtaacaccctcggtctttcgacaatctatcggagatggtcgctcaatctcggcccgaatccgagcttgagctctcaatgcatcgtgtagggtggtaagatgaggcaaagtgttgattaccgctgttttcggtgagaataaaagtttgaataggattaagaaaccagtcagagacaggagtaagagttgagaacaacagtcgatttgaagcaatagacggaccaaacatggcattgaacattgagaagaatgaagtgacgagttttccgcttgacaggccatgatgagcaactctaattcctccgtagtagactgaacataaaacagttggagagaacgacgagaccaaaacacaaaaacgtcagtgagacggaaagagaggtgtgagaatcagaaggcggaagaaaaacaaacaagagagcgcgtaggcgataaagagtccaaaataggcggtcgagtaggagaatcccttggagagcgatacaaagtttccgtccttttcgatatcggcgaggtgagcgtcgtataccttgacgagggattcggatgctcggaagaccttaacaattctgacggaggaaaggatctgctcgaggaaggaagaggccgttccctccgtcttagaaattcgggcggacgcccgagaggaaaacataccagagagatagaatctgcagaaagggggtgattcagaaacagttacacttggagaagggaaaccgagaggagaaagaagtattacaggatactggcaaaggggataatgctgaataggacaccgccaacatgaggggacgcatagagcgacacgacgactgaaaacgattcacaagagaagaaaggccatgagccttgtcagacagttggccgcgggagagagaaagcagaagatatagatactcacttccagcgatgagggaaccagtgccccaagccataaaccccaacttttcgccgatacctgtttcaatgagtccgatatccttgacaagtctcgagctgacttccccgggaccggtagcttcaaagtatgtagcgtcttgtgcgaggacggccgagaggtaagctgttcttattcgggcggatactctggacgaagcgagcgagactgtatatgtatacaaaagcagagtgagcgaacagagagcaaaagggagagaaggaaggatagaagcaggacgaacatgcactgaaaaatgtaaaggagaacagccaagacgcgagtactacaccgatcatcactatggagacgaactgagatactgaacggacctcatctggcgagcccgtagagcctctctggacaactggaagtgttcatgcagaatgtgaggaaggaaattgtacaaggaaatagccaagagtcaaatttgtcgaaacgaagaaggataaggcaaacagaaagaaagaaagaaaagaaggaaaggatgtacgaccggcagtccagtgtccgtacaagagatcgatcgctgcgaacgggagggaacctggaaggaaagatagatatggttggtatgttgtccatatatctacgggtctttcgtgaaaagaaggaaacacctacagcaaagaccgccgacaaggccgagtccgtatagagcgagatcggcccgggtagcatatgagaggaagctgaggttagatgcaatgagaaagaaagagaaatggagaacccgatttgagtccaccaagaatcggatgagaccgatgaaatggaaagtagaacagaagggacagactagaatactccaggaagaggtttgaaattccttagctctggcatttctttggcaatcagctcgagctgtctttgtctggatttctcatttgattccggaagagtgaccttgactctgtctttctcggactcaagtgcagggtctattgatggctgctggtttgccggagacatggttcactgggtgatcggtatgtgggtgtgaatgtcaatgtagagaagatgaatgcaacgcggattgtctatattttattgcctttttttcatcccaaggagagtcaatgacttggccgattcttgagtagagggagagaaggaagaggaaagaagggagtgcagatagcaaggtatgaaggcgagaatgaacgaatttaataggtggttgaacaaccggctttgtcacgatgagtagataactctttccgcgcttctgaagcgacgagccgagccggcgagtccgggcaggatggatgatgcgctatggcccgaccgaccgacgcgacatcattaccatcacggcgttttatccctgatagacagataatatgccacctgttgcacaagcagtgtataaacttccgaaacataactctcaaaaaggcaattgatcaggaacagcaaagggaggaatactgcgttgttacgcttccggttcggttgcgaagacagacacagacagacaaagatcggtcgaaagagtcggagaatttaccagtcatcctttcagcaaggttctatgagagatgtcaaatgccaagagagtggatcgaaggaaataattgaaggggttacgctcttgatcacatgcttacgtaactcttccgacacgcttgctgcttattactttatgatgaagactgatccacagccccacgaccacgtgcaaatcaaatacgcgctgcggccggaccctgttagattacttgtgctagtcttataacagcggcgtctattggtgtctgcattgtttttgtgaaaagtgatagagaacctattagacgaaagtcctagtaattttctaaatacaaaatttctctattgttctaggaaaaacaccatagatttttgtattactcgtacctcggttagggttatctcactgactgtttcaccccaaggtcactttgtttcctttccctctctgtcgaggtcccactctcttcaaccaactctcaaactcacacccggtacatcaactccatcctcaccgaaacctggaattgaaagaagttaacagacgcacaaagcacacacgcacacctacatcccagaacccaatctcttttgggctgtctcttcttctgtttttcccttctccctcttgcatctttgacggaccttttctctctgttaacacacatacacgcacacgcacacagcccatctctcttctcttgtcctctttacacacgcacacacacttccaacccttgcctggtcttttgtttgtctcttagttctcgctcttttgtcttgatcacctgcacgccgacattccatccgctgtcaatctcgatctatcctctttgttgatctctctgtttcccttgctaaagggatatccatcagatcagctctccctccgctatgcccttcttttcaaacattgcaaacctgtttggggttgcgaattccaagcagacctcgttcgagactcacagtcattcaaaagcctcgtcaagaggaagagcagctaacaataatccagacttgttttctcgttcgtcttatgttttctattatctatttcttcttttctttcctcttatttttaaaaaaatatgtttctttcttgatttgccttcacgctcttgctcacatcgctgttattgtcttactcgccctctcgtgcgtatacctacagcgtctgtacggaacagaccgtacgcgtcagacctttcctctcaggttgctctcggcgtcggtgattccttccacggaagtcgacctgatagtccggcccttccctcgaacgctttcctctcggtgagaccctgttctttcagccttctcttcttgtccctctttcgtcattgttcttgtcttttttttttttttt

SEQ ID NO: 1725 - DNA, 75102 bp, Xanthophyllomyces dendrorhous
tctttttttttttttttggcctttcttcttttttaccgttcgaaagactaatttcattgtattcatccgttgcatccatccttaaaaagggtatacaacgaccagactcgcctggttccagtcgattacagacctctttctcttatccaccccgagcaatcagtgctgatggaggagccgcctatggccacgtggtaaacccagcagccgatgcttatgaccctagtcgggcttctatctctggctcattcgtgaatgatccccgagcgccaagatctggactatggcagccctctgcccctcacccacacgctgtctatccaccccttggtcaaacctggcaacgtattagactattcctcgataccacgtatcccgacctggccgactcgctcaatctgcctgctaccgggctcggtctgaacgatctcgagctcagattaaacatgccgctcccttcatctgtcagagagtcctacctgtgtacagatggtcaagataccgatggtggctgtaccgacggcttgtttttcggcctcccattcatgccgctcgaagaagttctaacagagtggcagtactggcgaagggtcgagacggatccacagactggggcaaacacgatgttacaagaacgcatgcgatcattccctccccgatggtgtaagcgagcctacgccaatagaggttggctcccactcatttctgaccgagcaggaaattatatcggcgtcgacctcgatcctggaccagcaggcgagtggggacaggtcatcttgtttggaagagattttgacacgaagtgtgttctctggaagggtgaaggcgaaggaggctggggccgctggctcgccagttttgcagacgacctagaatcagctgaaggttgggaactcgagagagacggaaacgagagcagcgtatgtctatcttctctcttggttgttttatgccttgaaagaggctctgaccggcttctcgtaccttcctcttcctcctctttcttctttcttatcacttctgcctcttgttcctttccttctcgtaaaaaccctctacaggattctgaggatgaaattggctacgcatcgtactctggaggcaacgtgtacggggacgaagccaacggtttgcgtctctccggtcactatcgaggttggccagtgttggaggctttgtttgataagagtgctcgagagtgggaccggattggccttttggtcgacaaggctcaggaccgagatgaatttgggctggaagctaaaccgaactcacaagaaaccaatgtgccagagtcatctgatccttcatcaactcagtctcagcctcaaccatcgttgctaatatctgaatccgaaagtccaccctcgtcctcttcactgtcgaatgggggccctcggttgctcgtctcgcctgcatcttcttcatcaccatcatcaagcggcaggctgattggcgagttgaagaacccaacattgctctctccaatcgttactaataccaagtcatcatcgtcgtcatcgtcatcgccatcgccatcgccatcgccatcgccatcgccatcgccatcgccatcgtcaaccaaacctcggcattcacacacccatacggcatcactccctccgaaaccagttgacctcccgacccggtcagatgttattgccgtagaggccgttgctgtcgcagaggacaaaaatcttcgaggaggatggatcatgggcgggctcaatgtcgatgcaggccccggactggatgatgggtcgcacaccgtcgaagatcctcttgttcagtcagaatcgtccaagccgggtccaactttggctaggcgatcagcaatggtcgatgtcgatctcgaggagggcctcggctctcgattcggaaaaaagtctgccgacgggggcgccagtggtggtgatgacgatcagccatcgcctcggccgtcacttagttcgttcttctctaggcgatcatcagatggccggattggtggtgtccttccacaagaattacccctaccaatgtctctgccaccgacgcctcctcagtcactttcaccgcctccgtctcaggtgcatataccgttgatcgaaccgccggcgaggttgaaatctccgttagggatatcgaccgtcctccagtctgctaagttcgatcgaccgactacgtctgatcggttggatgagaatgaaggtggtgatggtatgatggacgtcagcctgcagactgcagtctaggaataaggttctctcctccttttctctcgctttgcctatacattcacctgtattgtcaataggtcttctttctcgactgtatcttttacatctggggatctctctccttatccaccagcaggcgattttttcttatccttttcttcttctttcttttgtcttttttgctccctttccatgctatcttgtccgaaaggagagaaaggtaaagaagaaagacttgtttcgttcaacatcttatccatccatgtgttcaggcatctgtcatctctccctccctctctttctttcctctattctcttgattccaaattgacattacacctagatacccctttctacctggcaactcttcttcttcatcttcctagccttcttgttcttttcctttctttttctcttatttcattgtcagtaggtctctccagatatacacactcatccttttcctatcattctttcttcttttcccccttcctcctgctacttcaaatccatggtggaaaaagctcgttcatcaaaaggttcctgttcccctcatctcttccccgataaactttccttcttttagttcttcttttgcatttaccatgtcttgtctaccttcttccttctgctccgaactgccaggtcacgttcggtttcttgtggatgtataggtacctgaggatctatacatcattcatttcattccatctcatttcatctcatctcattctcttccttcttcctcgatctttccccctcagcccgatccaacactttgaacaagatctaggatcaaggactgaggtcaaagatggttagagcgtctatggtttaaccgagtttcgaggactctgattagatccagaaggtcatcagcaagcgagcaagcgagcaagcaagcaagcaagcaacgaatggcaaaaagagtcagaaacagactggacagaggtagagcgcaagacagaccttatgaaatcaaggacattctctcttccgacccatcctacctcacccctcgggtcgtttgggtcgcctggggtcatgtcgttttccgcatcgatatcaccagccccagcctcatccccatatttaacactaggatgagagttgacatcaggaagaggggtgtgatgagagtcggggttagtttcatcaccaaatatgtaaggtgttccagatcggataaggaggattccttcatccttgctctgtctccgttccgcatcggataaattcgatgtcgaaggtacacccaactgatcgctctggaccatggacaagttaggcggagaaggaagagaagggagtgaagaggaagaagattggtcgataagacccttccctagatctatccaagcggaaatgttcatcatgggtccatggacagggataggaatcaaccgttgtgggtgtttgaacggtggttgagcgagttgggatgatgctgagagttctgaaagtcttgattggagaaaaagaactctatttaaacatacgtgtgtatgttcatgtttgtcagagtgtttgttcgcaaactaggtttgaggtgctgggggtgtgtacaaaagaggtaaaaagaagaaggacgaaccgaaaggtagcttcgttggaagctatgtcaactcctctccatttcaaacaatcgatcacatcttgagttccatcacccattactcattcagtcagacctcaatcttcttggagaacaacggatataaaagaggagagaagaaaaaaatagagcacatacggataaggccattgaatttccacccatcatcgagcacgcagtcgagaattgtctctgctggtaaaggtgaggcccacctgagaagtacccttgcactgatcctagtatgtaaacttgtcggagcccctgcaagtgccgaacggcaagaagattgaatgataagaagacaggtctatgtcaaaaaaaaggtgttggtgtgtttggaagcgtctgacgaaacacggaccatgtggaccagaaacacaaagacatctttttcctcttggaattggtgatagtgcgagccagtcggtcgtcagttccgaagtggccggaagtccatcagcaacaaagtccgggtggttctttagcgcaggtaaaggatagaggtaggcgtatgtcaacctacgagaatgaccgaaattgacatccagaataagtcgctatgacgagttcgcaaacaatcaagaggagggatggacctagaacgaacacattggaaagcgaaagatctcgctgcttgccctttcttctcccctttggccttttcttctttgagccgacgctcagacttgtatcagagggatcaacagtcaaatcattgatcccacctgtgaggttgtccacttcattcgtaaatattctggcagaacgtgacgcgacaccgaggtgtccatcttccccctcggaagatgcagagggtgatgaggagcgagagggtgaggtggatgctaaatgggagtaagcagtgatgtttttcaatcgttgtgctacagtaagaatattccgtttctatggaggcaagcacagtggacatagaatatgagcggaaaccaccaacaggatgttgattagagtgcggtgaaatctattgagtagcagtggtccggtaaccttacctttcgctgttgatttactatatcttcccttttggaccgacgagcttgatctggagaactcattaatggattggccaaatattctgatgatctatgagcgaaccgagccgctttgtctgtcgtaggtgatccgatcatgatggatgaacaaatgaatgagaactacagtcaagggtttgagaattctttaagtaacgtttcttatcagataacgattagtttctgagatatttagtcgagtattcaaatcagattcaaaaatcacgcgacgcgtccggaaatggaaagccgtcagacaacgatctctggttctttccatcaccatccctccattgaccgaacaacctttccgatggcaccgagagtctcatccagtagacagaaaaccagattcgaccctttgttagtcaaaggacagtcgtcagacgcgctcctgaagaaactcaaagcgttccatgaggagttgaaggaggccaatgtggaggacaacaacttagagatcgagaacccgcgttcgaaggtcttcaaatataaggatgagctagttgatcgaacgatcttgtttcacaaagagtaagtcataagcaaatgaacgatacagaactagctgtctgtacgtctcagctttgagagacgtacattctttggagaggcgaggagagtctcaaaacgaacgcgtcaagggattgttcaggcaacagtcggaaggtgtctacgattaaacctcaaccaagcttacgatgatgcttcatgttcctcttctactattctgtttagtccaggggtaaaagcatatgcggcctgttgtctggcagacatcttgaagctatacgcgcctaacgcgtcttatgatgggagaggaatcgaagtatgctctttgtcaacttgtctactcgtctcagttatgctaaagaccttccttttttgacaggatatctttgcgttctttctaaaaatcataacaacccaactgagaccctctaaatcagtcacctcccgaacaggatccggcttgtctcatccaaccaagaatgaattctacaaacaatactattaccttgttgacagtatggcgtcgtggaagagtgtggttcttatgctggacgtcgaagaagccgaaggagattctgctggaggggttaatggaagtatgatcgtccagatgttcaaagagttttttgatctcgtcaggtgaattgtcctttctcggttgtaaatatttcggccaagagagtcccctgtttgactaaatatttagctctgggtctactgtttgtgatattttctagatatgatctaccaataactttgacagatcatttggcagacatcctgtcgacattaatcgaagaggctcaaacactgaatcctgaagtccgacagatcatcctcgatcaattcgatccttctcttcctgtttgttcacatctttccatttgctgcgtctgtgcttctttttcgatcaacttgtctttgtcctaacctgtagacatactttacacttcttttcaaaaagggtcaccatccactggccgttcaattggcagtctcggtgtgcgaatttgattacaacatgcaaaaactcgagcgtggtattgcccagtactttatggacgtcctgatctcatttccgatcgctaccagcgcatccgaccgaaagaaaggcaaatcgtccaaagttcggaaagtcaccaaaggcaactctcccgtgccttcggatgattcgtccgatctctcgagcattcttgacttatcagatgtcgactcgtcagacgaaaatcctcgatcaaagagatccgctaaccctcacgccacgctggattccacccacacacttctccggtcaattggtcgatacacacccctcactttactatccactttgccaattttagcgtctgagttagaaaactcagagttgacacacagaatgccggcggtggagactctgggcgatctgtttggccatccggccaagggcgccgagatcgttggtaaagcagagaaggtctggatggcatgggtcgggagaagtagagatccagacggaaaagtccgaagggtttgggttgataaagtaggaggcatgatgggtactgtaggcggagcgggaagtggagtggatgtcaagagcgccttagaacgtacgataatcctcactagcctttctgcattgaatatcaagtgcaaagtgcatataaccgattgagtgcctctttttttcctcatagctcacttaaggctgaagatgaacgaccaggacgacaaggtcagagaatcggcctgccggatcttcggaaagatggatttcgaaaccgtgttgcatcacgtccagcctgatactctcaaagatcttagtatgcggaccaaagacaagaaggtccgttcgtcctgcgccaatcatgaagcctgcatcgcatcaaaattcaagtgatattcttctcattttttgtttctttcgcactgcaatcttgatcagatctcggttcaagctactgctatccacagtttgtctaaactgtactcactagcttcttccgaaatgttcgtcttcctcttttcgtactgagcttcctcagtgttatgactgacactgtttctcaatttgaacccacagtgaagacaacgagccaagtgcgatggagcggtttagttggatccctcacgagcttctcctctgctgccactctgccacggcagcgatcaggtctgtgccgtcttaacctgcagcgatacttttgtcttgttctctcagattgttagaagcaactctcatcatctgtctcgacttaatcgttcttcctcctaccagggaaatcattgagcagagcttcatccgctacatccttcccttgcctgtcaaaggggatgaggagaccatctggaccgacaggatgttgcttgtcttcaaagggcttgacgagaggagcagagctgcattctttgccatggctggatttacaccgttggttgcttcttgcttttcttggtaaacagaactgagcgctgaccttttctaatgattctttgttggggctgacagtatcaagggtcactactcgaggtttatcaagtgctgtgaattgtataatgtatgtttccttccttccattttcctcttttttaggtcatagctagttttctctatagcataggtacaatcgaaagctaaccaattttctctctggcctgcagggtggcataatggatcaagacggagaggcaattaaaaaacagttgactcatcagatcaaaatcatgtctggtaggtgaaacattgttcctttctgatcacccctccatcatctttgttaagcaatctcttcgtttgagtttcaagtcatgttccctgatgccagtaaggctgcttccgacctgagggagtttgccgagttgaatgagaaccggttgtatgtcctcctgaggtctgccatggatcctcaaactgacctcaaaacactggtcaaaatccaggtaagcgttgcctgttgaggaacctacgataaagttgaatccgacttaatttgactctcttccttcgcgtcctctttcagacggagttttctcgtcgagtgccagaaacgattcgttccacatttagtatcgtcattcgccgatcatccttttcatacgtcaatcgatcgtccattcctactctccttaaacgacttcagaaacagatacctcaacctcctgctactcctgcactcagtacagtctctgttgctagcgcatcgcagacatctcaactacagtccacgcattcccagttccagtcacttgaaattcgaacttcaatcgcccaagcccggagtgaaggagctcggtttgtgctcgagacgatttcaaaggtgtgcccaattatgttcaaggcgcacggcaacgagcttgggaaagctgtgttagaggagtcacccgaagtggagagtgtggcagagattccattacaggctctgggaaatttgggtagagttgacccaacaacttcagtaggcgacaagtaagtgattcttctactttccaaaccgcaaagacagctgtgatagtatgctgtacaacactaatcaatcaatactgcaattttgtgataacgcttaaccttcaaatagaaaattactggatcgagctatgttctttgccaaggaaggatccgctcgacaagcaaagtttgccgctcgacttattgccttctctaaaagagcagacagccttactcctgaactggcggaggtaagcaagcacttcttcgactaagttcgtcttttggaactaggccggctgactagttctctggccgtgcaccttgtgatacgtagactttggcaaaaaatctcgatacagatgacgaccaacacctatacgctcatctggccgcgctctcagaacttgcccgctcagcgccaggcgcattcgaaactcagagcaagacgaccattggatttatcttgaaaacgtttggccaaaataatgaggaggtgcgttgtccttttgttttgcccactccgtcttcttgttctgttcttcctccttgacgaaacgccctgatgacccaatttaacttcgttggtcttgtagaatgattatgacccagacgattggattgaggactatgagctaaccgatcgagcgcgggcaaggcttaccagcttgaaactatgtgcgaaccgatgtatagttcacgccgaaacgaccgatggcgcccaacttgctttgcctgttctcaagcttttcctaactatccttacacagagtggattcttcaccagtaaatcagaccagtgagttacatcgatgtatcgggtcgacgtagttagagagacgcacgctaaaatatgtgtttcgttatacttgtagctgcaatcttaagagtcgcgttcggctccaggcaggacgatctttgttgaagatctcgatgttcaaacgatacgcggaaatgattatgcccaacttcttggttgtagcagttttggttcaggtaatgtttcttctgttcatctcaccatttatagaaacgaatcgttgacatcgaccctaaatctcaacatccaggatccttgcttctatgttcggcaaaacttcattggtaaagcgtgcgagtatttaggtcgagataaacttccttctgccttcaacgtcatgctcttccttgcggctcatgatgagccagaaatccgatctagcgtaagttgagcgcaagtcgatcattcgtctactgtctataagctaatggagtctgagtaatttttatacaggcaaaaaacacgattcaacgaggaatgaaggcgtctggatactcatctgaacgtgagcatcctttctggtccttctcactaggcgttgaaacccggatgctcattccatcccaatattcctgtgttttttcttacagggagaatgatcgaccgatatatcttcatctttatccgactgatccatactctggcgcatcatcccgattatacaaacgagccagaagaccttcaaagcatcgccaagtgcgtaaccagaatttatctctaacatcagatacggcttacttacttcatcgcttatttgtatgaataaataggtatatcgagttctatttggacattgttctctcaaaagagaatgtttcattgctttacactctagctgctagagttaagacagttcgcgatcgggaggaagagtactctgaggttagtgcttaaccatgactgtctctcactattcaagcaatttctctcatagattccaattgttctcttcctggctatagaatctgtatactgtaggagagcttgcccaacacattattcaagctcgaacgaagatccatcactggacgcttgagtcgtaccctggccatataacgatgcctaaggatatctttaagcagatgcctagcccagagatcattcagaaggtgcgttgcgatgtttctcacttgtagaaagagtatattcatgtcatctctttcttttataaatctattctgctaccaaaacagaatctgctcaaagtgtatcttcctgaagaaactttgaactttttcagaaaggatttaggtaaaaccattagagaccagaaggtatgcatatttttgatcaatatttctttctgtgaaagggatcatcaaaggggccttctgacttgacttgaccctgtctgtacaataacaacacgaatctaatcagatccgtgtaaagaagccgaccgtttctggccctgataagtccccgaggcagaaaaaggcagctgcatcccgaaagtgagtttgttcgcttcaactaatttcttcgcatgatactattccgcctaacgtgactctcaatgttttatcatcctcaggcgtgccaaacggcgtaaggagtattcttctgaagaagatgacccgacttcctcagaggaagaagatgacgaagagaacgacgaggatgacgttgaagaagaaatgccgcctcctccgtcgcttgtcaaaaagagagccaggacagagtctgccagaacaaacgctcgtggtcaagcagctgtggttgattcggatgacgaaatgcttgaaattgaggctaatcctgacgacgcttcagaggaagaggagcaaacgttgggtagaggtgggaagagaaaggctgcctccaagcttgtaggtctttcttacctcctatcaatacatatatcttctcgtctttctcttagttcgtcgcgtctgacccaattcggttgttcctttcttccccttaaaagtctcgacccaaaccgaaaacacggtgattatcaagggaatggtattgcgttgaacatactcccaatgtataccagatttattttcaaacgtctgaaggagagtgttttatacaactggctttccaccttttgtctccttactttgtatatatgttctttcgtttgtctctgcttttcgttctccttgcctctcgaatacttctcatctcctctaacttccgcgcctgttatatattatctcttctgtccgttactagcttccggcatatatctttctttctcgcgctgtttctatcacatgctactcatttccctcagtcgtccactcgtctatttgtgtgcacagccgcgccatcacgatctcaaatgtttgagacctctgaggaccattacatcataagtgtatggcgtgtaacaatctaacaatggaatggtgcaaaaaaaaatacgcagggcacacatcgagttggattgaaacagagatatcaatgaagaagcggacagcaactaagaagagttgaacgagaaagaaagaagaggagaagaatggaggtattggatgccggatcagggatgaagaaaagctaacttcaacgacacaacgattggcggtcatcaaatatgtatatacataaaacaaaaagatattaaagctgaccaagatacgcaagaaagagttttatgaccaagagttcttgtcccatgatgggtctgtttttgttgattttttttgaacaaacgataagaaacaaaattgcgtcagtttctttacatgtacgattcgtcaagataagaaatactaggttggaagaacaagagggctgaccttgtaggaatgcgcagaggactttgcttcccgtcttttgaatgcacgcgtggaaaaaccgactgacgtcagccttgcaagacagatacgtacaagatgtattcggaatgaagagaaggatgcaaacctgtagcagcggatgtccagcaacaatctctaagaacctctgcagaccttcccttcgctgatcgatgatctcgtcagtgaacctattggtaaagatttttcctggaagaggtggaatattgacctggttgagatatataggtgacatttttgagttagttagagctgcacgtataaaataagtagctattgaacaacacactctcgtagattctctctcgagagtatctctgaaggcctcgaaatcagaatatcgccttcggacgacagaatgtctgagcttaaacgccggtatgtttgtctatcagatatagatgccatgaacaattctctgagagttagtccaactatttcgatgacacacgagcgattgagaaattgttaaatatcaaacgaaccaagcagacgatctcgtaatcggtatacatctttctgcccacacctacactcggataattcccagtcggtttgtcgtcgtcatggtcatcattagccacacgcatctagaagaaaggaggagataaacgagtgctgaccatgcgtctgtggatctttaacttcaatctccaagaacgactctggagcagcatacatctcatcaaactgttagttccccaaaaatcccacagaacgataggatacaacaatgttttgagtcagcaaacacatgaccaacatttacggatgcgtatatgcatacttgcgcagaactaggaacagatcactcagacagaaggaaagtgatccgagagttgaagacgttatgtatgtgttgtatatctcaacatccagacaatcactcatcgacctatagaacgagccatccgctcacgctccacgagcccatcgcgatcggatctccaccatcaccatctcctccgagctgactcatctttttttctttcctttgtgactctaactctcatatttatttcttggacctcgtagagcgatagtgaagcgagaaaaaggttgcagtggaacaaaagaaggacgagcaacctacagtctgagctctcattcccgggatccgggtaatatctccactgaaagctcttgcaaaaggagaaggctgcggaggcggctgctgctgcgaatatccatcaccatatgggctcggttggtgctgctggtgatggtgtggttggtaaggctgttgatgttggtactggtactgattgttctggtatggctgttgatgctgctgttgctgatgcgggtagggctgttgctgttgttggtgcggattgcgctgctgtgaggaagaaggcgaggaaggagatgcagaaagaggacctggagggagaggcgttggcatgaagctcatggtgttaacgaacaactacgatggcaggtttatgggaaagacggagagatgatgacggtaagagatcaggagagaaagggcgaaggagcggtgacggaagaaaggccggcaagatatgtaggcacttaatattcaaatacaatttcaaataagcaatagattgaccaccgcggctcttccctagcgatttgtctcaagaaaacagattgtataaaggccgctggaaagcgtggattctaaaaacacaatgcgggagggaatacatccccaaagaggacggagagggagaacgatggaaaatggaaaagggtaacaaaggaccggagaaaaaaaagaaagcaaagaaagtagaaacgacatctaacatcctcttttcattttaaatgtccatcttttcgtatccctcgtttggatgcaagatgaccaaaccctcaagcacatgactgtacgcaaagaactcctcggtagcaagctcagcacgctcgagcgtgccgatccgaacgggtgtttgatgagtgacgaatccagagattcctctcggctttccagcctgaccgacaacatcgaccgcctaatcaaaagcaagaggaagaaagaaccaaaaagaaacggagaaggaaaaaggcaagctgagtacttttcacagagcaagaaaggaaggatagaagaaagaggagtcaaaagtgcaacttaccaatccaactcgagttgtcacctgctttggttcaagcttctcatccaacgtgataaagaagcggggatacatggccgagacaaggaagtacatcatccagtgtgacttgtccagaacgactgcatgaaagatccaaaaaaggaaacgtatcagtagaatgaagagaaaaccttgaatcaaaaacgcaaatgaatggattacatacacttctttgcttcggtgaaggccataactgtggccagcagaccggcaatcgctgtcttggacattaatgaccgatccgaatggaacgggttaataccaatcgttcctttacccatgtgaacaagaccctgtatgggggtggagaatagcattcagaactaaagatcagttcggccgcacgtttatttctttatggaagaacagaaggaaggcatccgcacctgagcgaccctgacaacgaacaagcaatcctgttctttttggtagtatccggccaactgcctcaacatctgtgccaactttgcgttgttcgtacccgccccaacaagaccgagcgcaaaaatcgcattcagagcgacctcgagatcgttatcgtgcgagtacttggacaacgtatccaagatagccaactgagggttcgacgcgcttaacagaccgagcgcgagagggacagcctttcggataaccggatctccatagtacatctgatatgatcaagaaagttttagttcgtcgaaaccaatacaaaccgagttgaaaacaaacgacaagtagagaaaagagaaagacaagacgaaccaagtggttgaactgtctcaaactcatctcggcaccaacatcctctcccattgctataatggcgattcccaagacggctaagccctggtatgtgggatcatctttctccttgtccaggtggtcattacagtggtgaagcatcgactgaaccttgagcacgttacccgttccggcataagcgcacacatcagtcaaaatagaggcctgcttggccaacagatgagggatcgtcttcaagatttcgcacgtcgcatccgaagcgtcttgtcgaccaacatatagtagagccaaaccaagagccatgaaccgagcccacttctctccgagtgcgtcatctgtcctttccgtcatggtcgtcaagatgagctcggcgacctctccgttggcagaaccgacaaagatgaaaccgagagcgagagcggtgagagaggcaacttccatcgaggtggtctcgtctgcgatataaggactgagaaggtcaagcaagtcttgtcgttgtgctcctgaataggccaatccgattctgagattgattcaatcgcaaggcgaatcattgatgagtcaattcttttgaacagaaagatagctacaagactttgggggatacacaagtaagcgagtaacatacccaatgattgcactgatcttgagtggcacgctcttgctttccacatgtggctccagaagcgcaaatgcagcatcgacctcggttcgcacaccggcgtgcaggataccggtagccagcaccgctccagcctggtacccatcagccagtttcatacccgaagtatgttagtggttgtgtttgagaacagaaaaaagaaactaaaaaagaaaactgaggacaaaccttgatatactcttcagaagagtacatgtacttatccacatgggacagtcccacatccgtgtcccagagcaaactcattcccaaggaagcagctgccgacatcatacctaaaattttagatagtgcgtaaatatgttaacaagcgatcaaacagaagtttgtgaagatattgcgtgacggggttgaaagagaacaaaccatgatccttgttcttataaatccaagagtttccctcttcagcttcaaccattaacttatcgtttccaaatccagcattgacgaacgcgttaacgaaggttcctgccaagttggctcgggcagaatcgatcgacatcatcgtccctattgtgacaatttgtagcgagaagtcagataattcctcaacactgacattatcatagagtagcgaaagaaagaaaggaaaaagaagaaaagcgctcacgagtgctctccaaatggctcttgtagatgtcctccaaaccttttggctcgacaacgtccaattccttagcaaacagtttaaagaactctgagagcttggtattgctgatacattcgacgagctcttcctcgagctctggcatatcgtccgacccttcagcgatttcaggggtaacccagtcaatcggaatgtttgacctagccaggtggaatgctagctgcttcttcattgacctaaatgattcgacatcacaggatgagcaagcaagcgcacgacaaggtggatggccagagcccgaaaacagaaggtcccgaaagagaaagatgagaattatacaaaaacagtaacacatacaaattggcgggagcattgaaagcttctcgaacaagatccttgtctccgattcgaatggcaagcgtcatagcttcggaatatcttgagtgcttagcatagatagcatgggcggttcgaaggaaccgaatgtcatccggcgggaccaacaggttgacacacctacaatcatgagtgatgtagaatcaaaggaaactagtgattagcgaataggatggaaatctggatttatgtcatcgaccaaaccagccagactccgcaagaaaggaattgaagagggcttacgaaaccatgtagagacacactcgctgatacgtatccttgtcgaccacctcgagaattctctcaatggcctcgagctccagcaacaaatcaaccgcgtcggcctcggcgttgtgcttcaagaagaacgggacaagatctaaagcaagtttcaacaaaccctcctttgttgtctctgctctcggcgaggaaggaatcttcttgtcttgttccttcgcatcctctacaattgaatcctttccgtccagttttggcttctcttctccctcatccgcggggagagaaatttccagatactcttcgcctaactcagcagcaagatgtcgaacatactcgtttccccatgaaccaggatcctcagttgactgagagatcaaccgatagtggagagtgtctcgcttgccggtatccgagtacgtcattgccaaaacagagaggatcgaggccaaaagagtctatttggttcaaacgaggtataagcataagagttgatagatcgagagaaagtgccatgacgagagataaagagctgactttttgtgtagaaagttcagctccccatgctgatcgaacggcttcgagctcagagtaaaacggacgaaggaatttgaggggtttcgggacggaagtcatcgagcttgtggatgttcggatcaggttgcggagagattcaagagcaggaatatagagagtgatgtcggattccttttttaggcaaagaaaagcccaagaggcgtgtaagcacagcgaccgagagcgatggaccaaagagaaagctcacttttaaacgttcgacgagcatttcgagctcgtttttgagactttgatcctcttcagactgttggacattcgatgacagtagagcgtatcaggaattcattagtaaagcgatctgagttgatggcgaccttatatcagaccaagctgatcgtattcatctctccaagtttcaatgtcaatgtacaagcttgtatcttgagaagaggcaagcatgatgattcccacagatacgctctcgtttaaccaatctctcctctcgaatgaaccatcgactagacagctagtcacaagatagcagttgaagagggagaattcaacaagggaaatacacgccacaacccaacagtctcgcccgagatcaacgcaaaaactgaggagagagcggagaccaatcacaagaggggaacagataggcgcatagaagaatcacggagcgagacgttactatactcactaattcgtcaacagcaggctcgttctttccactctttccttctccattgatggctttcttcttttccgtaccggatgtatccttggattcttcattctccttggactctttatcgtccttcttttttgggtcctccgaggtgaccgagatctcaaacgagggcttttcaggctccatatgtattttctgtaatgagatagattgattagaggggagacgataggaacgagagattgaagggatgtgggttctaggttgatggtgatgatcaaagcgagtagaggatctttgttccacgcaggcaaacatgccaggctaacaacgtttgtcaggctgacttgagcgtgagcgtcagtttcaaactgttacgatactacaaagtctgctatccttgtctgtttcttgcgccacctctgttgtaaatcttgatatcttcgatcttccatcctttctcaagcattgtgcattgactgacgacgattggttagcacgctgaacgactgccactcttgagacagaagtttgtcggactgcacgagagagacattgtgttaccgaaatgagtgctgtctctttccaaacagtctactgtgaaacgcatatgtacctctaacaaaagataaccaaagcctgttgaatttcgacagcgaaacagacgactcagttcgatttgtcgttcttgctaaccaactccaacgccctattatcacttgatggaatggtacgaattgttcagtttctcctcgcatctgatcttgccatgctcttgtgcgttagtccaagaccgggactgatcaagttgattttagctctaatgacgtttctcaagcatgcaaacttgttcattctttcgacctacactgggtggttatcatatttgtctttgtttaagcctttcccatacggttaaagctaatcagaacgtccaattaatgatctgttcggctctattttgctgatgtgaacaattgacgggaggtgttcctgaactctcctcgtctcttttcgaatctgttttcagagagtctaagctttatatatccggcgacaaagaagatgcctaaggaataatacaggttcttatcgattggccgttatttccacgtatcctgccccgctgtttgcaaggaagtaagaactgatcacatgcggatgctgttgtcaagcaagaggtccatccttcaccaatgtgacggaatgtttagtaactgagtttcttctgtcgtctgcacctgcagacactcgattataacgaagctttgacatctaggaatcgtcttcacgtttgtttcaaggtataaaaacaagaagaatcctcttatcccttcttagatttaaatgggatgagatttttgcttgtatttctaatttatcgacgtgtctggcctacactatgggctcgtcatttgaacgaagtgcatcggtttggtcccaagaagcctctcaagaacaccgtaaaagtgatatagggaatctagaataccatcaagatcaagcgtatcgtccgaacactttgggaggtcgatattttttgaatggctggcagggttgccgagatgcatgccgttcaggtgaatgtgttgtctcacgtgtgcttacccctatcgaggcgccagcgtgaagctggagttggcttcctctttacttccctgggcagatggagtgcttgatactttttctctgacatgaagacgaacagggttgtgaatatcgaagtgggtccagatgccagagtcttctgttggaccctacacgagtaacataataagggaatattgtctctcttcttgtttgttctatcacatacatgaagagtactgatcaggctgtctcaactgaagtttcggaggacgaacatgaggcaatcttaaagccgatggaaaatacacaaataacaaaaagtccatactataatacgtccagcatcatcacttgataaacacaacggctttctgctatattcatcatggggtgaggtttcaatatcaagaattatggattaacacatgagtagtacacacgtcaagagccaaagagagtaagcgatatcgacaattatgactaccgaagtcctttactatctaagcgtcagcaacgtgcaagagtgacgcggtctgttcagcatttggtgatgaaaggtgaagagtatgcttacgtaacttggtcgaagacccgagttaattattcaaagaaccgagtccgggtccgcggaactgtggaaccggtctacgccaatggaaccccgtctatccagtttgccttcctcgctgcacttcccgagaggacagactaaaaagtacttgaataacatgaatcattatcttatttttttgccgagaatttactgtgcgccggtgccttgagcgccttttgcttggtaccttgccctgcctctccgtaacccgcgtgtgggtgtatggtctcgctttgtctcccaacaacaccttcctggtaggaccgctgtacccaacttgcatacactcacacaaactcttagcgtacgcattcagcatctaaagcattaatctcttctccttctcttaagatgagtgctcaacatcggtcgatgtatatgccgtcgagctctccatacttgtgagttctgtccttgtgatgtttgtacgctttagggaatacgatcgattagacaagatcgacccgggggattgtacgtggagagaaaagggacgggaaatgtggggaaaaaaggggcaaaagagcggagaaatctccctccattctgtctgctctgtcttcctcctcattcccttcaatctttctaaacgggatgatgggagactgatctttcgtttgtttcgttgacatacatacacgcatcacccatgttgttatcccttgcccttgaatgtacatggtgtttatagaaccaatccgaaggtcaagaaagagggatttgaaatcccactctcggcctcggccacgacgacagccagcaattctttcttcaagaacgggtctaataacgacgactctgccagctggtttcaaaacctctcaacagactgtaaatcctcccttttctcttcttgttcttctgtatctgggttggagtctttcgacgtagggttttaggaaaacaggggaaggagaagagtcaaaatcatcacaatgaccgccaggctaaaagccgggccggcgtaggtcggtacactccgaaaaccgaaagaagatgaccgcgtcgaaggaacgaatggttggcccatcctcggtgtctccgttttccttctttccttcccttctcttgttatagtcgttgtgtaaagcactcggaaccccgactaacccgtttagcatttctcttgcgcttcagctcatcatcaatcgtcgcttcatcaattcccaccagagcacaactataatctctcggcctcttctcggggatcctcctttgcccatctacacaaatatacaaatccttcacaatcgtcatcatacagagatacagcagtactcgacctcgaggcattatcgtccttggtgaactttgccgacgactcgcccaccaaccggtcaggcacacgtaccgagggggacagctcgctcgatagactctctaacaacgccggagccaacggtgcgacatctcttcccttgcatggcttcaacttcaacggctctactggcagtcacaactaccttcacgataacacgattcccaatccacagagtctttcctcgttctcagatggcggcaatctgtctcgatccccctttcatggaatcgatctccccacctccaccagtccggccaatctgcacaacggactgtaccctccggtttctcagtccatccaataccggcctcaggatcagtctaatcatccacaaagtccaacagattcgagtgtgtactcgatcagccaagcctctggatattcctatgcggataatgttcataatggatccggaggagatcaagccaggaccacctcggcccatggcatgacctttggctcgcccactactaccttctcgtcctcgaattcatccgctgccaaccaggcaaaaaacgctggccaaaccgggtcttataacaaacagggctcttctgctactaggtctagatctaggtcggccgtccgtggtcagagtgcgataaatgcgccgcctccgtcttccgctggagggaaagccccgtcgtcccgatctcggtctgttcggaaaggatcgttcaatgcgtcccagcgaccgactgtgctagattcctccccttcggtccatagcgctagctatcaatctggtcaatcctttggctcatctcttggcgttcttccttccgtcgcttccggccgtcaaagggcgagctcgattgtgatgccaaattattctcgatcgccacctagcttcaacttggccaccggatcgtccctcccgtcggctcttcagggaattgggcttgattcctttcctttgggttacgccacaaacgcgatcggaaccggtgccgccgtcggtgttggtagcgccggtaccagcggcgcaaatgtcaatggcagaccgggctctagcggaggtccgagcagtaccagttggatgttctctccgacgagtactgatggcaaggaactctctcttgtcaaagaaggtccggtcgaaggaggtatggatgaaaacgacgatgatgatatcgaaggtgatggtgaatgtgatggtgaggctgagggggatggcgaaaacgaggaggaagatggaatcgaaattttggacaaggcgtaagtcagcaaaagtatcttactcttgtgagtttccatactgacgatgatttgtctgtctctgcatattttgctttgattctacctcttgtcttctttagggcactgctcacggaaaaacgacggcgacgtcgagagtctcataatgcggtcgaacgtcgtcgacgggacacaatcaacgaaaaaatttcggagctagcgacattgttaccccaatgcatgctcgaagcaggagccgcctacgctcaccctgcttcgtctgtccttgccaatctcggcggaatcaagttttccatggatctcaccgtcagcgttcctggtcccaccccagaggatattgaggaagaggaagaggatgaatcggcttcggtcgttgttataaagggtaagaaaggtgctaaggcaacgaccaagaagaagaagaaaaagagcggaggcgcagggggaaacaacgcgtatggggcggatggaaagcccaacaagggaatcgttttggtatgtttctcttctggccatccattttgagtggttgtctcgctcgttctgacagagtgttttcgttctatcttgccttctatactcttgaagaaaaaatcggtggactatattcggtaggtcttataacttcttctaaggtcgtcatcattcaggaacatggcgattgttgacgacggtttgacaattttttcctcacgtgctgcagatatcttcatcaaatcattcaagctcaatccagacgtacttcggaactagaagtcgcactctcctcgttttcaggtcgaaatcactctcctggtcgactctcttcggaatctcaactctctaacctctcgtctaatccctcgagcgctgcctcgcctgctatccgaacgcaaatcatcccacccgactataacgtcaccgcgccagctggttatccggattctccagatgataccagcacattccaattccaatcgatctacggacttaaagatgaactaccgcagcatttcgaacatgcacctcctcctgttcaatcatttcatcctcacgggcactcccacactcacggccatcaacagccggaggcaatcacatcgcccatgtcgacgacttcaatgtctcctccatcactactgtttcactcatggatgggcgcagcatctgcaggtgagaaaccaccgtccggtggaaattcgacagactcgcctagagggactgtttcttctgaagaagaagagagagggaggctgtcagacaggcggttcggtagtggcggaagtggtggggtaggcgacagttgggtgaatgtcgcctcaggtgagggcacccagagtacgtacgattacaagcagagccataaccaagaaaaacctgggatgagaggtttaggtctagatataggaagacagagtgaggatagtatgattgagtaatcttagagtgctttttcacttttcaccttacttttttctatcgtaaacatattctttccctttcttgcctcccatccttcctgttcccttgacggagtaaacaaattaaacgctctctaccacatgtctctcctaggctcgattccttgtttgtatataatactttcgtgtttggtctttctttctctttgcgggatccatctcatcctgtatcattctttttctgtgttgttagtttcatttatcagtttctattgttgcctttcgcatccctttgtttgtaaactccatatgtacacgctcgcttcgatgtatttgggcttgttctctgcatgatcccgaattactccgacttgccctttgtttttttcctacctacttgtgtttttctcttctccttctttctcttttcctcgacgttaaatctgtttcttgtcgaatggtgatttgcctctgtattctctgtattatcaattccttttcgatatttattcctctattcctcttcgacgatctttcgaaggccatcttactcacagacacagagcttatcgagtatattctattaatctccaaccatgaaagtatgacggtctcacacccctccgattgacccttgaaaaaacagagaaggaagagggaaaggcatctcatctcgagagagcaaactgtaagaccgaagtgacttgatcccacacatccggtcccttcaccgttcttacttcgggatcacgtgtttgatcttgattcttatggtcaagtgcgttggtgaggaggattgttcgaactttgagagtcaggtgtgggatcgaagggtttgaagggaacgttatttgagggatgatttgcctttttttcggtttatttgattgattagtttggttgtaattccaaagaaaaagatggatgttgaggtaagaagttgaggttaacatacggaacaagggaaagaacaaagacgttcggaaaacaagaaaagaatgaagggagtccttacatctcgcctctagaccactgaagtacagccagaccttttaacccatctacgaacccagttactcctccgtcatccgttcccgatcgcggtcgtggtcttagtgaagccgctttggagagaactgcgtccttcaattcaagttctagtaatgaattcagatgggccaagtctgagataggaagaatgacggttgattcagatggcgaggcaggaggtttttgaaatgtgagtctggatggaggttggaggtataagatgattggtcgtctgatcgatcattggcacagtgacggaagtagggaatattagcgcgataagaaattggggagaaggaaaatgagagaaaagaagagaaagccgaacctgccctcgaatccaactctacatgacgctcctttttccttgcctatcattcgatcagtcatctccccaactcctactccaccccatttgtgtacaccatcttccacgtaattcctaactaccgatttcaccttctcgcttaacgcccaagacattacctcattcaacacgggtcccaacactttcggccgttgttttgtttttaatggatcagaaacaggccgaagtcgagcttttagttgttctgcccggtggacgtgcaggttgaggagtgagcggaggagagcagcgtgaatgtaggtcgcataaggatgtgttgggcctttcggttgtgtgcttgtctgttgagatcaacgcatgtatgaaccatagacaaggagagaccggatcaatagagaggagacataggagagacgagagaaagaacgaacgtaggttaaacacaaagttagaccgggcgcaacgtccagagttacctcgctcaacgtcagatcagaaggtctagttagagcgtttcctctggcttccgtcaaaacctacggaacatctcggaagaagatgcatcagtcaggtgttatgtagggaagatatcagacaaaaaccgggacaaacttcgttgaagagttcttcttcccaagattctttcattcctttacgtagttttcgtaaatagtccttctgtcctcttgtttcatccatattgatgtcaccttcccgatcctgcccgtcatcctctgcctcttcttcccaagccgaacacatcctctcgataatttttccttccgatgttctttcgaggctcacgaccagtcgtttatatgcctgcgcgggaagttctaggactggtcgagaaggcacggacgaagaggttgttgtgggaggaaggtgagcgacatgcctatgtcttgtgagtggaggggctgcaagggtttcagatttgaatctgatgtggattagccatttcttgactcgcctctttgtttgtcaacacaaataagtacgtcaaactgacctagatctccagcgtaccagaccgcccaatctccagctctgctttttcctcctgtccgtccggcctcctctattctgcttgctcctccgccaatcaagccaattccccatccatcttcttttataccaagcgcgacttcccattcagcctttgatatctcacaaactctatccatctcctcttttccttttcgaaacaactcggccgtccttttgatctctgcctgcttctgtccgagtgtttcggctatcgacggtgatgatgccggggcggacagaccagattggagtgcatgctgcgcctgaggcgggggaaggagcgaggtgctgagagaagaagctggtaagggtacatatgctggcagctggttctctggatgaggtggatcaaaagatgtcagcgacggtggaagtaggagtgttagcaggtggtgcatgtgggagagtgattgatatgcttttctaagaaggatgattcgtagttgtacaagagcagaagataagaaggtcgtatcaacatttgaacgggataggacacaattatacgaactgtagttcttgggaaacatctgttttgaacgttcgcatccctttcagatctagttctgttccagcctcctcattatcctgtcctctcggatagccaacgacctctagttcattatcctcttggtcgtagttccctccgagccggtcctcggtgaagccttccaggccgcctttctctgcccagatcctctggattaatcctcctagcttttctgagtctgatttctcgctgtttgcatgttgaaaatcatttttgatcgaaacacaaaggtatgtccatatatacacatatatatattgcatgtctcatcagctcataacgttcatacttgaaacagaaactagagaaggttcaagcacaaacgtatgataaataggtgctccggaaggtccgtaatcataaatgacctgtggtttcaacgtcagtggatccaccggcggagggactggttccaaagacagctgaataggatgggtcaatgaaccgtcctccattgctacgtgaccggtgttgtgagggagggaatgtgagagaaggcaagatgatggtgatcaagacgtatggtattgaggtgataagtcacgtgatcatcagatgtcatgaaacacgtgacttctcgagtaacgtggaaggcgttcttccctccatctcgtctctcaagttcttctcatcatcatcatcatctattatcatcaactagcatggtatgtagtgtctagcttgtgccacacgaggaaatggtgctgacaaggttgatctacgtcgatagtccgctcctcttcatcttgcaccgtcggctcggtcgactccctcagtctctctcgcagacactgccaactctttcggtcttcacgatactcttcgacacggtggaggaagaaacttggctggagagatcaaggaggatccatttaaaagacgtttgaatgaggtttgtgtttctgctggagggcttgaactactctgcttctttgagatggatataaccgtgtcatcaatcgctaacgaccaactcgctaatcttctggcttgtactggcatatattctcggtgtcctccttcctttctggcatgctcaattcgctttcgttcattagtgggaacaaacgcaatttaacctcaagcttcagatgcaacgcaacgcttacggtctcggagctcccttacggtcattgatggaccgaaagattatcagccaggtatgttcaacgttttctctattctgcgtgtactgtttgtcacaggcagcagcgaaacttactaatgactttttggacaacaaaataggacgcggctcttcccgaattctcaacctcacaatttcacttggatatccttcagggaactgatacttctcttgacatccagcatttcttctctagtacgtttcatccgccttgttgcttcgttgcctcttcttcgacgagctgatgcatcgtctcatcacttttctctcttcttactcaatgaaggagcggaatcatcaaactttgaggctcaaaacttccagtcccagatggagagaaagcacaagatctagtcttgtggtttcattttcctttgttattttcttctcttcctaatccatcctggttcttttgccttgctcgacagtgtgaatatgtctatctgcgttaaggccttgtaaatgagtgttatgtgttttcttctgcttctttacatttgttcgtctgtacggatgttctggtacttggtatttatcagatgctgtatcaagagaggaatactcttcatatcggcataggcgcatctatatcttgaacatatatcttgctaagaattctttcctctgtctctcttcccgacgccgtatagaacaagtacagagacgctcaaataaagaaagagagatcaacgagaacaagagggagactgtaagatctgatgtcgaaaacgatgagcgggtctgagtcttacgatgatcagaacactcaaaatcttctcaaaccccacctgcacacacatacaaacatacaccctttggatcttctgatgactccttggttggtgatgcaagagttgacgggttcaagtgtgcgtgttcgtcatgaataatttaggatgacatttggtcggttggtttgatcatgatgttgaacaccatgttaatttcttcgagtagactttctatagatatgaacaaatgaatcaggctgtagttctaaataacaagaaaggagagagaaacttaccggcggtctgaatggtagctttatactcggcgtttgcctggtccatttcgacttgcagtgcttccatcctctgagtctggtttaagaaagatagacgaactgaaccttccgtcgggctgccctcatctgttcaagctcggcgagctaatcgaatcaatcaaagacagagacgtacccgtttgtgatcgggttctttatcgggtaatgcgtgaatgagatactcaatctgtttcgctttcctcgtcaagtcttgcacgagttcctttttgttttctagatcggttcgacatcagagaaagatacgcacatgtccggaaaaacggaataatatgagcaagttgaggtcagaattcatagacactcaatctgacagcgattaaatacgcaagcacggaaatcctgagaaagagcgaaccctcaaacacgtcgtcattcgtctctgcgtccggtatccgaaatgtgacgggtatatccggatggagtggtttgaacgtcgtcttttgagataagtaggccaacgaggccgaggtgatttgaaacagctgaagggagaccaacgcgcgcatataccatagaattccttgctcggaggtcagccttccttggttgatgaatacagagagaaagtgatgaagaagaagaggaccaaactgattcgatcgcgtcttgtagttgggttagtcggtccatgtcactacccagatgttaccgagaagcagagtacgtcaaaacgaagagaacaaactctctgtcggcttggctctaagaaaataggctaggacttatatgaaggaagaaatctcacgtcgagagctcctctacaggacggaaatgaatagaacatgatatccaagcgaaaagaatatcaaagatcagttctgagttgaatcgatagtagaaagaagaggagaaagcaaactcaccttgcagcattatctatcgggaggtccgacaagcgagacggggacggaacggactgatcggttgatattccagcagtgtttccagtcgtttactatctgattcctatgttgatccacaacaaggaaggttagatcagcagacacacgatagaaggatggatcgtctggaaggaatggttgatggttgttgtgtgattgccgcttccgcgtcacgcgctgacgagttccatggggtttcacggcacctcatatcggacacgcatatcatccggacggccgtcatggttaacctccatctttcattcgttttttctgtttgtcttagattttcatcctggtcgatccggaatgtcgtcagaaacacttggtcatcagactgctctcaaacgtggctcagcgtgagttctgtcactgtgttttccattactatcttcgttccggttgacaaatgcattatcttctatcgtcctctttgtaatcaactctggtctgaactctcatacttattcgacatgctcagctgtcagacatgtaggttggtacccatatctcgcttgcttcctcatctacttacccaaacatatatcaaaccagtatcgatcggatcatcatactaacccacacgtatctcgcgtcttctacatgtattgatccgggtatcgaatctgataggaagagaaagatggtgagattgacttgctgatctctccaagatacagtgctgactttattcgaccttgcttctcactggctcttgtatatcctttttttgtgacacgtttgatctgaccgtagaaatggtatatctctgacctctctttacacatctctcctcaacgcctttccagaccaactgattacaattgattctatgttagcacgggagagagaccgatatgcgggacttgttcaagagtaatgggtccctttcttttgtcacatcgtcgcgcgccttgcgaacccttcccatgaagggcgaaaagggcttaacccgttccttctattttcgtgtcacttttaatcgtccagacctcccagaaatgcagctttgacgaagtacctcaacccaagctcagatttcaagccctggagaataagattagtaagtatcgaatattcatagcacttatagtcgtacggcccaggactgcacaatacttgccttcgatcgttgaggcgcaaccgtttatctttgtcttctcttagcccgcctggaaacagctctctttcaatcggagaatatgcagtttaattcgtctgaaccgtttactgatattcaaaggaagaagcatctaggaacatttccttaccctgtgccgaattattccaatccaaacaccttttcgaatatctctcatcctaaccgccaatccaagcacgacaaacagcaggcttcctctcaagcgttcaaggaactgtggggaacaagctttagccctgtagcagaatattcagattctatcaggaactcagatgcgatgtcaaacaacccaatggatccaaccggtcacgacttcctctccacggacgttcttgataggattattctggaaactggcccgacgcggcctatagcagatccatgggccttcgcgttctctccatcggacaataatgatgcagaaggtgtaacaacgggtcctccatcgatggattccgatctctttgccgccctgcagatcgacactgaacaactgttgccagaccctctatcccaggatcgaacggcaactctcagggcatatattctggatcgagaagagcttccaaaagaaatcagagatccactgctccacttctttttttctagaatgttatcttttggagttatgcttcacgtcgagaggttttggaagtgagtatcaccccaagcgctctgtttagtcatcaagcatagcgttccaaggcatgtactgaacgtgtctcaatgttattctggtcgtttgatccatcctataggagcctagaaaatttggccaaggaagatcagccgcatcctgcctttctgttctctatggtgtgtgtcacgtcttacactgatgtcatcttcggtagtttacaagccctctcagttcttgtcttttgggtttgacctttcatcatgattcgtttaccggctttctccatcaacgacggcagtatcattgcgctagtcagttctcttctgacgaagccgtccgggcattagcggatgagttcttccggatttccaaggcaaaactcgatgagggagttgcgaaatgggatacacgaattcttgatatgatcagagctgctaccgtcttgaccctctcgtcctgtgagttcctcagttgatgcaaacatacacgtgatgaaaaaaggctccttctgattcgttaaggttcggattgcttttcttcatgtgctttgcgtattctagatttgagagcaaatttcctgactggctgggttctcggaggggtgggactcttctctttgcgtcaagtattttcctctcttgttgtcgctcggttgacactttgcgtttctgctcaaatgacctcaggtggcaatgcgactctgcgcactagctcattaccaaagaatcagttttcccttcagttctcattcacatgaccatcccaaagtgaatatctgtaatccggacaggagaacgtgggtacacacaaatctgcgcatcccgtctccgaaagattcggtagaacttggggaatgcatctggtcgttttggattgcctgggtaggtccggattttttcaagacgggacgttttgccttggccctgcctcctatagctgatactatcttcatacgattctttcgaacattttatgtttcattcagggtatggaccaacgtacatcgatagccactgcatatgctcctgtcagttactatcaataccttgtgaagataagcaaatgtctgtcgtatgttgacaatagtatgcgttcttacaggcaatgcactggtcagaaattgagacgcctttcccgttacctctggaacaatatgcagatgtaggttgaccacgtgtctacaacgatatagtcgttgtgtttgaaacaaagttgacattcgtgcctgcgcttattgaagatcgaccgagtgaacaatcagcccatgacggcggtgtatagtctatttgacgattcccagcagactctcgttggggacttgttcgtcactttcttatactcctatcaccctcatcatattggtaccatccactcaaaactcgattatctcttgacccgattagaaacacggcttgtttctttatctctctattatttttgatcgaggcatctcgactatcggactggttcatccaaccatcgtcccgtaacgaatacctctctcacatgtgctctttgcacagttcccataagacccctacctcgacggaaaactctcctcaggaacccgttgatcagcgaatcaatcctgattcgacaggacccataccgccagagatcattcagctacagaatgcggtcacgaggtttgtcaagtcgcttccgcttgaacgaatgaatcctgcccagaaggtgtacgtgtatctttttttttgtgcatcactgcatcagggtatcgtctaatacagtatttgacgtaacgcggacgagacagtcgtggaggagttccatctttgaaatcggaactcgcgctgcgggatcactcaagttcaggaagtccatcagcgtcgtccgaagacgattggggcatcagcgtggagaatgtactgctacacaccgagattcttacgtaagtggattgtctttgaacaactcttccttctctccagcagtgttctatgcctgaaaagtctggatcttgacttgtttttttcttctttcaacttgtcgttcttggtaacttggcacgtttctcaacacagcacgcatgctttgatcttgcagcaacgagcggattatgacccaagcgcaagggcgcaatcggtgttatctgctcgatctgtagtcaacatcatccatataattgttgacgttgatttcagtcgattcggtttctacattctggttcgtgtttattgaattatctctctctggtgtgaaattggcgttcagaattaagagtcattttctttctatgggatttctaaacacactgatcaatgtagaattgctggagggttgtggctcacatcttattagacgaggtcaaacgttgcagatcaattggaaacagcgaaggttaattttcctttcctctctctccccttcctttgttttgtttctccgtcgccatgacatgttgattctgattaccttttatccactttattgccaattctgaactgaacggttacagaggctatgagcttgacaatcgatgtcgaacgttcgtgaaaactgtctccttttcaagatgatctccacattcaaaaagacagtggaaacatataccgacgatatctctccctttttttgttacagtgataataatagctatgaagcggatcggagaagtctacaggcttgggtaagtcagaaatcccatacattcgtttaactgtcgacaatgctacaaacagagttggatgactgatcgaccgagttggtccgagaggacttacagtaatattgctgcctcagtccttaatagttaatatgtgttctaggagaattgtaggatctgctgtttgacgcgatcaatagtagttagcatatcatacgttttggcggggagggtacatacatgcacaccttctgtaggttcgttttgggaccgtatttatgcgctctttcactgtgtctatgcttaaatcctgcttcgacacttgaggatgaataatgatagagaagcgtgtctcaattatgttgacaacgacggtgatgattatgatggtgataacgacgccaataccagggaaggctcgtacccggcacagagcgacgagaatcgtttggcggaacagagacaacgcctgtcggaagaacgaacgatccctttttatcctaacatcggtactttcgaaagatatctctgagctttgctggtcgtttagctacgtctgttatcgaatgcgaactggacagtgtttttgtttgaccgataaagaagctcttggaatctatccaattttatgttccttcggttcaaccacccttcatgcgactagctctctcttctcttttttaattatataattctctttgatggacccatctgtttttgcttcgttcttgatcaacggagataacaagtagtgagatatgactgctgacgatgtaatcgaaggcctattgttttttctgacaactaacccgaaagaaatgtctcctctttgatccggccatgtatcttttttctgtatttcagcggaacacaggtttcactgaggaccaactttccttgaaacttttcttggcagcatgtatcctctttaatatttcttgggaatcgtcgagtccaatgtcaaacggagcttcaatctcccaaaccacgttgtttatttccccggagtcgcccgtcgctcttcggcctgcgagggaccggcgtttttgaatagccgtggtagatcctggagaacgaacgatcactcctgattctggccaagacgactccttgcccgtttatgttcttcacgaccggaacatcccactcgaacaagcatcatgttcgtcatctgcgtcatttttgtccttcttcattctcttactcttcgtcttccggtcgttgatcattttttcttctcgttactcatgctcgtcactcaacctttccttctatcttctttctccattctagaccgattatccctctttcctgcctctgaatgatgtttctcagcacaaacccttatcggacggtctccgaggctgaatccccgctatccaatcggccggccatcctatcctctcaccaatatcctaaagccaaacgggctcaaggcagaaggcacaagtcgagtatcgatgataacctggacgacccatatggtaaagccaaccgatctgagaacgtgccgaccaacctatcatcctacgtgacttcccgtcggaaaataattcccagaagaagagtcttccttctctttgtgctttctgtcattttctttgtgttctggccagtcatgcatcgatcaacgccggatatagtcgcctcggttgatcgcctcagacaaccgttgttccattcttcggtcagactttccatactcgattcttcttttggttctagtcggaaagaagataaggttgcttttacccctgtcaaggacgatattgtcagcacgcattcgatcactcactccgtcagcccagacggactcctccatctcgatccttcattaccggtttcccaacatccaatctatcagcttatggattctgccaggaaggaatggaacgacaagcttgcgcagcagtcaactacacttgcagaagctgttgcggagtacaaacgaagatattatattgaccctccgaaggggttcgagcagtggtggaaatggtgccggtaaagccttttattttttcaatagtgaaattcactacgtttccttagtttgttcgtaagactgattgccgtacattctcctttgttctgttctgttctgttctgttctgttctgtcgggtatagtgaacataatgttcaacttctggatgaatacgaccaaattcaccgagacctcgcccccttccgagcccttcgtccgtcagtgatccaggaacgtctggcccggatccaaagccttccagacatgttcactatctctgtcaggaacggtcaagtcaattcttcccatgtgacgtacgatgcacgagcgatcgctggttcggacgatagacgactcggtcagatcgagcttattgagcgtgttgctcaattcattccagactttactgcggtatattcgattcatgattctccaacaaggttcatcagtcattcccacaagcaggatctgttagatcatgctgatgacaacgaatgtgagtgtttttcttcgagtgattcttcttctgtcaaattgcctgatcttctcattcttctcattcttcctttcatccgcgcggcgcagttttcgatatcagaaacgaggtcgttagttcccaagctggttggatggccgcttgtccagaaaacacgtctctgggcaagtacggtatcaactctaaagtcaccaccgtcgccgctgtcgacgccgacaagacgttcatctcttctcattcggcatcgatggatctctgtaatcatcctgatgtgctttctctgcacggaacgtttgtttccctccgaccaggcactcaatcggaacttatgccttacttttcgctgtcaaaaacgaatcttcattcggacatactaggtgtgcccaccgaacgatggtcagatattgggccgaacgacaaagtcaagagatgggaagagaaaacagataagaggttgttttggagaggaaagaacacgggtgggatattcaacaagcagatcgattggaggaagaaccatagatcgaggttggtcggtttgatgggtccagtaggcaagaagaacaggggtgttaagagcagcatgatcgacatgttgtcttcgccgaggacattggcatttgcagaagctgatgacgacaagatgatactggggagaatgattgagaaaaagcggcaggctgatctaaataagcttatgatggacgtcgcctttgtgtccgaacctgttcgtacgtgcttacagaactcttatggattcgctcgtccactacgaaatacgattcatagctgctcaatacataattttactaacgatcttctcttgcctcaatacagaatgtgatgagaaggacgggacatgcgcagatatcaaggatgaactggcattcaaggattttttaaatgtcgaagaacaatcatcatacaagtaccaactcgacgtcgatggaaacgcttggtccgctagatttaagcgattgatgaccagtggatctttggttctcaagtccacagtccatccggaattctggactgatcgaattcaaccatggcttcattgtacgttactcttttcttctttcagcatgggacatttcgcgacctggtgaggaggaggactccttctgcgttgagtatactgatttatatatttccttctctgttttccttacaaagacgttcctgtcaaggtagactactctgatgtctatgagatccttaattttgtgagtttcctgacttattacttgttcatacaatcgagataatatactgactggtggttctcctggatatgaagttccgaggagatgattcggaaggcctctcaggtgaggatgacctagcggcgttgatcgctgagagcggacgagaatggtccctcagtttttggaggaaggaagatatggtacgggtccttaattgtccctccttttgtgacctttccctgtatttcacgcatgcacatagaagacctctgacggtgttgtatttttgacacttgcgggcggaatcattcatagacagcatatgtgttcagattgtacctcgaatgggcaaggattcaagcgcctgataggttcagagcagatttcttgctgaaggacgcccaggaagatccgttgagagtggtctcacctctagatggcttttcacgtcggtcggattgaacgagggttggtcatcaaagttgtattggaagatcatatagaatcagttcggccgtcctttcttttctcttcttttctttcatctttgcttctcttttgatttgctgtaatttcgctatatcgctgtttgttttatcgttatatacccttttcccctcttgcatcccttgttctgtttctatctttttttgcttctctatcactctgcttctcatttctagagccctgttgtcatcgccgtcaccaagtgtacactccgcgcatatctaatcggacccagtccagtcttaccccgtgcatccaatttaaaatatgtgaaaggtataccatgagtagctcgatcaatccgatggaagaacttgttttggccataagattctcgtctttcccgatttttgatggacatgttttccataagaacaaagagacatagacgggtgtttcatccagccggaagtgtcgtcaagcgaaagcagaagagaagaaagaaaaaatcagagcattaaatctttaagtagaagaacgacgttccaaaacagagtgaagtaaatcacagctgacgagtgtacacaaaaataaaaataaaaaaacaagaaggtagagattgaaaagaaaagatcagggcttggtgttgactctggaaaagtaaatgcaccaacgagcttttttcccaagccgagaacatgcttctagggtttgagtgttgaaagaaaggatgataggaaaaatgcaaggaatataatcactgaggagagaaaagatggtcaagacacaagatcgaaagaagaaaaaagtgaaaatcgaggtggagacggaacggttgtcttagaacgactgaatagaaacaatcaggaacttatgacccccactcgggctgttcgtcacctcgccaacccgacagataatctcgtgctctccgacttctgcattctctttgatagtagctagatcaccaacactgatcttttgagaccagtacccatctaacgtgacggctgattcaggcccataggcttcgaggtagcatgtggcggtaccaagattatatgtcgatgaacgaaggtggttgatctggatcgttctgttttgatgatggaaagaaaaaggaaagcagatgctcgatcagcgcgtaaatttcgaaaacgacacgatcgcacaaataagagacttacgctgcggcaagaagattgatcttgaatctgacttcgtctccaggattgtttccggccaggaaggtctttctgttaataaccacggtcgaccatgctgttggggaagaaggagtgataggtctgaacttggacgtggtcgagttgcatgtcggagcgtagatcgggacgatatgcttagggtcgtacggttccatcaatcgaagctacgttccgcaaaagaatcacatttcacgttagacttttcgtcaagagcgaaagcaagggaagagggggaagaacgaaccctgggaatatctgcgggtggctggaccaaaggtgtttcaggctcgatgccatgaagaaaccggtcgtgctgtaccttacagaacaccgagctaaggaactggattgtgatgtctagttttattcattagatggaacagaaacagtcagtttatgaaaaggaggagaaagaaggagaacgggacataccagccatcaccatatgtccaccgtagccgtagtggcggagatcgacagtgccatctccaaatggtccaaaatagtctccaacggactccgggtcatccaggattttaggcaggatgatctgacgggacctgaatagtttaaagtaaaacagagagacacgctgagctcgactgttttttgtctcgttaggaatagggaagaaagatggagagaacgcacgacaagactgggtggtcatagtaagcggcgacgtcgatgtggagcgaaccaccctggtcaagatcaagccaacgaatcgataagcaatccgtcgagccaaacgcagcggaggcttgtaaaggtgaggaacaaaacgcacggtagcaatcttatcaaacattaagccgaaggtctggaggaaaatgatggccggttgttgaggcaggatcatgagtcctcgcatcaaggattccattcctttcgcatccttctccatactttggggatcaggagaacgtagaagaggaagccagggatggagattcaaccgacgtcagggtcaatctctttccgggaagaactacaaagacgaagaagagaacgaactactgatcgttgatggcactctcaacaaagatgatgtctacatcgtgcgggatataagctccgaagcagaccgagaaaaatgcacttccctgggctgatttgaaaggggtgaaatggtatatgtgtgtttgagtacgtgcgccaatcaagagacgtcggatggcatcaaccagcggtagtgacagaagaagaggaagaagaaaggaacgaaccagcgacggaaccgtcgataaaggtcagattcgaatcagggaaagcgtactcccaccattcagccaactgatctgtttacagccattcaccagccgaaaggaaaaggaagagaggatgggaaaacacgctctcgtttgatcagaatacgcgtgtgcgcaaaagaagaatacgagacggagaagaggttcaaaagaaattcgacatacacttgtagtttctgtgatgtttttcgttcaaagtctgaccacacgtcacagacctagagtacgtcgaaagaaaagacgttcgaatcagatacgaaatggaggaaaagagggatgaacaaaagtaaagagcgcaccctccgagaatacccatggtaataggctcgcctcgcgcggcctttcgcataacccgtcggagtcttttggtctgaccagtgtagatacgggaacgagctatagcgtcttctctgtttgacagaatggcccgagcggagaagagtgacgggaagccaataacaggcccgaaacccgacgtgaaatacaaacagatcagagagagtgaaggcgaaaggaaagaaagaatagggatggtcctcacccgtaagctgcacagaatctgtcgttgattccacattcttcccacccgaagcttccgatcatgcattctccgttggatgcgatctcccctgtttttccagtctctggcacgagaatctggtcaacccagggagggatcgaggggatagttgtcagtgcttgctgtttcttccgggacaacgtcggtattcggcgactaggaagagagagagaatgtgccttgggaaaagaggcaaatgaggaaacaatcgattttacgactggagaagcgtctgctggatgagtatagataggatctgcagagaaccgaaggagtgtgtggacgagaacgacggagaggatggcccagggaacgtagaccatcaactgtgacctgctggcatatcgagtgttcatgacgagcacgatgatcagaagtgagcgcgcaagcgagaaagaacgttaaaggcaagtgcgaagtgagtacaagatggatgtgagagcaaaagagagaacgaaggatcctctggcgacgagatagagcagaggtgagaaccgataaacaacaggcccgaccagaggatggctaacctcggatggagctcgggagagacgcagaccgaccagtacaacttcgcatgaatgatcggcatatattgagtgagctctagacttaaagccagacgattgatcggcgttctgactggtttctttcaacgagccttattcggagaaagagatctatagtccaggttgagcgccagcttgcgtaagggattctctccttttttctcatagttttcttatcacagaagtacgtacgatcagctctacgccgcctcttgttgttctttcgctctgactactcctccttggattccaacattcggcccggtccggtgtttcaaatgtattcattttatgtccttgtggattcgtaagatattgacggtatgtttggacgttcataggtttgaatacagtctggatgtgaacatacacggtagttattggttcttaatgcgtagttttttctttttgtttaaatggttattctactttttttttctctctctcctcacgcttcaaccatgaaacaacgcctcatttgaagccgcccgtttctatggatccattcagtcccgctggccctcgcttcaattttgcctcgaattccttgaatgctctcagtccaggatctaagccggcgaacgggtctggtttgcccccgctttgggaagtctcttcatccaactctattacccttacgggccaagctgttctcggcacggtggcccgcaagagtgccacacgcaccgcttccagtgctgaagtgtattcctcgtgggacgatgcataaatgtcgtgtatgcataccctgccaaggcagtcgtgtggaaggaagagaaacggggtaaaacaaggttagcttcgttttagagttaaacattctgatcagctcacaaaagtacgcataaggaatatacaagaaatgatcctcacgcgcagccagacatgcagcattctagagtaacccagttagtttatattatataagttttatgtattaacgttcgatgccgatgccgatgccgatgccccaggcgacagaatccgacagatcgttcgacccaatcaagtgagattttgttcagactcgaatgtaaaagtatatgtaacaccacaggaaattatgataacaagatggaacaaaaatcgaaataaaaagaaagcaagaaacaaaccttcgtcgcctggcttgatgggtcgcttaggtactttcaatcctaatatctcgaacggtccatccccttctatgtttatttcctctccttctgtcgtcgtctcgttcacaggtagcaaagtcggtattcgagcttggatctcgattggatctgctggtagagatgtatgtagtggtgtgggcggtgttgtggatggtggtaatattgatgatgatgatgacgacgatgacgatgttgatgatgtactcggaaacgctatatttgggagggatccactcaacggcgatgtactcaatgatgatatgcttgatggcaatgcactcgatgttaatcctgacacagagctcgtccgtatgggcgaagttgtcgtcgataccgacggcatcaccttttggcgttcatcgtgtgatgcactctcgtccctgctttcactctgattcagaggctgactctgtctaggcagaggaggaaggaacctcttgagcaagttccgctgatgatccgctgagtatgagaacccacgaatgacgaacggacaactaggtttaacggaggctatcgatgtgcgaaccggtttcggagggaaaacaaatggacagagatagaatgttcggtgaaccatttcttgcagtctctttccgatctttttctgacggctactactgatgctactgatagtaccgtctcttctttttctgtcttggtcagcggcaagagagagaaatagaaagcgatatggagtaatggcgagatactgtagaaaggaagaagaagaaacagaatggaacgaaattggaaaaccctcctggcagttatcaccaccgtcacttttaccactacctattggattattgccttaatctccgtggcatcatatattgtatctcttttctcggctatcatctctatagcttccctccgcattcctctcctcacatttgcgtacaattacttccagcctttctatgatgtctatgaagtccatgatgtaaactacaaattcacgagctgctagggttagttctgttgataacagacacatcaccatctgaatatgataataaagttgacgatttgattacctttggggagcttgattcttatcaaacggacgacatcaatccactcccctcgctccccaccccccaaaagagagaacgaacgaacatagatgcatatcacgtttgacgaattccatctgatcttgatcaatacagtcgtccgtccggtttaagcttgtatatacatctgtctcttcctttcatcccaacggcccactctctgtcgcgtgcgggcgcgcgcgcagggaagcgaaaccagcaactcgggcgtcagggacactaccccaacctgtccttgctgcgcattgagcctggtaacaatctcgggcaagcctgtaccaagcctgacatttaatcacacccctttggttggggtttcccttctctctttttttttttcctctcgttcgtccggaaagcaagaagaaagaaaaaggtccatctcgttcgattccatctttcgttcttgccccatctgaacatcaaccaccatctccctcccactcacccaccgataaatccaagctctctctttctcttttgggttttcttttctctttttttatttgtctgtcccgcttaatcgtctcctagatctttccatcatgtcttccaaaggttagtcgttatgctcttgtttgtgagagtgtttcacacccggatcatctctttatggtgctttgtggcgatggaacaaagtgcaagcgagagagatacctttttctttattctcatctcacctttgggttctctcttcctctgtctcaactctcaactgattggatcatctcatcctttttacagctatccgagagtacgacgccaagctacttctttctcactggcttcctctcatcaagactcccatctcgacctcgggtccttcaaccgcttctaacgttcgggtcgctcaggttcagtggtaggtctcctccattcaatctgcagagcggcttctgacccagcgcaaccatctaaagccttgttcactaacccttcttcttgctcctttctcagggacccctcgaccaacacccttgttcctccgattgagcccggaaagggtcttcctgattgggttttcaccgagaagctcgtggccaagcccgatcagctcatcaagcgacgaggaaaggcaggcctgctttgccttaacaaggactggcaggtcgcagccgagtggatcaaggagcgagcaggaaagcccgttcaggtgagtttatgaactctttttctaaggtaaacaaaaagctgtctgaacgattttatcttctcctttttcggccgaaaacgcaaaattaaacctatgaaatcaggtcgagaagactaccggtaccctcaacaccttcatcatcgagcctttccttcctcatccttccaacaccgagtactacgtctgcattaactctactcgagccggtgatgagatcctcttcacccatgagggtggtgtcgatgtcggagatgtcgatgccaaggccttgaagcttcgtgagttacttcctcttcctttctagattatagagccctatgctgagacctggtttctcgtttctcatcttcgtacctctttaagtgatctccgttggggaggacttccctaccagggagaccgttgtctcttcccttttgacccacgttccggccgagaagaaggacgttctcgctgacttcctcatccgactttacgccgtctacgaagacctccactgtacgtctcctctcttcgttttcagtctgttcagtgaaatacatgtcaatccatctgtctaaacttatcccatcctacttttcccccactcctttagacgcctatctcgagatcaacccgctcatctgccttgacggtgtgaacggaaacccccctacgatcgagtacctcgacatggccgctaagcttgatcagaccgccgacttcctctgtggtcccaagtgggccatcgctagagatacctcgtcgtcttccgccgtcagttcggccgccgtcaaggctgaccgaggacccccgatggtttggcccgctcccttcggtcgagatctcaccaaggaggaggcctacatccagaagttggacgcctcgaccggtgcttcgttgaagcttaccgttcttaaccaggagggtcgagtctggaccatggtcgccggaggaggtgcctccgtcgtctactctgatgccattgccgctgccggtttcgcccacgagcttgctaactacggagagtactctggagctcctactgagggacaaacctacgagtacgccaagaccatccgtaagtaattgtccttccttgcatgtacgctcgaccacctgactgaccatcttgatcacacagtctcgctcatcactcgaggagacgtcaatcctcagggtaaggtcctcatcatcggtggaggtattgccaacttcaccaacgtcgccgccaccttcaagggtatcatccgagccctcaaagagttcaagcagggtcttagccagcacaaggtcaagatcttcgtccgacgaggaggtcctaactaccaggagggtctcaaggccatgcgattgcttggagagtccctcggtgtcgaaatccaggtcttcggacccgagacccacatcaccgagatcgttcccctcgccctcggtgtcgccaagaaggctcctacccctctgcctgcgttctccgtgcccgcctcgatcggagccgatacccctgccgccaccatcgctgagcagccagctgccccccagctcggtgagatcaacaaggacggttcgcgagagcaggccaacgacaacattgtccgattcgataccaccggtggacctgtctccggtcgaccgtcctaccgacccttcgacgagaccacccgatccctcgtgttcggtctccagccccgagccattcagggcatgctcgactttgacttcgcctgtggccgaaagaccccgtccgtcgcggccatgatctaccccttcggtggacaccacatccagaagttctactggggtacaaaggagaccctcctcccggtctacacctcggttggcgaggctgtcaagaagcacgccgacgccgacgtcctcgtcaacttctcgtcctctcgatccgtctactcttccactctcgatgctttcaactacccgcagatcaaggccatcgccctcatcgccgagggagttcctgagcgacacgcccgagagctcctccacctcgctgagaagaagaaggtgctcatcatcggtccggcgaccgtcggtggtatcaagcccggatgcttccgaatcggaaactctggaggaatgatggacaacatcctttcttccaagctctaccgagccggttccgttggatacgtctccaagtccggaggaatgtccaacgagcttaacaacatcctcaacatctttaccaacggaacttacgagggaatcgccattggtggtgaccgataccccggtacgtctttcatcgaccacttgctccgatacgagcaagatcccgagtgcaagatgctcgtcctcctcggagaggttggtggaatcgaagagtaccgagtgatcgaggccgtcaagaatggaacgatcaagaagcccatcgttgcctgggccatcggaacgtgcgccaagatgttcaccactgaggtccaattcggtcacgccggttccatggcaaactctgacctcgagaccgctgacgccaagaacaaggccatgaaggccgccggattcatcgtccccgataccttcgaggagctccccgacgtcctcaagcagacctacgatgccctcgtcaacaacggaaccatcgttgtcaagaaggagaccgagcccccgctcatccccatggattacaagtgggcccaggagctcggcatgatccgaaagcctgccgctttcatctcgtcgatctctgacgagcgaggacaggagctcttgtacgccggtatgcgaatttcggatgtcttcaaggaggagatcggaatcggtggtgtgctctccctcctctggttcaagcgacgacttccggactatgcctgcaagttcatcgagatggtcctccagcttactgccgatcacgggccggccgtgtccggagcgatgaataccatcatcaccgcccgagccggcaaggaccttgtctcctcgctcgccgccggtttgctcaccatcggtgaccgatttggtggagcgctcgacggagccgccgctaacttcaccagcgccttgaactctggacagacccctcgagagtttgtcgactcgatgcgaaaggccaacaagctcatccccggtatcggacacaaggtcaagtccaagacgaaccctgatctccgagtggagcttgtcaaggactttgtcaagtcgaccttccccgccactgccacccttgactacgctatcggtgttgaggccgttacctccgccaaaaaggattctctcatcttgaatgtcgacggagccattgccgccgcgttctgtgatcttctcaactgctccggtgcattcacccaggaggaggccgccgagtaccttaaggtcggaaccctcaacggattgttcgttcttggtcgatccatcggtttcatcggtcacttcatcgaccagaagatgctcaagcagcccttgtaccgacacccgtccgacgatttctacatctcgttcgccgatcacagccgagtcgtcgtccagcccaagaagtaaattgtgtccatcgactcttcgtctgtcacgtgaacactcttctccttttctttctctttcctttgccctttctctttcttctccttttctttctttcgcatggatgatagcccatgaaacccgtacatgtataaccgtctagatctctcctcaatctctctgttcttccggcttttccttgtctctcttgggtcttttatctgcttttatattttgtagggtccgaccgtttgttgtctaggctcgtctatcctttctttttgatatgcagatcgaatggtatctcttttcctgtttgcgatgtttgtgaaaatccaagaaagtagttgggtggggataacggccgtggtgaccaggctggatagtatccctaagatgtgactccagatttgcccaggcgttggggatcatttacttgacacacaacagacaaaacaaattccagactctttgttcgccatcacacacagtctctgtacccatatctctctctctctcgcttactacttacccacatacacacacagtgagctatggcttcatacgaatccctcaggaatctttatcagaaggctggccaggaccatgtctttactttctacgatacactctccccgtccgaccaaacggccctgttggctcaactggaagaactggacgtagagcgagttaaccggatccacgcacaggcactccaggccgagtccaaagccaccattgatcctgtcagcttgaccggttctgcctctgactcgacctctgatgatttcgagccgcttccagaggcgaacgtagcgtctgttttggcttcgcccgctcggacagccggttggagagagagagggctgaaggcgatcgaacgttcagaagtcgccgtgttgttgatggcaggcggacagggcacgagactaggctcgaccgcaccgaaaggttgtttcgatatcggacttccggcgggcaaatcgttgttccaactccaggcggagaggatcagaaggttggaaagtctggccggtgggcaagcggtcatcacttggttcgtcatgactagtgcggccaccaggccagacacggaggcttacttcaagaagaatgcgttctttgggctgaaagagaagaacgtcatcttcttccagcaaggtgcgacgttttgtggtcataacggtctctgtttcactcgagatcatctctcgaagattggctcatcggtttctcttgtgccctgttttgcgtgtgtatgtgtctacgaacccattgacaggttaccttccttgcttgaccgaggacgggaagatccttctttcctctccttctcaagtagcccttgctccagacggcaacggcggtctctactctgctctcctccgaccggtctcgccgacagatgaccgaacagtcatgtcgatcatcaaggaccgaaagatcaagtacattcacggctacggagtcgacaactgtctcgtccgagtggccgacccgacgttcatcggttttggaattgaccaacaagtcgaatgtggggcgaaagtcgtgcccaagacggagccaaccgagtcggtcggtgtggtcgcccgaaagggtggtcggttcggcgtggtcgaatataccgagcttccacaagcaaagtctgagcagcgagatccggacggaaagctttcctaccgagcggccaacatcgtcaaccacttttacaccactgagtttctcgaccggatccattcgatcgaacacctcatggcgttccatatcgctcgaaagaaaatcccaacggtcgaccttcagagcggcaagcagatcgcgccttcttcgccaaacgggatgaagctcgagttgttcgtgtttgatgtcttcccgttcacgaaggagctcgccgtgctcgaggttgaacgaaccgaggagtttagccctttgaagaatggaccgggaacgtcatcggataacgcggtcaccagcaggcgggatctgttggctcagcagaaacgatgggtcgaggctgtcggtggggtcgtcaacgcagaggtcgaaatcagtcctttgatcagttatgccggtgagggtctggacgctctcagcggagtgatctttaacaaaggaggcgtgatcgaaagcctggatacgaatcgtctgaagcagttcgcttgagctaaaaattcagtaaaggattatttgaagcttaggtacgtttctttcaatctctgcagcgcgcgattggtgataggtcttgttgctcatttttttctttcgtctttccttaatcttgttcctctatgttagacaataaactcgaagaaaaaacctctatccttgtccttttctcatcgtcttcttctctttcttcctgtctctcccctcatcttagagattgatatatacatgacggttgatacccttttctcacacatcaacgatacggaaggtgactcaccaaaatgttagggttattggacgctcgctcgcgccatcatccgtcatcatgtacattagaattaattgtttcgttcgtccactcacctacccccaatcatcaacgagacatctcatcatgaaggcctactactacgacaatattgagtacgcttctagttcatacgtcgatattagcagaaattggtctacgagcccttgatccttaaagcgttttgatgagtaaagagcctcacatactgaccgttctgctttttttttcttcttgacctttgttctctctgtctttatcgtccaattcatgataggggtgaccagcgagctcctcatgactcaggagaagaagttactcctgacgagcttcaaaggctcggtctcttccatgagtttatccctcttgtcggcagagaagagaaggactggacggctgatatcggtttgtctcctgctgcaggtcgaacttaagcatgactcctgagcatggatgaagagcgcttacacttcttgatcttacctttctttggtcatgtgaattacttgcacacgtgtgaatggccatcagatcgagttgcgaaggagagggattacaagaacagggacgtcatcaacgtctccaaagctggactcggagagctgtacgagtcaaagatcaaggttcgtcatccccgatattcatacatataaggtcgggtggttcgactaaactcttcctcatatatccttctgctgggtgctacatctagtcgttcttccaagaacatcttcatgaggatgaagagattcgattcatcctagacggctccggtccgtatctcttaagtcttcactatccagtgttctttctttcctttcaatgtcgctgaccgagtcttaaactctttcttgtcgacggatgatgggatcgatgaatcaggctacttcgacgtgaagacagcaccgccacaggagcggtggattcgagttgcgatggagcaaggtgacctgttggtcttacctccgggggtgagcgccgttttctcgctcttgatgagctctggttttctttttgccctgtcaaggaataagcgaggaaggaggaaggaagaaagactgaccatccgattcggtctatacatgactctctatctgtctttttcaatatcaagatctaccaccgtgcgtactaaagctttcgactcttccttttcttctcctctttcatgccgaaggaatgattgactaaacttacattgatgctcggtcttttatacggcttaggattcactttggacttgaacgattcgcaagttcactctccctcctcttctttcttttctcttgctggattttcttcctaacaaagggagtggggttctcttttgctgtcaaaaaataccaaccatcgtcaacagaattaaagcaatgcgtctattcaaagatgagcctaaatggtttgtctcttttcttccttgcgaaccttcgttctcgcgttctcagactctccctcttagtagaccgaagtctgttctaaattgttccacacacttcatcttttgttcaggacaccgtacaaccgaagtgaagaagttgacgagaacccatacagaaaatcgtacttgggttcgataagcgcttgaatgaatcgaggagaagattttgtcaaccagtcgggcgtcgtgttgggagagtctctttgttctctttctttttcttgtagttgaccgctctcttctccatgtagcccttgcagcagctcattcacaagagaacgaagaaaagaaagagaaaaaaaagtaaagaggacaagaaagggttcaaagtccaacggatatgagttaagactatgataaacaagaggagaaagaaagaacggaggaaagaaagatcatattaattcagcccgaccatctttaacccattgttcgaccatcgaccatcgaacgagatgagtcgttcctttggcaaaatcagcctcttctccacttttgttttccctcacatcattccatcaagatcgtcaagtgttcaaagcgaaacaggtttgtcagatccaaagcttttcgaaagagagcgaaatagaattctgcatggaagtcaaagagtagagaagagtgaaagaagcgaataacgattgacgcacgagggaagtcgttgaggaccgatatctcgtctgcagtagatgaatacagcggtcgtcggatttggtttggcaactataacgacaaacaagtcagggtcagatcacactggcctactgacagcatcaatcagcgagcagaaaagtattataaagcgatcaaagacagacccatgctcagaccgtccgattggacctcttctaaatctcccatccggtccggtagtgaatccaggacggagagcttgaaatgtgatgcaacaagggcgtagaatcttttgttcgttcatcgatggatataccgggttttaagaaagagactttagctgtttataaccactagcattgtgccggagagagcgaggaagaggagacgggaggacatactttcgagcatgtttaagttcgagtggggataagagaggctggaccgtcggtgtaatagtaatcatctgagcatatttctcaatctagaagaggaacgttcaaaaagttttgaggcctggttagatcgttcgtttggaaaaaaggcaagaaacaaactcaagagagaaggagaggaaggaggagaagaaccttcgatagtcgtgtacgtagatacgatcggagaaggaattttgctctttccatctcggtctggaccagcatcaacttgaagtgttcctcctcgcttgtcgagtcctctgaaagaagtgttgagaccatttctttctaagtgttttcacccatcgtcatccagcattcgtttcagacgtgccgatcctttttgtttagcaaagattctatcgtctttgagcataaatggcggtggaaacgtggagacggacctgctgctctaccctccacatcaacccgtccaccaagtcgtcctcccattttaagatcccaggagcgcatctttctgccacccaagccttcatcaaccgtttcatgtctgatccttcgcccatttctcgttcatcattatcatcctcttcgtcgttgaatccgttattcatgttgataggtatatcctgctttttgtcgtcatagtccatgtaatcatctaggtcgattcccgaagtaggcaagggcggaggcgaaggagacaagtcgtatcttgactgaacagccgaccaaggtgcagatgctcgggtagctgtattgctttggtcagagaacgagtaattaaagctcattgggagagagtgtatacgatgtacgagatgatgggcggatgtatggaaacgaactcatttgacttctgacgcgtcgcgtttgacgcgacgacgcgtttagatgaatcatgtaaccttaaatatttgaatggtgtgggacttagctacttctcgactaaccgggcgacttgcctagactaccttcatctttcatctcttcttccagcactctcgacctcaacacccacagatcctcaccattatggcagcgagaatagaagaatacgactcttctgaggagttgtgagttttgttctgttgtgtgtgcctcgtaattgttcatacatgctaacctcctctgctttcgctgttgcccgggaaaaataaaaatgaaaaaccttggctggaactctcctcattagcaacgacgacaccgaccttcccctcccatcatcctctcttcctaatctaggtgacaaaggatcgattctcgaagaaatcactccatcaggttcatcaccgtcatcttctgttcctgcgtctgcgcctgagcatgatggagcggcagagaaccctatggccaactttcaagcaatgatgcaggctcttgctggtcaggatcagagcatccttcaaaggcaaacggaagcaccgggtgttcagtatgtggatgacaccgctccttttaaagagtaagtgtcttttcttttctgcgttctactcgcagctctgatcacaattctttttctctttttctctctttacacttacatcgattgtcctttctagatggcatccaatttacccgatttacttggatgctaagcgggcgtatggtaataaagggggtcgacgagttcctagagatctagctgtttggtggccagtatccaaagacattgctgccgcattgaaggctctacatcttcctgtctttcacgaggtttgtccgaataaggatttcttctaactgcagcttgatagattcgttttctaacctgataaactaaaatcgtgtaatgcgtttattcaattatctgattgttcaatcgatcggatacaaacagcaattgaaaacccatccaaaagattgggctaatcctggtcgtgtaaagaccgaatactttaaggatggccgatatcttcacccccgcatcaagacccgttcgttccatatatttaaacttttaccgtcctttatttggtataccttctaacgtttcttccactcttgcaggtcagcaactctatgttgaagtagcccgacagatggctagattgccttcttctgttcctcaaccgaaacctacaatcactcctgctcctgcttccacttccactcctgctccgaccaatgcatcaacctcaacacccaagaaaacccaaaaggtctctggaaagaaggccactgcgacttctacctcaacgtccactcagaaacctcctcgaaggcgaccaaccggacttgctagacctcccaagcccttaccaccagctgaagaacgagtgtccgagttctcacctaccattcctggaggacatttccttcagatcctgaagagagagaaagtagaggcagataagaggaaagtagaggcagagaaagcggctgctgccaatggaggattgagtctgtcagttggcagagagattgaaagctcgttgggcggagatgggaagaaggaaggaaaggaaaagaaaccgaagatgaagatcatgagaggtggaaaaagataaggccgatcgcggatagtcagagccacttgaattgtgtgtatgtgtgtggtcatttgcaacagatgtattctcttccaccagaccttctctccgtccgactcttgctgatcttggacgttgagtgatcgagacgaaagagaagcaagacagggataatgaaatcgacacagtttgatcatcgagaacagttgtttcatgtcgttctttgcagaaagtgaagagaaccctcttccccccttcctttttccctttttcccttcttttttcctttttttttgtgtgaaaagaaaccctttggtagaagtacgataaacatttatcggactacaatcagtatatatataccataagggaaaagctatgatttaatttgttataagaagagactcgagacaagagcggtatacatactatgggctctgaatcaagagggagagaatataaagtagaaaagtatgaagaacacaattttttacaatttctggtcattatggacaatcagaatgagatggaaacacctcccttccaagtgaaacctaaaaaaggaaacagagaacatgttacacaagacagaaaacatcagtaattacattttttttcctttaagaaggaggccaaacatcatgtcttggcggagcaagatcactaaagtggccaagcaagtcgtccatcgacatgttgtttcgaacgtcaaacatctgtgggttttccagctgatgcacgacgaatcacaaaaaaattaagaacagaccaaaagagacattcatttagcttggtcgagcagagagttctaagagaaaagaagagagaatgaaccgtcatcgaccaaccgaccccaaatgaagtatctgggatgaatattggtgggttgtcgttgctcatcgtcatgatgtccagttgctgcgactgcattgattgaggttgctgctgctcggaagataactggagtgattgatcctgttgtggttgctgttgttcttctggcagaggtactgggccaccgttctgaggggtatttgtaaatgacaaattgattccacgtccaaccggatcaggccgagaaattgatcctcgtttcgtcaacatgaaacaatgaagtagcaccgattggaagaaagcggcttggtaggagtacgcgtcgttcgagtctaaagacagagagaaagagcatttcccagagggtcccgagctatagagtgagtggctacatgagggattagagaataacaggcggatgtcaccatacctttagagacctgttggaatacattctggacgttgtagagagctccaatctagaatggctcgtgatcagaacacttaaacaatttctcgcacttgtaaaaaacgcgtatgtattgcacttaccacttcgtttcgatacttgtcaggcagggttgaaaagttctgcaagcacaatcccaagcaaaaataggtattaaaaagagatctcgacagcaccaagcatcactctgctttgctatatatatatcgactaggaaagaaaagaacaagtcactcactttggctaaccaagtcactgcgcccactgcagccataacaatcgtatcctgactgaattcaatcaatggcttcatgtcctccgtaatccttctcaaacactctaacgaagatttgatacacctggtgaacgaagcgatttcatccatggaacatgtcgccagcgacttattcgcaggtcctccagtcgacatgttgaatcgaatcgcggataatccacaggatatgttcaataggtctagatcgagggtgatcactctgtgtgcatacatttagtgaaaatacaaaccataagaaaagtttagtatgttccaatcacctaatctggctttctgcttcctcaagagggttaacgaaaaaaagattgtaagaaggtcgactaacgcaaaatagaacattatgacggttctacaagctgaatgcatagggaatttggctattcgaaccgggcaaacagacatatctaattagtactcacctcttcgcatagagagaaaacatgataggaaagaggacatactatcgtcccctagcttctctttcaagatagacactttctccctcaaatgacccaacatgatgagcgtaacctctgcgtcatacttttgttttcttagactattgagtcctacgaaatttctcaaaagtagatatgaagcgacaatcattgagtcgaatggactatggaatctcggttcgtcagagagccactcttccatgccagtgagagtctcgtctatcattggaggactaatagagatagatatgacagaatgaagaggaaatccatagatcgatgtgagaactccgtacgagtgcaaacgagatagaggtagatggaaaaaatcatatggataaacaaagactcacagatcatgctgcatatgtgatgtcagatcaaagcacgccatctgataccacgtcctttcccgatcctatacaccacgagaagaaagaaacacagtgggctcatgagaaaaaagcaccatggcaagtagaagagaaagagggatggatggatgaacgaacgaaaatcatcctaatctcgtgttcgtcatcgggcaaaggcctagcatgaggctcatgcaggttcagttcataagctagacgaattgctacatcatcgccaataagaaatgccaggttgagttgtgagtagccgtaatatgagaaatgacgaaggagtttgttgtaacgactgagtaaaacaacgcgtaccatagcctactcgtctaaaactactgttatccgtcgccggtttccagaatgagaggatactcaaagcctgaatgaaaatgcaccatgaccaaaggagttagatgtttcatgttctcttcgctctctttctccgccaagccttgattcttgaatcttgaaagcagtttcgatgaacgaaaaaacatacctgaatgaatccgatttcaagaaccccgaaaccgaaacatcgaccgagcatattattcgtaaaatcaagcaactttggatatatgcccggaagcacaaacttggctgacgctgtcaacacggccgagaacaggacgggagatgtttcacgggtaaagctagcagtgtgtagaacgggatctctagataatgagagttattgaatttgacggagtcaacatagggttcgactatctcatgagacaagattaagaaaaaaaactgacaagaggtcgatgaaaacattcatgtagtcatgatatctagagacatggacatagagccaaaaaaaaaagagaagcaataaccaggatcactggtcgtcagacggatatcgggagggatttatgaagacgagcggaacattgaactaacgtttcaaacatcatgacagcctgctcaaccgagaccagaccgactcccactgggtcttcccatcctatcgtctttttagtaggttccaattggactttctgtcgtgttctttctccattggccccctctttatcagcgcccacaactgtgcccgcgtctgttccaacaccactactcatagaggctgactcttcttctaccgtccacctctgtgattggtgcagctgaggggataattgagcctgattgtgttgctgctgtgatgactgagattcctgttgttgactttcctcttcttccgattcctgcttcggtacgccatccgttctctcaatcaacatttccgccaaactcagaactcctctcccttccgtccttctagcactagacttgttggaaactgatgaactagaagcaggcgatcctgccgagcctgtcattccagtccttcttgccccgggcgtcgtccccactccaccacttgaactggattctccgagaccgggggtaaacgtacttctcgaggccttgttcgccggactgttgtagagaagcgaataagctgttatagaggatgttcgagaagatgctctggaaccaaggccgtctcctgggagatcaggtattgacattataggtaacgatgcgcccggcattctctcactcgtgtgattattcctgttgtggtttttatgactgttgtcgttgtcaccgtggtcattattattgctgttcaggttcgatgatcggtctgtaaaagggaaaggttgttgagatgaaggttggaatgggatttgggtacgtatgtagctaggttcgatacctgcggatggcgaccatccgtccccacctgctccgttatcgaatgatacggaagataaagagggcccgatcattccataggccgcctgattgacgttttgtccatcggcatcttcaaaccaagagggaggaccaggattgtaagacgggtttgggcgatcagtcgggtacgatattgattgaggcgcttggccatacgacggagcgatgggcggcggttgatgctgctgtgaatgtcgatatggatgtgtccgttggagatgccgatgtcgttcggattgggggtaaggagacagggcgagctgtggttgtgattgcggatgtgattgtgattgtgggtacccagatatattatgggtgtgattgtatgctcctctcgcatctgcagggggtcgatcgataatcatatttagacctgaaccagaaggattcgtttgggtgttttgcggctctgatgacgatgatcccgcgcaaccttctggtccactgaccggaaaattaccaggagaaagaaaagaggaggagatctgaagatggcgaggctgggtgtgtgtgttatacatcgaggcggatgctaggttgtacgaagaaggcagggacgaagagccagacgcgttaaagcgggagtgatctatctgtggggggtaagcgcgagagctctgagatgagtcaaacatggaagaagatggaagaccagctggcgagataggatctggtttaacggccggataagtgttcgaacttgaaagcggtggggaggaggacggggaagagctgtctcggacatgagcgcttggtgtcttagatgatttcgagctgataattggactcctcccatcggtattcaatgcagaaactctgaacaagcaaaggacgtcctaacatgtcagctcagtacagaacacaagatacgcctctttggatgtgggcacaaggaaggagagaatgcagatggctgaatcgtagataacgggaatcattacagactttcgtttggatccgactttccgtccacgcttctgttggttatacacacactcgtacttgagtcgcgtacaacgggagcaagtgtctggaggagcgtgatctttatcgattggtctacatttcacctgtttgtataagaatcagacccaagatttcaagtcgtgagtcaccacagaaacgggatgtatcagcctcttgtctaaaggatgatcgtccttgcggtagagaacctctcatctatccacacctccgtctcagcgaagaacagagaacaagacaaagcctttaggcttgtcacagacctttgtttgcctacatgccaggcaggcttctttagcctttatgtgttgctgaggcgtcctctctggcgaggcgattgccgacacgggttcactaatcgagcatgaaggcatgacgtgagttaaaccggaactcggcgatgagcaatcggtatagactgactgatgagaattcgttcccttattcgagctcgatacactttccatattggaatctcttctacctgattttgactcgtcttcgtcgttgtcgtgctcgactttgtggttgttagcggtctacatctgaagttgaaacacaggaggatggtttgagaacaaagtccccaagcgtttgggctgatagcccagatgaatggggtcaagcccggacgcgtgggcacgtgacgcaactgaataccaaattgtctcattctgaccccaagtgtgtgatcagtttacccaaacgcatggggtgtcccccatcgtatgggaatctttacccaaacgtatgggaatccttacccaaatgtatgggcgtcaaccccatacatctgggtactcaccccaagcgcatagaatccgaggccactcaaattattaaccggttgatttctcctttcgccttgctctcttttggtcttcttctttctcacatacacacagatacacacagaccgcgatagaaacaagctacaagaactcttatcatggctccttctaaatcaaaacgagcaaggatagccgcaggaggaacggttgtgtctcaggataaacttcactggaagccggtagccaggccaacccaggcgtcgttcggagcgcttgatcaggaaggtggtgttctcgagcttgaggaggttgagggcgtagaggtttgctatgaagagctaccgggtggaggaaaaaaggtggtctttaaggtttgtcgtttgtctttcgaccagaccatcctgggcattctccgggtgatacatctaccacacaatcaatacaaacttgaacctcaaagacgttcgcgtatgcatcatgtctcggttgttaatgacctcctcttcactctcttgtttctcacatctcttgccgtgcgatcgtgtatcagacgatccaacctgtagattcttcaacagaaaacaccgatggtggagaagttgctgtcaccgaggatatggagaccgacgatatcgatgatgctgattcttggaacggaattgcttctgacgtcgagacggaggcccagtctataccaatggtggacaagacccaaagcaaagccgagaaagaggagtcttcttcaaagaccgacgcgcccaccttaactgttcctggactcgaagagaagactccttctgcggaggatcttaaaaagaaggccaaggccgaggagaagaagaagagaatcgcaaagctgaaggccgagaagagagaacaaaacctcttggtcttgagagaacaagaaaagatcgacgcgaaggccactgaagaaaaaatggatggttggtcttgtctggttttcttttgtgtcttatggaccgtacttgctccaaatactcattcgttccctttcgtttgagggcatgtcattcagaattgttcgatggtaagacctgcctctatttccctcctccttcctatgcgcgctcgtctcttttttctttcctaaccttatttgaccttattatatccccgcgaaataacaccttagacgaactacttccttcatggtcccccttcgcgctccacccccacatcaagcgatccctcctccacttatcctacacttcacctacccccatccaagccgcagctcttcccaaaggactttctcaaaaagatatagtcggtgtagctgagactggatccggaaagactctttcatacggtcttcctatcttgtcatactgcctgaatacaaacaggacagaattggccgttgccgagggtggaagacgagagctcaagggtctaatactcgcccctacgcgagagttggccatccaggtttgtcaacatctcgagcaggtcctcgatccgaccaaggttgacggaaacaacaagaagaaaaagggcaagccgcaaccaaaaggaaagggaaaaggaaagcaacagcaagctgaagaagataagcaggaggaagaaaacgaaaaggaagaagaggaagccatcaagcagggcagaaaggcacctccgagagtcagtgtcggagccattaccggtggaatggctgttcagaaacaaaaacgagtgtgggagaggggagtggacatcttggttgctacgcccggtcgactttgggatttgatcggagaggtaaattcgtatcccttccatcttgcaatgcacaggaaagacccaaatcttgatgtcaaaaaactcattcatcgatctctacctttatcaggacgagaacctagcggaggccgtacgaaaaatccggttcctcgtgattgatgaagcagaccgaatgatcgaggctggtcatttcgaagagctagaatcaattcttgccctcacacatcgttccgccgcccctgcatcttcatccgtcccttcttcgaataccattcctgtgcctagttcgcccgggaaaaaatcgagaaagaaccaaaagaaaggaaagaaggaagaagaggaagcaccggtggtcgagttggtgaaggatgatttcggagaggtcgaagaagatagagaggacggccaaggtgggacaagagaagaccttcagacgtttgtcttttctgcaacactcagcaaagatcttcagagaaatttgaaaaagtttcagggaagaaggagaagcaagaagggcggaagcaccttggacgatctgtttgaaaagttggatttccgagataccgatccggccatcatcgatttgtctccagaagatggggtggttgcttctttgcaagaatcccagataaattgtctaaacgaagagaaggtcaatttcccttgtccccctgtttcctggtctctcctttggctgatattaaatcttttctcgaaatttttctacgtaggatctctacctatactacttcctcctcagatatccgggtcgatccctcatctttttcggaagtgtagacggaatccgacgagcaatgcctcttttcgaactccttcagctacctgtgtacccacttcattcacaacttcagcaaaagcaacgtctccgaaatctggataggtaggtctccttcctaattggtttgatgacgctcatttttagcatctcgatctgaccagtttgttatctcgctcttagatttaaaaactctccagatggaattcttcttgccacagacatcgccgctcgaggacttgatattccgtcagtagaccatgtgattcactaccagttacctcgaacggccgatacgtacgtccaccgaagtggacgaacggctcgagcgcagagagaaggtttcagtctccagttggtcggacccgaagagaaaaagttgcagaaagagttgatgagaagtttaaaacgaggtttgtcttccctgtcttgtttatctatctatccacatctgatcacttatgactttgtgatttatatcgacgatacgatagatgatgaggtacccgaactacccgttgaacattctgttctgtctcagctcaaagaacgtatcatggtcgccgtcaagatcgaaaaggctatgcatatcgtcaagaaaaagaatcacgagaagaattggatgagggaagcggccgaggctatggatcttgaattggactctgatcaaatgtgcgtcctcctcctctctcctttattttcctggcgggaatttcactgtgttttcgaattttggactcatgggaaacgatcacattgataggccatcggaagatgacgacgaaggagtccgaagaggagtaaagaacggaaaagccaaagtctcaccaaaggtagcaggcctcaaggcagaacttcgatcgatcttggctgaacctctccaggtcagagggttgagttcaaggtatatcactagtggaacccggtcggtcgttgatgatctgatcagtggaaaccgtacgttctctctttctaccccttttcttcactccttcctcgtgtttcaacttctcttccccttgttgcactcttggacctggcctgatcaccatttgccgctttatcgaatagaacacgagaaaatgatgggtgtggccaagacgacagcttcggcagacgctgcttctggtaaatccaaaaagcgcaaagcagtcgttctcaactctaccgaatgagaactcctcgcctagagaagccgtttttgggcgttggtgaagagacggatttgttcgtttatagcatgctttctctgatgtcacattcgatgaccccttcagtgatgatagtttctaccaagcacgacgaaacatgattagagggacgtatattcaattataagcatggatcatgatatacgaaaaacaggaaagacgaagggtcaagagaaggaagaacaaggggtcgttttggaaggaaagaaggcggatcaaagagatgggtttagagtataagttgacagggttcaactgcgaaagagagcgaaaggggacatgaaaacaaaaccagagagccaggagagataatgaaggataacaaagaaccctgagatgagaaaagcaggttgggtagtttatgtagcaagggatcaaatggagaggataaacaagcgatcagaatatgtgatgaataggaggaataagcagacatgtgaagagaacaagaaggaaatattctagaatcgaatctttcgctttcgtgctgtgtattttgagtcggtcggtacactaagaaagaaaaggagagatggagaaaccttgttaaaaaagtggccgatagagatctgaaagataaaccaactgactgttcttttcccttctttcggtctccctcctttttcctaatagtccattctctcgttcctttgatcctatcattctccaccatctttcctttccttctctttgtccttcctttttctctcctcttctcgttcctgaccgcaccttctccatcgtcgccttcgccctcaagacctttcggtaactcgacccgtacgctaggcccatttccggcttggagaggcgatccgccaacgataagacatagataaaactttttggctttacgcgagttcgggtagtcgatcacgagaccaccaccgaacccagatttcatcgctgtggagagtgccatgtggacttgattatcggattcgggataaaactttgacgatgagagaagattgagtgagtctttaatgtgatgctcaggctttcagacgaatcgaacgaggagaggggagggacaaacctgaagaaccgctctggagcctctagacaatgcggaatgcagcgtggtgaagaacctggatagacgctgtgcagggttgtgacatgttgcgtctgcgttgaagagccactgtaacacagatatactaccagtgattgtagggatttgtttgatgagttggtttataaacaaaaggatgaagacgcgcgcgcatacaaagaaaataccaaaagagagaaagaagtgagttgttgaactaaatagtgtaagaaaaggaagatgagcagaaccgaagacgaacctaatggcaccgtcaaaagatccgggacgatatccgaaaccctgtccaatatcttgtaagaacaaatctccttgaacttcacgctccaaggccacctcttgaaatcactcgccagattatgtgatcatcagggaggaggagaaagttccaagatacggcagaagacacgatacggtctagtgagctttccaagaccaggcgcgtacgtatgcgattagtgtatagataaacaaggaaaccaaacaacataccaagcatactaggagccacgtcgactcccacccattcaaagccattttcgtccaagatttcgccagatagaccagatccacagccgatatcaagaattaacggtgaagagccttccggaagggcaaggagttcgatagctcggtgcgtcatcgaggcttgaattgtctggattcgagtgctggtgcgtggcaaacaaggcggacagatcaatttgtgaaggaaaaagaggtacacagcaagagacacatacttttgggtatacttggtggcctcgatatcgccatagtacttttgaataatgataaaagagaacagaagagagaggaaaggttgaatgtcagtcaagagtagcttgttggcttccctctatcgagttcacaacgagaattgacaacagggttctactaacgatctctggcggactgatatgttctggtctggacatgacgtgcaagtgtgtgagtgtgtatctaagccaacagaacagcaaacaaggcggcaatgtcgagaggtggtcggttcaaaaggtatcatttcattttttgggaggaaaagagattacccgggaaattatcatcctgagcctggtgtgagcatcgatagaacaacggtgtcattttgacatcaggcttgagcgtccctccaccttcctaacctcccatgtccacggtctaataaactcgacgccgtcactcttcagagcatatgatccgaatgaagataatagtgcgctctgtcatcgctcccgactctggtagccatacttgaatagtgagaatagtgagaaaggagatcagagtgagagtcgcatagcatttatatcgccacattcttaccttcacgtgcaccccctcatatctgtttatgttcctgttcctgttcctgttcctgttcctagaatctatttcagccagcttgatctctcacctttcttgcaatatctctactaccatcatctcctctctctctcttcatcttttatctccttatatttcttcttgtatgaaagatctcgactccgataaggccacgatcccttcccacaagatcacgctagatcagatcaagcagtttgatttcgagaggattcttaatgacggtatgtccctgatgcatgtcgttctatctttcgcagatcgcactgactggcgcctttacacatgtcttcttctctttatttcctttcttctagaccctgcattaaagaccctctgtctcttaggaaagatcccagacaaagatggcagtctgaagcaacctgctatcttcaatcttgagaaacgagcgttcaacgcaaagctcaacgacccccacacgaccgagttgttggctaacctatcaaacctgacgatcaccggagcgaatgatatcgtaggttaatacatatcgcgctcacacacagtactattcgttacaaccgtcccgtttagtataagaagaaagatggcgctcagaagctcacaatggtaactttttgaacttccatattcaaaatgcagtatcactggtcgactggctggttgggcgaaagccggccggcagacatcaaggtatccattatctcgccctgtacggacgtgcatatcaagaaagttagtacattggcatcctttcgctctctcgagaattttttagaagttgggtcaccaacaatcattcgttctctggctcctcgcgcgatcttacagcactccaagcaaaagacacatctcgttagggagacacctgagttgtacaacaaggtcacccttcctttcattcaatcttttccagcttctcgaacccagtgggttcggaacattctcaatggagtatctgagcaggaagatgttgtgtatacctcacccgctcctctaggattcacattacttcctgacgccaagtcagtcttcgcttctctgtaacacgattgaacgatcggatcagtgcaattcgttactcattactaacttgtgttgttgtgctacccatcaaccgtttgataggtgggatcgcaagacactggcaaccctgtatctgaccatgatctccaaggagcctattccttcgcttcggtctcttcgagcacaacatctcccacttctaagagagatgcgagtctctgctgaacgggaaatccgtgcaaagtggccggacgttgagagagggactcttagattttttatacattatcagcctagctactgtgcgttcttcccttacactttctttctaccttgcatcatatggatgttaaaaaacaaaattttcatccactccatgtcgcatagaccacttccatgtccatgtgacgcatgtatcttacaacggagctcttggcatgtcggtggaacgagcgcatcttttggacaatgtcatcagtctagtgagtattttgctcttgtcggtgagctaaagacgggcgttaacattgtcctgattgggattacccgtgcctgttctctctctttcagttggagattgatggcgacatctttgataagatgacgctcacctacgctctaggcgaaatgcatggactctggaagccgatgaaggagcacggaggatgggaggatccttcgttacaagatgaatgaaccatttgtctagttctggattgattgaaacgcactcgcccttctttctagtctcttccctttcttttgcgagtcgtctagatcaataagagtcgacaaaaggttggcacagaaacaccaagaaaaatcatctttaagtttctcttccggtcttcacactctcttctctccattagcaacaccaacgctccgcctgaagaactcgttctcgaccccgtacatctttccagtaccgacccttgtcctcgccaacttttcagaaaccttgacgggtctgaggtatctgatctgctgcttcccactcggactctcgacgatctccgttccgtcatgagcggtctggaggcgttcttcctcggcttccttcatgagttcttcaggggtgagtggatcgatgtcttcgacgaccacctcgggtgtcaatcgaccaacccgaggaaaggttgcggcggtcatgaattgagtggcacaagcgatcttgcaggtcgccactcggcatgctgtttccatcgagaaaacacatcgaagagcatttcagcaaacgaaagaaccaaggaatgaaagtgaaatataagcagggcagagagaaggggtctcaccttctcgggcgatctcttgtcggacgtttcctcctcggatctcaaacaacgtatggttcattgccacactttgatagtttgaaagaaagaagagaaacaataatcattaatgaggttcactttaaatgaatagagtaccctgccgctagaacattcgactgcaaacaaaggtgaagaagtatggagggcagaagggtgaacctacttgcaagaccaatactcgaacgctccctttcctttacccatacgagtttgatttccctatgaagaagaggaatatagggtcaccagaagagaaaaaaaagcttccgtcttcagtaatctgtccttttcaagaacgaaagcaaactagagcaaacgtttctgccaattctggacgacgaaagaacggatcaagaagtgaaggagaaaaggaaagaagttgacttaccttgacagcaataggtctatctgggaaaactctcatgatgatctccgctcctttgtaaggtttcaatttcttcctcaatgtatcgtgcatcgcttccaactgtttggctctcagcctgatccccatcttgactctgattccgaattcacctccaaaggccaaagtcgttcctctagttgaaccacccgtacggataggaatcctacccttcatcgtcttcgtagtctttgttcgcttcggagcaaacttgattcctcgggtttgcatcggagggagaagcctgagcaaggtagcatgttgaagaggggagaccgtcgaacgggctgatgatggaagacaaggagaagaccggaggacaggtaaagaggaggaagagggaaccgaagggagagctcgtcgaagcgaggagagggagaaccgggaagaaggaaggagagacatcttgatcggtaaatttagaggaatgtatctgtgtgctctgtgtgctgtggctctgcttgagacagcggttgaaaagcaagcaacgtaggagcgaggatggttgtcggaggagaagagagagaaaaaaagaaggtagtacttaagaatggccgcgtgaacccaaacatccatcccatcctccttgagcatctattaggttgaaccatgaaggtccagttgagcccattctcttgtcggtccttgcacatatcctcatgacaacagagcattaactccttgttgagacttgtgctgctttttttctctccgcagattcaaaaactggcaagccgtggccgcatggcgctgggatatcaagaccgacacctccgaccaaccgtcttatccaacatacaacaacgaaggggacgatgatgatgaggaagaggatgaagaggaagaagacgtctgtggaatctgcagattagcatttgatagtacctgtccggaatgcaagatcccaggagacgattgtccgttgagtgagttcccttccatcgtgttcattcatcactctccctctcaacttgaacccgactaaactcgattctctcgttgatttaccctcgcgttctctcttatcgctaatcgattgatgtatctgcaatgaaactaaatgaaaaagtgtggggacaatgtacacatgtgttccacatgcattgcgtactcaaatggctcgataccgaatcatcgaagaatcaatgcccaatggatcgtagaccttggggttcgttttacttctttgtttcctcccctgtcttttgagtctcgactgaactgactcttttgttgttttgctttactcatttttcttcatgacacgatacattcatgtctaacgtatagtcacggctgaacgaaacgaccctgcttcatcacccatgtctgaatctcctccgcaatcaccaccctctcaacaccattctgcgctccatttacatcaacatcaacaagaacaagaacatcgataccagcaacaccagcaagaataagaatcaccatatcggcaatgatctactctgatgttctcctcaggatatccaaatcgacattgactattatatacccacttgataatcttcactatatatggcacctgcactgaagtcgagaaaattgaaggaaatatgaggacgcgtcgtgcgttgttgtgagtatctttttctcattgtgatctttcactgctgtccctttctcgtaatttcaggatgccgagaggaaacacgaataagcgatcgatagctgactctgatggcgcgttctagtttaagactgttgatacgcttttgatcccaacctcaacttgcactcggagctccggatgtattgaatacctgtgcaggtttcttatgtcgaccaaacgttgctctggatcgaacgaagactctttttgaaagagtctttcattcttttccctcttcttctcacggttgtctcgttcttttcgtcctggtctccgcctatctgctacttcatccctccgtccagcataattcatcagaaggccatatatacgaaaacatctgatactcaagataactgttctgtttttttttagcctcacatccacagtcctccgagcctgctcttctcatgacgacgaacacgaagtcaaacgtcgaaatcttcatcttgatagctactttgatgggaaaaaacccccttaccctactatacccgtttcgttccgtttcattccatctcacttgattcgcgatttttttttgttttcggcatctggtggtgcgtcgagtttgttcttccttccggaaagacgggtagattcggacttaatatgtcaaatattcaaatagagtgaaggaaaaaagaagagagaggaaaacaaggctttacagaaacaagaggagaggagtgaaaagataggaaggaagagagggaaggagcaagcaagcttcttcagttttctttaaagattcggagggggagggcttttcggaggaaacaatagtgatatataattggaacagaccgaaggagtcagaacttgacggtatcgaacgtttgattgaaagagaagaaagataaaggagagaagaaacgagaagaatgacgacgtacactgctccataaatccccgatcctccggaagccgactctgcgtgtgcaccctgaggagctgttgaacttggcgcctgctgctgttgagcagcttgtggctgctgaaggctttgagcgtactgagctccgtaacctacagctgctcctcctgctgctcctgctgccgccccggtagctccaggttgttgataatagctgtactgctgagcttgccatgcctggaacgcagggtcattcacatcgtagccataagtagcccagtactttctgtaagcctcctgaggatcttccgccacaggtgcagccgccggaggagcagacgaaggagggccgccagccgactgactatctggaggaggaggaggcgcgtcatctcccgaaggaggaggcggt

SEQ ID NO: 1726 - DNA, 13809 bp, Xanthophyllomyces dendrorhous
ttgctgctgctgatggtgattatcatagttggaacacgtcaggacaaacggtaagcatgaaaggcacggacggcaaccaagagaggaaacaagacgaacgtagtagttttgcatggggaatccagagtagaccccctgctggagctgctgggcgtcccgggccttggcccattcggaacgaacgaccaacaacaaatcctctgccaaaagcttggccttttctacctgagactcatctggtccactttaggagagggtcccacaaaagaatggcaaaaaggcagttaatcgacacgaccatcaaggtccggatgaggcagacaaaagcatggaggattacctaatcgagacgtgcatcgggtcctcagactcgcggccagtttcttgatcgtagaaaccggatccaagacctttgatctggactcgcgtcccggtctctgcctggatatgcttaacgaatagaccctaacgaaggaacaagaaagaaaggaagaactctattaggcttcgactcggtttggtcacggtttcaatcaaaaccttcaaacaatgttactcacacctggtcccacgactttcgctcggacgttgaagtttctcaaactctccaacccgatcggcaccttctcttccggccactttcgcctctcccctggtcgaccgccgaaccttcctccggcttgctcggccggaggtgctcctccatccggttcacctcctcctacaggagctccgtttgccccagaagcaggaatttggttaccgaatcgctcccgatttcggccccattgggatcgatcctcgaccagcggaccaaggtcggctgcaatcaagtcgttcaccttgcggagtcgaaagagtcacgagatgagtttcaagaatgaaaaataaggaagagacggtgagagagaggagggcactaccttcttgacagctccgtctagaatctcctgagacgtggcaacgatgtgaaggtagagcggaggttcggccgcagttgccttggacttgtcgggcagccaagttcctttagtggtgattgaggctccagtctcttgatgaagctacattgtgaaatgggaagaatgggacaagattgtgagagacggaatcttacgtgtatacagatatacccagagtaaagaggtcaatgagagaaacttacctgagtttgggttgaacccttagtgaggagatatctgaaggtgagaggaggttagtttcgagaagctcaggttcagacagagccatcatagacaatacaaagaattgagaccaacctgtttcggagatctagttcgaaaaagatgaaaagctttcataagtctgcttttctctgagagacgcgtcggtagaggagcagggcgatgagaggacagaccgttgatctcaatatcatgggtgaactctccatcgaagtcttccttctctcgtttaggagcaggcttcgcgtagttgttggccagctttgcggcgatagcagctgtagaaaaggacggtgggagagatataaaacctctaggtgagccatgagaacactgtagagcaaagggaacgagactggacaaacgaacctgcacgctcggcggcttcctgtgcactgacagctggagcaggcggtgtggttgccgacaacgaggccggattgggttcgtcccaagctctacttctgttggacatgtctttgagttgtttgcaaaagagaccagatgggatgagaggtagaacacaacggatgcgtgtgcgagtacgaagaagaagagagggtaaagtgggcggtgtgatcacgtgaccgatgagttgcctagacttgttgaggcatgcttagtaagcgagatgtattacctcagcctgtttgattacctagtcgtaaccctcgccggttcttgtgcatgtcctttcgcctgtgcctgtgcctgtgcctgtgcctgtgcctgtgcctgtgcctgtgcctgtgcctgtgcctgtgcctgtgcctgtgcctttacccgtgcccctgccctggtcagatgtccatgcgcccgtcccgacggccaccgacgaggacgacgaacgccaacggaccgaccaagagacagacggacggataaacggatggacagatggacagatggatagatggacagaaggaactgacgaggttgaacaagacgatgaggacgaacacgctgacgagactaacaagatgcgcttgtgaactcgagtgaatgtacgactaacgacaagacaccagacaccaaggagagaagcagacggagaaagagaacgcccatacagagcgcacgcatgaaacattcaactcctctccctcaccgctttagattggctgacctgctgccccattggctctgcgcactctgcaggtgacccggatgagaactcagcatgttcttcattgtcaactgaccttcaggagttctgttaaatacctgagcagatcgtgttctcttctcttttctcttttccgctctccttctcgttctctctccggttttatctctatccttccatctcatcccatcgcttgatcacattcattctataactctgaacccatcatggattctgcacctaacctctctacttctcctggatcgtgagttcccgtcttggacgtttgtctcagagatcatctcggtctgatatctggttgtactttcccgcctcattccgtctgatcccatcacgtcacagcatgggatccaacgcttccctagaggcaagattgaaaaccattctttcttctccatctctctgggatcctgaagctctaggctaactttggcttgctctctcatctcatcagatcgccgatgccttgttctgtacgcttatcctcttcaccctgtccatgcaagacgagttcaagctgatcgtgtgacatgttcatgtatcattgtaggcgaacacggccaggaagtttgcaccgcctgcgggttcgacgctcgagaggaaaacgatgcgtttgtaagctcttcactgactgattgaccagtgtcttccttgacgacggcctgacattctatcttttttccatctttatggggtcttcctgaacgacaatcagttcggcgtgagtatacacagttctgattaacaaaacagtttagtctcaaccatcagctaaccttgagcctcgggcatcgcaatctcctcagttctcacgtatgcccacttaaaagatagattagctttcgtttacaacgtaaaagtttgacaccttttctcggatcggttcttattacgggctggtgatcgcgggtggtcgtccgtagccgttgctgaacggggagcgtgagatccttccctttcggatcaatctcatgatgagatgcatatcacctttcctgacatcacacctcttgacttccttccatcagcctgactctagtagatttcacaagatcgaccaaggataactccattcattgcaagaagcacggaactgtgtatgccagcgttcctcctattttatctaaccagtatcttttcctgatctcctcttccaatttctccgctcttcaacagcgattgcaaacaatgctgtaagtcgcataacgtcttctttcccctttccgatgccatcactttccttcctatgctcatatatttcacttatcaaacacagtcaactggaagaagagtattgccaagctgcagaaggacgcgtcaaaggcccagaagaagaagcctaagaacacaagcaactttgagtgatcatcgtctgaaagcttgccgtcgtcatctttgtattgtattctcggtgtttttttctggttttttttcctaagcatgtatctctctttttttacctctcgatccgaaaagtttttacggttgtacgattatataccggggtatcgttgatgttgcgtcgattaaatgtgttgttatcaagcttgtgcacgacagacgaaaaggtcattgacaacaaactcgaagatgaactaactagcatacaaatcaaacaagcttggacgacaccctaaagagaagcgaccacagcggaaggaaagagaggaagccgcgctcgctcctcccaagcccagagaaagcagagatgaacgaaagcccaaccggtttcccacccgatccagtttttccatattcctttcgatcttcggagtgagagctctgaagcgagcagcgagagcgcaagagtcaacgcctgttttatccatgtttcatgcatccctccggttggctgaaccggacgaatggaaggatgagtgtaggctggagacgcaagagtagaggtagacgaataggcagaagccagagcggggatgaaatgagtggacacgagtttgagaacgattaacccttgggaactcgacctcatccatctcatcctgctctcggtcattcctgacggtatcgtcctgaccgaccggccgtcattcgtcgacagggatgagatgttatagggtgggttgagcgccgccttgtgtatcgagttggcgaacgagacgggatgtgtgccattggagttaaaagaaggatggtgtgttgtacgaaacgttgttcgctgacataggtaattgcaaattttaattgtcagaatcgaaccaacacaagagctctgaaatggtacagtgcaggcaaaggaaaaaaatacaggagagaaaaagagagaaagcagtcaaccgacaacgcacctctgtctttccactatctgaactcctgtccgacccaaattccgatccaattctttcgccaactgtccccctctttctgcttcttcctcttgtgatgaacctccctcctgcccagccgatgacagcttcctgctccctccctgatttcatctccgcatattgatcttgatcttggtcttgctcttgatccgacgtgtaaggtgatccagaagtcgagtgaagcgttgtgagcctcgcctccaccgttgatgacaaaggggaagggatggctgacggtgatgaggatgatggggaagatgaggagagaggttgatggaacggcgtaagtgatgtcgataggtcagagaacgtcggtggtctggaagaactagagctagagaatggataatgccgaagagtctctttctacagggaggaacaagacgatcattaagagaaatctgtttgtgatgtggaggccaatacacccgaagagcgagtgtggaagggaaaagaaaaagagacgtacgctgagaccgacttccaagatgtgcagtacttttttgcaggatagtctccggccaggatcagtcgtcagtaagcctgcaagaatgaacaagagttcaggagggagaccccgcctctcaaagtttgctactagctcaggagtagggttgaatctggtatgtatgtatgagccgcaaatcagcatgttttccgagacagatcggttgatcaaaggacgcgcgcctaccctggataagccataatctctttctcaaggactgataatcaaagcgacaataaagcaaaccatgtcaggataggaaagaaacaaaaagaagtttgtcggacaacaacagaagaaagaataggcaagtgagcgaacggacggtcgaaatcttctgtttgagaatacggcagattgaaaaagatgatcttgtgcaggatcatcccttcaatttcaagcccattcagccggtgagaggaatggaagaagactagatcagtctcgttggccgtcaaggtttgggtaaattgagacaaagcggctacctaaactccagagatcggattcgttgccaagttccaataagttgccatccgcatcaaccgtgaacgagcctggagagcaatactctgtcgtgccctaaggtttttttacaagaggtataatttatcctatcagccgttgtcagacaaacaaaacaaaacatacagaagaccgaaaagatataaaccgtatttccagaccgagctctatcagggtgatataacaaagaagcggtcccgaaatcacttatcagtgccctgggaggtccgaattctccttcttccagatggagcaagacgtttccaggtttcagatcacaatgaatcactgaatgatcgtgctatttaaattcaagcgttatagtcgatcaatgtacggagcgcgcgaacacatgcacacatatatacacaacgacggaaggagaagaagctcaccaggtaagtcaaccctttacacacatccccaaacacgctcaacacctcttgccttcctaacagatgtacccctctcgtttcacctctgtggattccttctctcaagccaccagcgtgtccggctccagcggaagccagttgagactttcgtcgggcacgaaaggcagccttagcttgggctggagataattccggagcttcgaaatcagtacccataggtggtgaggtacgagcggttatccatgactcgagggatccatgatttgcgtattgcatgagcacactgttcagattataatgtgatcgaaggaacaaaagaaatagctgagaatcggcatgactctgatcaaagccgtctattcgaacgcagacgacaaaaaactgactggagggcttgtataggtgaaccgaagctgatggttgccccccccaaagtatgggccagatcaatcgacatgaaagatggtcagtatgtttgtctctccgaaacattcagatctcagccatagcactcgagcatacctcgagaatcgggtcttctcgatccacgcaaaatgaagcgtgatgatgttttcatgtcgtaatccttccaagattttgatttctttgagcacttgaaccaagtattcatgtgaggttcctctttcgatatgtaaatgtgcagttgtgtaaaagttttcgggaaaccagttggaacaagaaaaaggaagccattcgtaaacgactgaatgctttgaatcaccaagtctacgcagaggagagatggagaagagatatgtgcatacacagctactttctttactgcactgtaggtaggaagggaagaccgccagtgagtaaatataaatatcattgagcgcagaaaacaacggatgtaacagggtacgaactaaagaccgagaggttgatggtcgatgatatgctgactgttaagagaagcagaccaaagacgaatcagtttaaagagggcgatctgggtaagactgactcgagtaaactttcctgaagacttaccatagaaaaacggttccctgcgcgcctgtagggaaccgacgatcagtgagaccacgacggtaaagacagagcggaaggagtagaccagagagaactcacccatgccaagtcgatgctcttctttgaagtatcgtttgtagtacccatccgatccttcttgagagtcaccagtttcttcttgtcgactggtccgcgtccgttggtgtaatgatggggccgatgaacctatctgttgttccgtccatgcggtagtggatgatatggaagacagtgacgaagtagaggatgacctagaaggagaagagccaagagtaggcgtggcagtagcagcaacagtagcagaagaacgagtgatactcgagactgaatttccaaacatcggtgtcatcgaaggcgtccttgacgagcttgaccgtgatgactgagattcggggagagccggatgcaacgtagagttcacctgggaaaggatagaaaagtatcgagggttgacaacttgttgaccgcgcccagggggttcaacagatcggccatcagcttcctgatcgaacggtcttttgcatagttcgcacacatgactcccagactggaaggcagaagctatgggagagcttgaaggaccggcaatggccggtcgaggttcatattgtgcgttcgagtgacgagggttattagaatggtgaggaagaacagaaagcgcatgcaagtgaggttgccagagaacgagggcatttggtgtggagagcactgtctcccaagagtcatcagatgtgtgtggcgtgtctagatgagggacgagtgccatgatgggagggcgatggtgatggtgatggtgatgaagccgagcagatggacggtgtcgatcaagatggaagttgttcactaaccatcatcacaaccttccatcttcctttggattgtctctccgttccctttttttctttttcttggcgttgcttctgctacaaccatacacacatagcatatacacacacatataactagacaaggaagacatggaagaaatccgtcaaatccctcctgtaacacggtatcttttgggctccttcctggtcatcactttgtccataattggtggcatcctcgatcctagcatagtcggattctattggccacatatcaacctgcggttcgaattatggcgtctattgacgacgttctgctttgctggccaagatctagccatggtgtttgacctggtgtctttctacaagacgtcgaacagcctggaaactgaaacatacatgatggatagtgcaaagtacgggtggtcaattgtttggatcgctttgggcatcgaggtttgttttcactgccttgtcttcttcatctcgtcagcagatgcgcgttcatctgaacaggatcatgtatcttttggtgatcacaggcattgaacatctggattggcagctggttcttgtttaaaccgttactcatcgggttggtccacatctgggctctgcaaaacgctactgccaaagtatctatccttggcttggtctccattcctgctatctgtatgtgcattttctgctcttcttcctttttccttttctctttctttgcgatctgtgtttcaactacacagaccagcatgctcaccgatcacatcgttcgctgtcattctcatatagattaccccatggtgttgatctttttcgtgttcatccaatccggccaattgctctctccaacctctgggctcgttgcggcgcatgcataccataccttgacgagaaacctaccggagaaccgacagtctggtttcttagtagaacctccgtcctggtggagggctgcgtttgcttcaagaccggccgttgtgcgtaccgggtttgggactgccatgcagtcggacaagtcttgtgcgggtggtccgaaccaaggaagcagtggtggtggtcatctttggggttctggaaatagacttggttctctttgaacggttatacatgtgcattctctcattctagcgatccttctgttcattcttttttagcaatcccattgttcatctttctgttcatccttctttctcatcctcttcgctctagatggtgacgtacgtgggtgattcccttggctcaggctgacaccaaaatctttcatgtcaggctcagaacctacgccccccgctcttatcgtctcaacttcagcccacaacgaagaacaacgaggatcaaaccatcatcgtcttctgtgttccttctcgtttgcttctctttaggcactcgtacaacaccctcaaacacagcctagagtttgtccatgttttgctagaaacatgtcgtcttctttcccagtaggtggcgccttgatctctccatgttcgcttgggcctggctcaatctgatccggtcccacacatcccactcttctctctcgtagcactactcggcccttgccagctctcttcagtcaacctcgcctgttaacaatgaccttcgaacgcttatcgaacgatctcatgttcgctcggcctcacgatcgtctcgaaggccgtcttcccattcgttcgtctcgtacagagaacgagaggccttacttagacagcaacaggacaatgcttcgctcattggtgattcagccattgcagatgacgatgctcagcacgacagatcaccgacctctgcaacttttgggaattacggtagtacgtctatcagaagaggatccaacgcgagtgctctttccaacggaaccaagttacaccggggcaacagatttggtaggctctcgatgatcaaccacaacgttcccgccggcctggttcatctacagggcccttacccgcatcaagcggtggagagtaaggtgccaatcatggaccctcaggtccttactgccgaacaaggtggagaaaccgcagaggaagaagaagagagaattctgggtggtccggcaggtggggatcttgatgtggatggcgagattgtcctgagtgacaagttgaactggagggcggccatgaaagtcagtcggcttgtttccatcgggtggcttgctcatttcagaacaagagctgatctagcctgatgtttctctgtttcctacttactttctcgtgttcttgttctcccaggcggaggccgttgtcgtcacttacactaccattcctatcctatttacccaagctgctgagttttccttaatcatcgcctctgtaagcgcacatacatatatcattccggttgactgtgttcttatcgcatcaaacatgctcatcaactcttgtgactttgacacttgatcggtccattgcctaggtggtctccatcgggcatctttcctcaggtccgatcgacctggctgcgtcctcgtccgtatcgtcccctgctctttctgattcaaagtcgatcattgatcatgttaatctcttgctgttcatttgtattccgcatttgctcggtttctcaacagactggcgtccatgacggcttccgttacttgtttctcaattcttcagggaattgcttcctcatgttcgtaaccaagccgaatcatccgaagactttctgtcctttcgttgacgagcgactgaccatctttgatcaacccagtggacactctgttgcccgccgcctggacttcatctgatccaactcgagtgggactctgggcccaacgagtcgcagtgatctctgtcggcgccatgtttcctatgtatcttggtacgttcgttatcagcttcatgagatgatggggatgtattcaaagcttactttgatctatcatgtgaatgtgggcagtctggttcaacgcagaacaggtcctgttgttcctgaagcaaggttcgtcaacctgtgcgatcgaacattcacatacgctcacgctgatcattgcgtgttggttcgttgtgtactatcatagagcccgaagtcgctaagaaggccgggctatatctccgggcgctctctgttggtatcccaggatacggtccgtttgttcccctctttccgctgtagcctcgctgttgctcataaagtttgaacacgtttgcctcgcccaggtggagtatgcatcatgaagaaagtctttcaggctcagggcttgatgcatatcccgacaatcgtcatcttcttcgtcgcgcctttcaatctcttactgaattatttcctcgtctggggtcctctttcagctataaggattgggttcgcaggcgctcctttggctactggtctaagttacaccttggaggtaagaaggtttcttgccctctataggatcgatcatcagaaccacggagctgacagcaaatttttgctatgctccttggctccaggcaatatgtttcattggatacgccttttggagcaaggataagcgagcttggccagagttcgagcttagacaggcttttggaaaattaggaaccgtgactacgcttgctctggctgggtaaatccctctcgttcgacatatttacattccaaccacgattgttgtgttttatgacactgacttggtcaccaaatcttttcttctgggttcaaaagtattggtcaaatttgttcagaatggtggtaagtcatgaatcgagatttatcgaagaaaagaattatcattgatgtctcaagaatttgtcacgttttcgtaggtcttgggagatcgtgactctcgcggcctctctccttggacgtacgtttcacagatctctcttgtttcctcttttcattctcaagctaaacggtcatgtctgtaatttaccactacagccgctgccttagcaactcagtcaattctattgtatgttaccttccatgcttgcaattcgaacatggactgtttccttgacctcatgctgaacatcactcgacatattctcatataggatcgcctgctctatcacataccaaattcccttttcaatgtcaattgcgattgccgtccgggctggaaatctgctgggcgcccagagaggattcgaagccatgtgggcttgtcggaccgctctgctgctctcgatcatcgtctccacattcaacaggtttgcctcttttccattcttttgtatggttctgttcgagaatagtcgagaaaatgctgacaggaatgttaaactgcttgtcatgaccctcagcatacttctccttgtctttagaaacagtttcgccaaactattcaatagcgatcctgtcgttgtcaaaacagtcgcagatatcattcccttcttggctttcttccaggtaagcttcttctttcttttttttgctcgtttctgttgtggctgaatcgttaaacatgcatttgctttggggattggtaagcttgctgatgggttgatgggtgtatctaatggaattctgaggtgcgcagtctttttatcaaagttcccatcgaattgtacaactaaataatatcttttcgttcctgtttggattatcagagttatgggcaaacaggcgagttctattcgatcgacgtgtctttattccgagattttgtcgctgatgaatattgtgacgtttagcatactggagcgttgatcaatctatcgagttactatatctttggtacgtagatagtggatagccttcgtgaacaaggctctcgttcgaactgaccttctttctggcttatgctcgatctaaaggaattcctgtgggagtatatttatgcttcgctcgccacatggatttaactgtacgttcttttatcgaatttttctatccttctcattgagccgatcacttatctcatctgtccgccatttgacaaatagggtctttggatcggtctatccatcgcgttgacgtactctgccgtgttgtgcaacatcatcatctatcgcgcagattgggatgttgaggttgaaaaggcaaacgcaagaattgggttggccaatggggagattgaagctggtgggttgctggatgacgtagacgaggaggaggaaggggacgggactccttagtgatctgtcggcgtcttccttcccgcttcacgttctgtccacgattgagtcagttcttgatcctggtagtcacatagatcgaagggtgcaacccaaagacatatatctttcttttcgcgttttccaatctgttatgtctcttgccttaacttatctgcaaaaaaatctagttaaaaaacctctcgctttctctagctatttctcgcttcttcgctctctcgcctcttctcgctattcttctgttcgacgcattttcacttactgaatctatgtaaatatacctgactctcaaatgtgcatattctcttatatgatcaaggacagaggacaggaagggttatgacgtgttgactgacgagaaagagaccaacaaggtaaaacgagatgaaacattcagccatcatcggaccacgcctttttgttcttgtacaatgcaagtttggattcggtcacaacgaaggatcgagaggaagggtgggaggaacggatgggggacggtaagatgcttcggaaagaagagagaaaccagaacctggctcatagctttgtgatcaagaccatatcgaatacagaaagcgaagatgagacgtttaaaggaaagctagaaaccaaaagagggatggacaggaagaagagaaccggagtggcataaatattaaagaggagcaggtctatctagttcgatatacatctctcgtttcatccttctttctccccctccctgctcccctcccc

SEQ ID NO: 1727 - DNA, 9015 bp, Xanthophyllomyces dendrorhous
ctgctcccctcccctttccaatttgtacaaatccatttccgtctcttcttctttttttcaatttacattcaaggagaggggaggtcctcggttgaggatcatgaaaaacacacacacgagagagttggtattgaatactgttgagaagaacgtagagagcagaacaaaagaaattaaataaaaaaaaaaggaagaaatcgacccaagagaaaaaaaaggaagatcagcgcccggttggcctgtagacccttccatctcgctctcttgtccgttcgtcctggtcttctacttcttcaggaacatcagtaaggtgttgcacttcttcattatagtcgttgaactgtatgttcccatccattatttcattcccatattacccgggggacagagtagatcggtcagaaaaatgcgagatgcgaaagaagcggaaaagcaatacgaacgattgaaccttcgtttctgaaatgtgtgcctgaccgtctggcccctgaagtagaaagtagagctacatcatccgcctcgtccgttgagaaccttcctccaatcgagatcctcgggtctgcgttgaaagatgcgcggttagaatttagatgggggaagagagcgagagagagggaagaaagaagaaggaggacagaagagaaaggaccaactcattaaaccagattccagccctccgtgtcttcctttcggcggttctggctccctgctaaggttcaacaagtagacacccatgaagatgaccaagaagccacacaacaggctgacgctatctgcagctcctgtagttcctaatccttggaagagaatgatcgaggcgatgaacgtggcagatgagaagaagacgtaatagatcgggttgacgacgttggtggagaacaagtcgagcgctttgttgaagtagttcatcctgaaaaacgaatgaacatcagagttgttcggtcaacgttgtcgataaacatcatcaagggtgaacatcgcaggactcactgaatcatgatacagctgacgacggccaatccgaagaggtacgtcgtcgggtgagtaaactggttgtttccggcaaacgtcaacttgacggccactcccagtccctgttttcatttgaattcagtctgtttataagattgaggctagaaatgcgctcgtcatagaagagaagcaggacacgaaccttgacggccatgatactgatggagccaacaacagaacagatcgagatatacaccaccgggttcttttttccgtgcgtcggggcgactttatagatcatcacgagggagaacacggcggatatgaagagatatgtgaggaaggctaggtgttgatcattttttcgatgtttccggagaacggtcacgaagccagacagaaaaggtctatcagcaaacaagccttcgaggtcatatactgaagcatcgaaagaacaaaacaaaccaggtgccatggcataatcccagatctcatcgaccgtggagatctccttgtctgccggcgcgtctgtttgtaaagaacaagcaggccgtaaatcgcaagaaacgtcaatatgttgacatcagtcttggattctttagggatgacatatggactggaggaacggacgaaggatgatgatcaaactgccaatcaaacataatgcgcatccacaaatcccaagctttccaagtttctcgttcagcaagaacgaagcgaggatagctctgcgaaacaatgcgatcactgtcaacagttgagatggaaaggaatcataaagaaattggcgagagttgaaaaacgacaaacccaatgatcacactgagcgctcccagtggagtaacaagaatagccggtgcaaaggtatatgccgaaaagttacagacctctccgacgaccactataggatttattcgtgtgattgatcatatcatgataggcgcgttgaggaatatccaggatgcatatgataggtgcatgaaaaaacgaaggagatccgaaacaagacaaagagtgttggtcgtgcgtgagaaagaagaggaagaaaacaaacaagagaagactaaagcctcgggccgcaagcaaacttacaggttgaaatcccggcccaccataaaggtgattttaggtatgacaagttatccgctagagagtgaattgaactgataagtagatatctcgagatgtcttgaacacaattgagaagaataagaatgataaattcttacaagcagaaccatggccattctgagaagcaattcggcctgcttgattaagaccctacatgagcgacgacaacaacagaccagattgtaagtagagtcgctttttctgaccagctgtactctcagtgttctgcgttacctttttagtgatgatgaaactcgtgctgtacagaggatgttaagagagtaagacaaagcatgagtcccgaagaaaacaaaaaaaaaccttctgtcggagctagcgccggagatgaacaagaagagaactgacccgatggcgagtgaactggcaaccgcgagggtgagcccgatatacttgtcttcaagcatgcttttccgtttcttcttgtttctacagtgctacccagtgctgccttgtgctgattgtcaaccaaacagaaggataagactgaggttaaaggctatgggagaaggcgtagcaagctaaacaagacttctgttgaatgtatgctgaactatggccgcatgcaaaccctgggcgataccttggttacgggcatggctacggcgtggttacgatcagcctttgtaaatcctaggctcgcgatacacatgcgagtactatcaactttcctatttcgaacagctcctaagcttacagaatgatttcagaggagctcatagactggtagtttgtgggtttgaacaaagaaacagaggtctgaatcacgagcgcaaggaagatgacgttgtagtccaaaggcggtccagaggatggcttggaataagccatactaatcaggtggaatgacgtgctcatctctctcctggatgcctgacgtacacatcgagtatacttcaacatagcttagacccaaggctcagagacaccatgctctttgactgttgggtcgtacgaaccattggtggatggaggacgacaagtgtactacagatcacgtgacaacactgctgtgctcttcatagcgatgtaacctacttgaatatttattcttttttttttgttttatctttctgatatttccttcatcgagctttttccttcgtacggccatccttgagtcctcttgctcgtgtcctcgttcgctttctctctctctttatacagcatttacaatctcataatgctccgatccttcaccaggcccatcgtttcggcctccgctcttgctagggctgtcccatcggtcgggagagcctttttcccggccactttcaaccgcgtcttgacctccaccaccactgctgccttcactcgtaagaatgtctcacttgttacctttcagcgcttttgtctttgcgctttactgtctggttcttaccgatcctttattttcttggcatctcgctcgcacatgcttcccatcatcagtccccgcgtcgccggcaaagaggttcaattccacattctcttccaacgatgagccggatctttcctcccttcctcctcttgcagaggagctttccgtcgccaacacgttgcctttctccaccctcaagggcaagatcaacgaacatattctcaccgcgctaactgagggaccgttcaaattcactcagatgtctaccgttcagactagggtgctcagcttgcttcctggacttgttggaccggtcgaagggcatggtgctggcgaggaaggaaagagggatcttcttgtgaaggtttgtttcttctctcctctcttctcatatatccgacctttcgcgtgagactcgtcgatatcgaaatccactaattatttcttgccgttctttgcctgttaacacgtcaaggctcgaacgggtacgggaaagactgtcgcgttcttgacgcccgcggtcgagtctcgactgcagtttcttgccaatcagcgagattctaacatcgctgcccatgacttcgtcggaacgttgatcatctcacctactcgagagcttgcggtacagatcgccaatgaggccaaggcaattactagccggttccctgctaccagccgatcagacaaatggggagttcacctatttgttggaggaacaagcaaagcacaacagttgagagactggaagtccaacagaaaggatttcatcgttgccacccccggaagactcaaagactttttggaatctgtccgagatcttcctccagctctagagaaagttcaaactgtgcgtgctctctcggtcctctcttgtttttctatagtcgatcatcggtcgctgatatcatttgcctcctccttttccttctctctctattcttctcaggtcatccttgatgaggccgacacaatgcttgatattggtttcggacaagacatcgcccagatcatgaactacctccccaaagaccgacagaccttcctcttttccgccaccgtctcccctgcaatcaagggaatcgcccaagactctctcaagaacgatgcgctcttccttgatgtcgttcccaaaggtgaagctcagacagttgataagatcgaacaacacgtcactgtcctcgaagacttgagcactttgatgcctcatcttatccgactcatttctcacgatcagctggtgaaccctaagagtaagacaatcatcttcttgtcgaccacaaagatgacccagttgttctcgaccatcatccgaaacctctcggttcacttccctgaacccaacacctccgtctacgagattcattccaagctcgatcagaaggtccgattcagcacttccgatcgattcagaaaggataactccgctgcctcggttcttgtcacgtctgatgtctctgcccgaggagttgactatcccggaaccactcgagtcatccagattggaaccccgccggacggagaacagtacacccatcgagtcggtcgaaccggtcgaggaggagctactggccgaggagacatcatcctccttcctttcgaagctggtttcatcaagtctcagctttccaacgtcccaatcaagccactctctgttgacgaacttgatcgagaagtccgggtgctgattgaaaacccacctagccagaagaacaaaccactctcagacgaccgaaagaacgaacttaaaaacaaaatcgatttgattgaagacggatgcaaaaacattcaatcccgatttgaccaggaggtcgtcggtgaagtcgtaacttcgttgttgggcaactacacccccaagccaaagattttaaacacgactaaagcagagatcgtcaaaggcttgagcgacttgggatcgttaggtctgggaatgcagacccctccccattggtcatctcaattcctctccaaggttggaatgtgggacggagggtctaacggttagtcttttttctctttttcttcatcactcctggtgttacttgtgagttataagagaaactcatccagattttccgtgtcatgcaggaggttcgagaggcggatatggatcaggtggatacggaggaggtggaagcaagggaggaaagtatggagggtacggtaagtccagcggaggcggaggtttcaacagatctggaggaggaggaggcggagtcaaaagatcgggcggaggtggtggagggttctctcgaggtcgaggttcgtatcaggggttttctgtatcctctgctccttgatctctgatccgctcggctgatgtctattcaacgtttctctgttcccgtcatcctcattcaggatcttggtaatctgcctaatgtctcttgatctcccttttgttcaagatccctcattccatacacatacgtatagacacccgcatatataaaattctcacccaccgattcattccacagatatatcatctagatctcattcaaagcctctcctctctagtcatcatatttcttttgcagctaaacgaggattctgaactcgataacacactataaaaggaggaagaccattgactgttggcttctctccactcacatcctctcttctcgatctccttcttttctagtctcctgtctgcttctctaatattgtcttgaaatagagaatttgtatgtttgtaccaggtctttctctttccatttgattctgtcacggccttcgccttgaacgatagcgcactcgcaaaaccaccctcctttccgttcgtcttgttgacctttggggaaaacattcttgagacattgcttacgtgacatgcccgatgatgtcatcgacttctgaaactggctaccagactatgtttcttccggtctaacgataaccatcaacctccatctcatcaataaaccaaccatggggctctctaatatagtcagaaacgttgtatccggtaagttattggccactgatattgttcacgtgaaagtctgattattggtatatgtctgataaccttcggggtgcattctatttgtgtaggtccgaaggcgagatttgtcgacaagacttcgaatcatgatctagatctagtgtatcttacagatagaattatcctcgttcgtcttcttctctttcttcatcagaatcttggtctttcatcccgatagtttcatctaagctgtaatttttttccggatgcttgcgggttgcttaagatgggatgtacgtaattgttcaactcttgttccatgaattccatccttgtttattaaacttcgtggtgttcctctcgatcttttcgataccttacccgcatatgaacagacccagccagtggtatcgaggctgtttatagaaacaagatgtctcatgtctctgcctttctggaggagaagcatagagagcattacagggtcttcaatttgttgcgtcctctcctttttgtttctagtggtctgtcaacagtcacatttgcttacggctgtcattcaaacctcgggtcattcagctgtccgctttcggaaaacgcttacccacctacgagtttccaaaagcgaatctcccgatatccattcccggatcatcatgcgcctcctctcccgcttctatatctcgcgaccgatgagatgaagacatatcttgaggctgatccaaagaacgttgtagtcattcattgcaaagctggcaaaggaagaagtgagtacctatcagctacgcctacttacaatctatcggtagctatcagcatacaaaagatactgaaggttactggccgatccgatagccggcacggttgcatgttgcttgattgagcgactgggaggtgtggaaaaagtaaagacggatcatgggatgactcgtggcagtgtccttcaatccgaccaagccagcgatgctcgatactcgactcctacagcatccgaggacctcgttgtatctagttctgatccgaacgaaagatctgttggatcggtcgagccggcgttgggtcgatccaaatctgtcaaggccaagcatcgcaagtctgcctctgtcgctccacatatcgctcctcaccccgctgccgaaacgctcgagtttcatacatcccggcgaatggcgaacccttctttaggtaaacctggggtatcaattccttctcaacgtcggttcataaactactacgtaacatcactccgacatctaaattcctcacaatctgaggattgtagtttgtcttcgttcgggatctaccccgctgccgtcagtcaagcagactgtaagcccatgcttcgactgctggaagtcattgttcaacatgctgcgcctcctgtcaaagaattcgcaacaacacctcggttgaaaggagaggcatccagatacctcgactctttcgttaatcatctggaccaattagtccgccagtcaaccgatcaagaaggttttcctgccgttcttgaaggcgccggcggattggggattggtatgtcgggattaggaaccgatgaagtaggtggtgagggttcgcccccttcttctggggacagaaccggtcccaagggaggaagcgggatggtccgctcgttaggagagctaaaggaagccttcgtcgagactggcgagatggattgggatgaatacggagagaagagcaagacgctcgcgctgttcactcatcatcttacaccagtggacaagttggtcgtcgatccagatagggaattgaaagtacagctaatggttgatggtctaggtgggggatcaggtggggtgggcgtgaccggactcaagtcaacagccgccggtttcatgaacaggggtgtcaaagcagggttgacgaacgttgctcttggccaggttagcttttcatcttatgcttcgtctgcaaaggtgtccctccctctgatcttagatctgtttggttaatctctttttcttctgatttattcaatgaagactgtatcgagccttggatggttgtggattatcccctccttccatctctctttgcccagcgatacacccacctctagcactgtccagagcactacctctgacctccctcaccacactaccaacaccgacatcacaaacgacacttcgactcgacctgcttctctgcctcaccttccgcctccttctcaaatccctcaggctgacaagaaccatcgaacacacacattcacgttcgatcgatccatcgttgactttagatcaaagtcacttcggaacatcaaattggtcttcgaggagatccctctgtctgaggggaacgagaatggtcctgtcgttaagaagaagagcaaggacaagggaaaggaaagagaagttgtgccagatgaggagtcgaggaaagttgcgttggaaggtgcagtagaaggcgcagagggtggaaaggattaattgacttgtctgagaggccgagatcccgttttttctccttcttcattctttgatcctcagtcttgttcttttcccatgttgacctttgcctctcacccttataagataattacacgttgatgtttttttttttc

SEQ ID NO: 1728 - DNA, 10072 bp, Xanthophyllomyces dendrorhous
atgatcttatcacagtttacggtccttctgaaagtgttgcaccggcacgatgacttcaagcagaaggcatcaccagaggaccttgaacctcttctgctttggaagttccgagaagaactttgattatctcgagcgactgagccattcaaagtaaggcttgtttgattggtatccgagacagggcaaaaccgggagacaagcaagtagatagaaagaaaaagatggtgacgtacccagagtatggctgtaccagggccccgacttgaagatcaccaaagagtcagcaagtcagcttttacaaaaatggaataattcagatagagatgtcgatataaaaaaacagaaaaaagtggaacgaacctggtgataagattatgatgaacgacagtatcttcctcgacataggtgaactctttgtttcgaggattgtcaagaagaggaaacatatcgtgatattcagcctcatccagattgagcggctgagaattagagagagaataaagaaagagagcagacttactttctaccaacttgtccttcacactaggatggctcgtcagtctaacctttccctctacccaagttcgtctatcatcccataaaccgctctccaaagcgaccaatggccctgcgcagatcatacccaagaacttctcactgttagccgcataggatcgaacgagagacagaacggctggtgtagtagatagggttttggctccgggtaaaccgcctgggatgaggaggatagtgaatgatttccgaatctgaaagtatcaaaatgatcagaaaacaggtagagatgatgcttaatgaatagacacggaattcaaaacctctaacttcttcagaaagatcttcaaatctggaatctggaacaatcttcattcctcgactgaaggtattccgcaagaatatcatatgccgttagcttctacatttctttatcccatctgtcttgttatcatcttgttattcagaagacagtgaagcagacaaactgttcaaaaggctaacctacaaacgacaaagctctgtgtttcgtctacgccgaccgaagcagactggacagagatcccggcccgtacgagcaggtcatagatggtcgtaaactccgtttcctctgtaccagtcgcgatgagaacgagggcggatttattagaggaagacatggtggtggttgagagtagcatatcatctcacggtttgggcataaaacggatcaaacatgacgtcactacgcaggtgtaggttgatacaactcttggaaggaatatgaaaggctcatctcctaaccatccacacttccccttatcataccttgaactgcttcgtcctttgctttctctgatactatgtctttgaccaggtattttctctttcaaactattatgtccagatcgatgcagaatcgttggactgacctgatctctgttttctcttcattagtacaaccttgttggtttctctttcttttttcttttttttgactcgaacagcacaacttatacttgttactgatcatgtatatatcaacgttgaacttcaagtgatgatcaaggcaaacagcctgctcagactctcccttcagacgcttcacttctcccggcatcgccatctgaggatcctctgccagaggtcgacgagtcctatcttacacatagagggacctctgcatctacgactcagtctgttgaaaatatatatggcgaagaagccgaacggccgacatacgatgaggatattgccgaggaactgggaggtgattacgatctggagcaagttggaaaggactacgaagatgatgagggagacgatggagaatttccagagttggaagatgagcaggaagatcaacaaacgctgccgaatgaagacgatgatgaagatatatagtcatgagagctttcgtgatctgaagttgatgcctgcagttatggtttctttccagaagaaaacattatataacgatggcggccattagatcaacttccatgagcctcatcaaacattgcccaatccgcctcttcttcttctactccttgctcggattgtctattgcgacctaatgtctgctgcgttgactttttgatggcgatccctgtatatggcgcgcgggactgttcgatctcatctaatatcgaccaatcctcctcggcatcatcgtcgtcgggaccgttgaacagtggttgctttccgttcgagagctcaagcgtaaatgccggcgagagtcgttgagtcgatggtgaaacagatctcgtaggtcgactttcggcttcagcggcagcgatcattgcatccatatcatcaacctctccgtctgcgttgttgccgaatcgtattgtcgtttcagaccgggagagggaggggagtaagctctgtgcatgcatcgattgtagattactagcttgagcgctgctcaagtcggattcgagttctgatgagataacgccagaaagcgcaggctcatccaataaggaagcttgaagatcgtccaaaatgcgctgtttgtgatcgtgtttcgagtacgaattgaattagcttgtttgcgatatactgtgtatgatgagttattttgtattgagaagcaagatagaaaggatacgtaccttggacatccttgtgtggcagagattctcgatatcccgaacagtacccgagaaatctgttttaggaaacagctggtgagtccagatgcggtagtcgttcatcaggttgttcagatccgaccgctatcgatttcaaagtagagagggagcatcaattgagttcagtacaatggtaaagaacagatgtccccaacaagtagataaacagaaggggcggcacctcgtgtcctttgcctttgatttttgcccgattcttagacaactcggccagtcggcgtaaacctatcggttcttgaagtctgtatagtagtgattatgtggaataagtgaacagagatgcatcaacgatcagcaggttctcgattgagacaaatatgattcatttgtatatcaagaaaaatacaggaggaatgatcaagagaagtactgggacacacctttgaatgttcactttcagaggcgcccttcttttgttcgtgctcttctcgtcctcacctatttccaattcgtcatctgatctttctcccactctgaggttctcagatccaggtatcactgtgggaccagccagcctttcaatatcatcttcatcttcatcatcatcaaagagtcgaagagcgaggtctttctggatgttggcttttgtcgatgatagcgaacgctttgctcgagcaggaggtgaagctaccgatggtgtaggtgactgaaggaacaacggggttccaccttgcggtcttaccggacgaggcggacttggagaatcaaataagttggccagagacatctgtatctatctgaatgaaagcaagagagaacacgatagagacagaggtgtatgtgtgtatgttagtatgtacttgagagcgagttgaaagagagacgcgttctgtgttcgctggacgcgtcgctcatcaaacacgcgtcacgcgtcattgattacgtactctatcaatcacgtgactatcacctctaataacttatctacataattttttcctttctttttactctgtactttgcttcttttgacctcccgaggctgcttcgtttatcttcttctctaggtcctcgcctttactatccaacaacgaaaccttcacaaatcatagcatatcatgggattatcggagcgaaaggttaaacaacggatcggtaacgatcctcggaacctccaatggaggcaaggtgagaccgctttctcatgggtctttaaatggatcctaaatttgaacaggcagacgatctgaccatacatattcgttgatctcggtacctggtctttctaacagataccacttcctttggcgctcagtatctcctcaaggctggacacgttcccaacacatctcttggtctgaccgctgattctggactgatcaacccaatcgccgtcgcccgaaagctcgacaactctggtatcggtgtaggccgatctaggaaggaaggaggaaccgataacggtggtgtcggcggggctggttctggtttagacgctcttctcaaacggttggcggctgagagtgggaccgcttcgcctgatgggagcgcgagtccgagtggtgaggatcagcaggctggagcaaaggtgatgagtggatttcagagagctgtgggtaacggaggggtcgttgacactgtcgtcgttcagagtacatcgaacgaggatagtgagagtaaggtagagcaagtcaaggtagtggcgaggccgaatcgactagcgtacgtctgctgccatgatctgtcttcatgtttttatcaggcgctatcatcggaaggctatcttattctgactctgcacccttgattaatctctctgtccttccactagtcaccgagcgaaattcagaaatgcaaaatctcaggcatcggtatcagccacgacggctatgaacgagatccttggtatcaaatcccttcccacatcttccgccccgtccccgacttccagctctgtcccaggtacaccgatagccgacgatctgattgttcaaaacaaagatcagatgtctgtaggagattacttcaaggcaaagatggaggccaaaaaggcggcgatgatgaaggcgatcgccgatgctgctgccgcctcgggaaacggagaaaactctcagtccttggaggtcagtgtaggagacggggtggtgttcgacgaggtcgtcaaggtcggtggggatgcttctgaggaggagatcacgtctcctgaagagtcgagggctgtttccgaggagaccaccccagtcgaagaagagaagaaaagtgcggagaagaagggaaagaaggagaaaaaggacaagaaaaccaaggagaagaagaggaaacgagaagacactgagggaacggtcgatgcggtcgttccctcagctcctactgccaccgtcgttgaagatgcttccgaaagcgaagaagctcggacaaaacgagagaagaaggaagacaaaaggagaaagaaagaagcgtcagtggctggcaaggaggagaatgatgggaagaacgagagtgaagatagtaagaagaagaagaagaagaggaagacttccgaggagtagagtgagaagggtattccatttccctcttctttcctatcttatacggtccttcgtcatgtttcaatttcgttttgtctcaatttcttcttatctgtgagcgtctttcttagatagatcactctctcacattgtttccactttccattcacttcagctatccagtctcatcttttctctttccaaccatcatctatactcttcaaaaccaacttgctttttgttttctgggctttcttcttgtacaaaaaaaatctatctcaatttgatctaactacgatctaatgcaatcacactgatgaacagaggaaaccaagaaaagctccactctattgacagattgagacagatatatagagtgataacggaccccgtcagagtaggatgagtcaatagagagtggaaatgttccttgagctgacgccgaccgaagggtcgaaaaaacacggctcgagatggatatagagtgcgctcatccaagagaacaacaccaatcgcacccgggggccgaacaaaagcatatggggccaaaccccgcttcgggtggacttaaagagatgaacggtgcatgatagccaccatggccagagctcattgaactatgaccctcttgatcttgagtatggccatcgacgagccaggcctgctctatcagcgataaaacccaaggaggaaggacgaaattgcaggttgtacatcctagtgaacggtctggttggagagtcagtcgttgtgggtgtgatcgtacttcggtttgagcgtctgtaggtggacattgaggacatggtggagggtcgattgaaatttgggaaggcatcgatctggctttggccgagtcgactgtgttgacgtaagtgaacaaatcaaaatgatattcagctatcataagcgtcgatcggaatgagaaggagatagaaagatagtgacaggatgatacaaacggatatcactggatgtagcgcagccttgatcgagaagatattctaaatattccggatcaaactcatccacctcctcttccatttctatctcttcctccataccttccatttcttgtatgttctccttccaccctcctctgacttcgtcttctaataaggcttccaggggaattccaatcgaggttgaagaccttgtgaattctttttgtcgtcgtgcttcttgtgatcgcataatccttcggaagatcttgcgttgaaagaacacacagacagaatatgagcgcacggacataggtgtgagatacggaccaaaaagaataaaagaagagaaagaccgacttcttgttcaaactcatcttctccatcctcttcgtcatcttcttccgcatcgagggtcataccatccgcatctgaggcttcgctactcccgacgttcgatctttttcttcctagcgccttcttcttatcggccgagaccctgtctgcacatcttgctctaaacttgtctctccataagttttgtgttaccgaggtaaatccgagtccgttctctcctgaatgaaaatcaggagcagtattaaagaaaccgcctgctatgagagatgatgtggatgtggatcttgacaggattggtgaaggtgagaatgaacaaaggtcagatcgattggatccagaatctgggcgcgatgagcgacgtgtagatggtgaggatgctggaaatttacgagaatgtgggggaccatgagaacgattggaatggccagctcgaaagttcaggttacgtgatccaaaatgggagtgggagtgggaaggcgacgagaaagaggagggatgagtgtgagaaggaggaggtaaatttctgactcgattgggacctagagggctggacctaattggactggacgccatggctacgggtgaagagaccgacatctgaacaagaaggtgaaggtaagtgtatcaaaagaatgggatgggatgatgttggatgggagttgggagaactggacgcgtcgagagtgggtggcggaggagaactcatttacgcgtcagaggtcacgtgataaatctgagaaaggctgtacgtgtcattgatattacaaaggtttgatgtacactgagtgagcggttgccaccaaaagacaaagaaaaactagttcaaggagagaggcagagaggcagaaataggagcagagataaacagtaagggtctgtgatttgaatgatgcaaaggtgagaagaggacgagagtacttgaggaagccacgagagagtatatgtgctaaaagaagagcgaagagaacgaaacaaggacacaagaaacagaaatcctggatagaatcatttcttggctgccgcctcggaatcaacgtttccgttcttgcaggcaatgatcttgagcttgtcacaatggatcacatcacctctgaaaggacggcatgccggttggcaaaccataaagaatgagcttgagatccgatggaagcacaagatacaatgagaaggccacttacccgctgccagaactattggtttcgatcttcatggatgcgttccggacgatgaacgtccacacatcgtcgcacaacctgtacgtccggagattgccctgagatgttgtcgagagaaggattgtgagtatagacagaacgaggctatatgttgagaacgtctagcttgggaatgagatacatgccttgagggatgtcttgttcttgacttgcttgctaagggtctctgccaaactcttgtcaaactggagtacgagttggtggatgggtggcagtaagggtgcacgagagaaagacaaagcatgagctatcgaagttgacatctaggcttgacagaacaagacattaggtaaacaaacctgaacaagaaccctcatggcgagctgaggggtgatctggcctgcctggatgaggtcgtcgagcgagtcagtaagggaggctccgatgctgattgtataccaacatgtcagtcgattggtcagctgggttgatctgcaacatgagactgaaaccagacgaatagacagcgatcgacaccaacctagaacctctgtagaactcgtagaaaccactttgggaggccatacttgtagatttactcaaatatgtgtgtgttggtatgtgacggttagacggaaggtgagaacgaaagagaatgaacagactatactgatagatcttcgagattgagttgtgttaagtatcttatgtagcaggcggcatcatatatgaaatttgattaatcatatatgaggtcgctgtagagtagcaactgtttcctatcccgtgagagcacatatcacatggtgtactcaactggttcaccttctctgcgctcaaggacaggatggcagaagatggtcagacatgatagttcatctatcggtcttgttttggtggttgctttctgcaataaatgctctagtcgattcttatactcatcagactcgatagtgggtccgggctttttatcccaatgggtgctgcaaacttgatccctctttgaatgagcagacttgattgcgtcgtcgccgtcatttgatatcatcatacgcgccgtgcgggccagttgaagatgagagtcttatgcatgtagagatgcggcttgacgatcggcagaaggtatgatgccgatcggacgtaagatggcaaggtcgatcaacacggtttggtggtagtagtatattgaataaaggacaatgtcctcccaacatgcgcactgataagctggtagtccatctggcggactgcttgatctcttcacatcaatcttgttgctactggagaatgacaaagacgatggtggggtagattgtcaaactcatgaatggctttgtcttcgaggctgggccgggttcaataaaccttttgaacctcaaccagccgcttattccgtttgctgtactccatcctttctaccttcaaaccatcatcttctctctcctcttcggcttccttgcattaaccaagaagaagctttgtggtaaccacgtctgacgattgatctgtctgtcttgacatctttcctcttttgattttgtacatatcctcttgcttccttcgcttctttttttctttcccgctgttttcttttctcttcttagaccttgtccgtgagtattcgacttttcctttcttcctttgcttctgtctctcttcctcttcctctttatccttctcttttacctcaagtttctgctcgaaaaggcttgttcactcatcctgctcatggctgagagccaagaacaaagacaagaagttacatggacgtctgaccggtgatcgggtaacctacagactttgatcccacacttactctcaaagtttcgcaaaccttggtgatcattcattgaaggactcttctcctttcgtccgcacttaccatttctcctccctctctttctttcctactcatatcatcttccatccttctcgtttgcctgttggatctcaaacaaaactcacaaaactgacctgtactcaaattctggttgactatcggaactttattctttcttcgtgttctcctctgtctttctctctcctcatacagattcctattcttttaaccttctcgttcctttgacgttcttacgcaaaaaaagagatggccgatcaggaatatgacccaacgcgtcctttccaatcctacgccaatcacaacccattgcttcccaatcatcatcaccacctcagttcactccctccaccgccacccaacccatttagtcaacatccccccaccgccttcccgcctcctccgtcaacaaacaacaataacactggcttctccaaacctccactgggctttcctcctcctggttttccgccattcgatccatctacctggaagaacttgatggctcctccgggaggccttccaggcccatatccgttcccttctccatatccgtaccctgcacctaacggagccctcgctcccccacggccacctccacctccacctc

SEQ ID NO: 1729 - DNA, 1356 bp, Xanthophyllomyces dendrorhous
cctcctcccccagccccaccggttccagcctcaacatcgttcaactctcggacggcgattgctccaatcagttcttccaggttaccttcaccaatgactggtggtgttccacccgggccgtctcctgcttcaggacctcacatattcaatccacctgtgcctcctccatctctcgcccctcctgccccgactcttcagcctctgcaagccaagcaaaacccgactcccaagcaaaacaaaaggtcggctagaaataccaagaagaatcgaggtggagacctacaagcaaatctgaagaaagcactttatcaggacgagaagtacacgcttcatgagccagtctggaaagtcgtggctggtcagatgaccaggttgcactttgtagaaacttcaccctcgaatcttccaatcacaaagtacatcgcgacctccaaaaaggacgcggtcgcgattcaccaacggattctagaaaggtccaacgccgcaacttattactcggatggaagcttcaagcatggctgggcctggggtgcggccgtcgaatgggttaaagatacatccgccgcgtcagaaggaggcaaagttggaaagatactcagagaggaacttggaatgtgcgacccaacagatgcagagatgggtgggatgagaaaggcgctagaggctttctctagcgtcggaaaactcaaggaggatgagttgatcatcttttcagattctcaggctgccatcacacttatgtgagtttctttctccatggtggttccctgatctttcagatcgatcgcgtggtcttttctgaccggtttctttactgatttatctccatgtcttgaacagcgattcggggattcgctaccaatctcaactgttcacatctacgctcgagcgaacgctcactcttcatccgaccgtcaaagtcactttggtctgggttcctggtcacgttggaatcgtaggtaatgagctagccgatcggacagccgtctctggatctactaccaccttccttgccagacgagctggtagattaccaggtgtgccggacgaacaaggggatatgcctgtcatcctcgcgagacgaatgcccaaaggcgagggagtgcaagatggaattgatgaagagggcgaggaaaaggctgaagatgggaatggagtcgacgttggtgacgtagatgatggaaagaagcagttggagcatgagcagccgactgatgattcgttgatcgccggcattggctccttgtttgtcgctaggtaagttttctctcctcttctttttgttgggaagaagtgtgggtacctgcgtatatgtgcacatgtgtatatatatatacatatatatgtgtgtgtgtg

SEQ ID NO: 1730 - DNA, 17370 bp, Xanthophyllomyces dendrorhous
atatatgtgtgtgtgtgtgtcacaaagattaacgagagctgtactttatcactattggctggtttttaggtttcctgaagatgctacagcaaatgacctggaagtcttatttggccagtttggacaattgcaagtctttcgagtctgtgtagtttgagaacgtgttcgatgatgcgctaactgcatcttcatccctttcttttgaatttagatcgtccattgacatcttttcaatacctcccatgaccgaacggttcgccatgctttcctttgtcgacccttccgttgtggacgaagcgatcaagtggttggacgacaaacctgttaccttacctactcggtatgccgccacgagggattgtgaagtttggaaaggttggcagggttcattgaaagtcgcattgaatgaggtaggaacgttggttcctacgagcgtagctgcttcatttcccgagcttcctgattgggcaaagacgaaagcgagcccgggagacggatccgacgataagggcgctggagaagatcaagactcaaaaaatccagcgagcggagacgaaagtagactcgaagatgaattgacagatgaaagtgctgaagaggtcattccccattcaggacatggcgaaaagcggcatgatgaacctcagttgaacggcagcggtgtgggtacggacagagccgaggaagacagcttgatggtgggcatcgaagagtctgcagacaagtcggatcaggcgtctgatgccaagtttgcctctacgactgtacctgcgtctacgtcagaatcagaatcaataccgcctactgtagttgatcctactcatatttctacaagtacgcctgtccctgcgtctcctctcgaactcaacaactatagggagagcggaggagagcccagaggttttgttgagagcggtggttcagctcaagagaatttgcctgcagaagtggcgcaaatcgatccggaagatttatctcgaacgccatcccacccgtcaccacaaatacagccctcgccggcagcttgtctgttgacgccatcctcggcatcatcctctctacttccccgtcaagaacaacaaccatcacctcatcggcaaccgtcgctgtcggcccaacctgaagacgaacagtacaatccttaccgaccgggtcaatctgcttttgttcctgctccttatacgacgcccccgttcattcctcctcctggaggatccttctatccatttcctcgacctcctcctcctcctccttctatctctcttcctacccaaccgccactcccactgcctacggcggcgaggacgagcatagggacaggggtaggcgtaggcgcacttcaaccgccaggtcttccgcccaagtccggttaccagcccgctggcggtcctggtgcggatgtaaaccaacctagaaactggaaccgaggtccgccgggctcgttcaattattcaatacctcctgtggctggtccaccgccccctccacctattctccctgtcggatcaaaggttcggccaacaatgaacccaccgcccgggaggccggatcaagtcccatcggggcaaaagaggttcgaggatatgactccgtctgaaaggttcttgatgagctacgaacagttccctcccgggccgggcaacaaagtcagcagtactgggaaagcgaaaaaggctggaggaaaagcagcactagcaggagccggtgcgccttatcctccttcggggacaggtaaacgaccggcgttctcaccggtttcctctagtcctcaagtcttgcctagtcttccaacgctgacatcgatcggaggccctctgggaacaaggtctacgtctgattccgggcctgggcctaattcaggtctaccacccttgcctgttggaggtggaggagctcaaggggttgacgactcgccgttgccgacgaatgtcgcggatatgtcgagattgattctcgacttgacagcagagaacgcccacctggacgctcaacatgcccggctgacgatcgtgaccaaggatcctgccgattggagtctggcgctcgcacatctggccaaaagtatcttgagtgaacaagaggtattggaagacatcaggagggctcgagcaaaagaagaagatcaggtaatcgattgggagaatgttttacagagaaacaacgtgggcatagaggagaggagaagtttcgttttggacgtgctggacgtactagacgcgtccgtcctgaacgacactcagatcatcttcaacctccgaaaacagatcgaaacaaaaacggggcaactcactcatcggatgtcgcaactgccttcaacaaccgcttcaatcctccaatcgtgcgaacatattctggctactctccaccgagcacttgaagaacaaaagaacgcgttagacgaagccgccaggcggtcgtctgttctcggagggctcgttcagatcagaagggatgctgcagggatgtggagaggaaggaaggaagagattgacctggttgtcaggcagttgactggtgatcagcagccatcacccccatcattaccaccaccacaacaacagttgtcattgttgccctctgccccacccatggttcagacgtcgatacagcagcagatgcaaccgatgcaaccaatgcatattcaacaacacctacatccatacctgcattcacatcagccactaccactgccaccaccaccgccaccgccatcatcacgcacacgaatgcctatggcgatgaacaactatcgcaggatgtgagatggatctgaatgtatctgtccataccccctaatattcgtcttaccaaccttgcactggttttgtcttgtactgtcttcatcttgtcgatgtttcttcatcattctcttcttccctatatacatgtcatatctacccgatctgttctgtgtctatcaatgacctctctgatctttcccattccttctcagcatgctgtgcccatgctttgagaacattcaaatgacaactgagcccagaacgatggccatgcaagacggaagagtatatagatcgaagtccgataagatcgttcgatcctgttttattctcggcgacttcggttgttctatctcatccgtctcatctttcttccagacacgtcgaacgatccatccatcgttgctatcaagcgatgtcgtctgaaccatcacctcctacgaaagctttgaaacgaggctcggcgtatgtctagttctttccatgctcaatcgacatgccgagatgactggacaaagattagatcgctgacgtatccgaatctgaatttcgatcttcgtctcttggtcgtcatcagctgtcaaacatgccggtttgtccttcttgcctatgctgggctcatatctctgttcttcgctatgcaatctctcttcggattttgggaagtacttgagtaagtgaggctgactctgttggttcgatccgggttcgactcacttagaaaacgaaagctggtacgtccgtgtatccgctcgacttagctctgctgacaatcacacacgctcaactaataatctggcaaacatttcttcctttgtgggacgttcgaaatgtaaaaagagatggtaagcattgtcaggttctgttgctctcgttccaaacaatgtcgtcttgaaggggctcttgagtctaacccgggactttcaacgtcgcttgtccagcacgggagaaaagccgacgtgtaaaacgtgtctcaaagtaagagtctttttctcttcgatctgcttcgaatgacggctagattcccaagctaatctccatctgctcgactggatttgtgcagaacgctcaggaatgtatatacgacgaagtggttcaacccaaaactcgaataagaaagctggaggataagatttgttggtttagagatcattctgttatctgttgatcttattggattggaaagtcgtttgatcaaagttttcctttcgttctgttctccttcatagctcggctggaatctatccttgctcaatcgggttctgatcgggttggcccagctcgatcagctcctgcgaccgaacgaaaaagatcaacaggcacgttcccctaccccgcaatcaatcatgccatatcagagtctttcccagaaggatcccctccagaacgacgagccaagcgggacggtcaagaggcattctctcaagctttcgaagagttatgggggatgagtacaactgcctccagactagatgatttcgaattctttggagatcagcagcctgccttcccggcgtacccaatgattccgtctggcttgccggaggaaactgtcgaaccagagacaagcgaccatgtcctaggcgtcctcaacaaacttattgaagagtcaaatcctgtcggatcagtaccagtcgatccatgggagtttgatttggcgctgatgaacgacggtggtgctttaaaatcgccgactcaacctctcccgatggaactcgatctatttgcttccctccggattaatcaggacatttatcatccagatcagtcgtccatgagcttcttccaaacagatatgccgcctgctactatgttgccaaccccagaggcatcctcggcgtcctctatatcctcgtcgtctgtaccgatggagactcgatccgcggctttgagagcatatgtactggacagggaagaacttccaagggaaattagggatatggtccttcgttcatttttcgacagacggaattctttcggaatagttttggacgtcgaaaggttttggaggtttgtcttctgtttttcactagttctcccccccaaaaaagaagctgcttacatacgtaagagggcagtgtattgtctgaagacgagtacttacggtgatgcttgggacttgactattaaaatttttgattgatgtggtagcaaacttgagagtccggtcgaagaggatcagccgcaccctgctttcttgtttgccatggttcatacacatacgttgttccttttctatccatgaatcctatctgatgctttgctcgttctgtggaaacaacagtatctctgcggtagtcagttttctccggataaagctgtccgggcgttggacgacatgttctttgacatggcaaagaagaatctcgatgaaggagtcgcgaattctgataagcgagtgatcgatttgatcagagccgctaccgctttgagcgcctcatcgtgtaaatatatcacctattgattataccgaaggctgagaacgaggctgtttacgttgtcatgttcttattttgggtgttttttttttgtttggaatacatcttatggcagactcaaaagcgagatttcggacagcctgggtctttggaggagtacgtccctttatttctgtagaaccaggcccgctcctctactgtaaaatgagctaacgtcttctgcatgtcttatgcatggctctagaccgctatgcggctcagcgcgctcgccaatctccagttaattaattttccttttaattccctatcatttaagcatccaaaaccaaatactcgtaatccaagcaggaagcgttggagagatgctcaccagtctgttcgacctcccaaagactcaatcgagttcggagagtatatctgggcattttggatggctttcgtaagcgtgttatcgtcttttggatcctcaagagagcgcaatttgaacctgctgttttacgccgttttatgggattcacgtcccaccagtccttggacagatgtggatctacggctactggttttgcttctgtgagttttcaatgatgctataacttgagccgaacaaggtatctcatatctcgctatgtcaccgccgtcaacctaactttgtaccttgctttcaggcaatgagctggtcagaaatcgaaacacctttcccgttgccgctgtcgcagtacgcagatgtgagtcagacatggcatctagtattatactgaagataatatttcaaaccatgtaaacaggccgtgactcaccgcggatagacattttgatcttctttcagcttgatgcagtcaacagtcaacctaagacggctatgtatgaagtacttgacgaatctcgacagattctcgacggagatctgtttgtccattcatacttaaatttaccatattgaattccgtctttgcctgactgttaactctctttcccataaatataaacgcaggagtgggtctttccagctcatcgcattatttatcttgagcgaagcatctcgactacaagaagagtttgttcaaccatccctcaaagacaattatctcgcgagccatgtgtcgtctcctgctgagtccttcggatcttcagctgaaatcttcgaatctcctggttcgataatggcctatgccgagagtccatcgaggtgggggcctgctcttggtttggaaggacccatcccaaacgatatcacaaaaatgcagaacgcgctttcaaagtttgtcaggtcgcttccagctgaatgcacgaaccctggtcgaaaagtgtacgtgatagggtcgcttcctctgttgttatgcagttgagtgagagtgttggtagtttgtcgaagttgacgacctgatgcgatgtttgtatggacaaatggttatccagactgggaggtgttccaccttggagaatggacccgatgcttgtagatagctcctttgaagatttggccaaactatcggatgaagtatggggaattgaaccacaaatcgtcctgctgcacactcagatccatgcgtatgtacaatcgtaattcgcgtttctcacttcagacagatgaacactaaattccaaatgattttgggtttccctttgtcaagtgccttcgcgttgatctatcaagaaaggtcggattatgatccgaacgcatgggctcaggcagtaaaatcgtctcgatctgtagtgaagatccttcatatcgtcgccgagatagattttagtcgactcggtttcttcatcttggttcgtcatttctgtcttactcgttttctttgaaagttaaagctgtatcaaggaagctcatgctctccatgatatgtctttaaaaaattgtatgtaggtatgttggcgaatcgtggcacatgtcctgttggaagaagtcaagcgtctcagaacagtcggagatgaggagggttagtttaatcctcttctacccagatcctcaagtcgttcagtaactgaagctgacagtgctggtaatacaccctttgtttttggtgacttgtatcctttttttccgcagaggctttacatatcacgatcgacattgatcgtaagcattgtggatacggaaggaacgcacatagttttgcactattgaccaaacatgtctcccatttttgaatacacagtcatcgttctcgccatgaaacgaattggagaagtctatgcgattgggtaagaattttccgttcaacgtttgtcagacccgctttgctaacgatagtttacttgtttcggacataaagaaatgaacttgtcatttgccagacgtaattccttcacctcgataagcttgcaaccagatgttgcctcatttatcttgcaatcgtcaccctgtttcctatcatctcttcttgttcttatcacctaaatttatacttcataatcaaacttttatgtatataccttattctgatgtacaatgaaatctctttttgagttcatttgtatctacactattgccggaaattaatcttactctaatcgattgaagaatggttgctagtctcatcaaagaaagaataatgtaaatagtgtgcgggacgcaaatgattacgtaactttgtcatcgaaacttgcacctccgcattcagatcgacgtgacaccttttcgtccagcgatgcccacctcttacgttatacatcattcgccttttactaacgatgtcacggagtgcgcatcatatgctgagacttaaagaatttctttccactcctatctagagtataaacttaatcatcgtttttgttgaatgaacttcaccaactcatcgttcgggctaatcggcgagtctaggataagtagatgagcacgatgaaaagaaactgttggttaaactgcgttgattccaaatgccgcgatgctgctgttggacagatcagtagtggtcgtccattagctgcacgtggctccgtcaaacagatgatccatgtcgacaggatctttccgtttctttctgtttctttgactctttaattgtcatatccttgtgtgtaaacggtagagccgtcacttgtggtatctcaccagatagtgtatcgagtactcatcgcttcctctgctctctctacttgctttcagacttatggaatagagacctcaatgtgtcgcacaagatacctcaccaagcccgtcatcgggagaattggggcaaataaacctgtgactgatgagatcttgatgatttgtgttctgagggcaccctcaagtccaaaaggatcatgtatcaaccaccatcggttgaggtcactctcaccatacttgaagcaaagcaaggcaaggcaaggcaagacatatagctcttcgaatatcatatatatatgcagaagataataatcaagccgttctatttcatgttcgatgaggcttccagtgagtagcaagtgttctatcaagtccatcatcaatagaaagtccatatgcttgatgaggtacagatgcttgatcgatggattcttctatgaaggctgttttacgataaccgccagaggcgaaccgagtagaatcgacagaacggaagtcgggatagaaagaagatacaggagcacgggtgaatgaagttgtttctggacgaaattcatgagaaatcctggcagatgacggcccgccttccctatgtaggccagatggatggaacaagcccgagtcatatgctgaagcgggatcaacgtaaacgaaattgtcgaatgggttgcccgatcctctttcctcctgttccgcctcatcgtcatcttcgtggccccagaaagccaaatcttcgtctaatgtataaatccttgtctcgtctgaccgactcggtcctatatcctcgtcttcattctccatgtcatgagaattgtccgcgacaaaagataaagctgttgaatcccaaccgaaacgatcttgttcgaccacgtctctctgtcgagccgagtgaacaggtcgggcatgcccaggagacggaccagaacctacggatgggacagctgaattggagaacctgctggccgggaacagtcgctttggttgtgaggtatcggataagaaatgagcacaagaagctggtgatcgatttgatacagatactctgggcgatcgacggataatcgaccgagaccgaggatacgctcgatcgatagacgagcgggagtaaggagacatttgagaggaggtccgatgagcaagctggcgggctgggttggctcgatcgaaagctcgtagaagaagtctcaatgagtcggtagaatccgaggggagatcgttcaactgaggcgtgacacgttggtgcgatttgataagagatccactgtgagaaggacatttggtcagagcacagggctgagaactagaccgttgaggaaaataagatttctcatcaggaaggagaatattcgggagagcaggcgggacagttgctgaacgaggcggcaagataagatcccaaggattggcatcgctaacatctaagttttgagcaacaacagccgtttcttcgacttgcatctcttcgacttcctccaccttaacttctctttcatcatgaccggcgctcctgtcagattctgagggccaggaaggcgaatatacgactcttctcttcttaacagaatcagttagctcgttggacgcaacagcgacaggagacttggaatgtttccggagaagtcgctcttccttatctcgttgccccttcgcccgggaggacaacaacgatggcacaccatgctcacccggagacacggaggcggaagatctaaaactggacatggttggcgcggccgaaggcgctggcgccttgtgccttgcaaagaaacgactctcagagaacaccaagtctggaactgttcatgaacatggccgaaagtgatcaaacacgaagtcggttgatcagaaatggaatgaaaaaaagaaagaaaaaaaaaactcgaaacagaaaaaacagagaaacacttacttcctactatctttgacgatcctttggcggagacttgagcggacgacattcctttgttaaaaactcctattgtcggaccgcttctcgtcaactgagagttaggacgaagagtatatgtaagtccaatacatacgtcaagttgcatatgcagttcaggagacaataaaatggatggataaacacgcactgtcagccgacctccggacttttttcccagattacccgccttgaaatgatccatcaatcccagactaagccctgctgccttgcccaaatctgcctctttagccctgtttttttctactcgacctggcaattccttctcgcccgaggaattcttcctccgatagttatcaagggctcgggaagaagtggtaacggctgtagctctctgtgttctaggtctgatgatctcagcctttgctcgacgcttctctcttcggtggttgagccctgtaaagatcaacagatggtgtcagatcaatttttctcttgttcctcaagtccactcaagaaacgaagaagctaaggttctacaaggtggatagaggagaagagaaaactttcaatctgaacgtacttacggctacatcttcatcgtctgatcgagcagtgtccggcgtcctcctagacttgacagcgcgagccttagcttggctctttatctttgttttagttgcagacttgtgttctgatctgagtttgggctgctgttgcgattgaaatctgggtctacgcgaagccgatggttggtctggtgtaggagacaacggatcaagttcggctcctttccggatcggagacatgatcaaaagttcttccatgggttcctggaaaacaaaggatgtactagcccggtgcctctttgaggacggagaggagatttctgaaggtacctgggcagtaggttcaagacggctagaaggtgaggcagcggagggttgatcctgggtatatgcacaccaaacagatccgtcagcatagaaactctccagtagacgtttgtgtaacatacaaatagatcagtcacagagcttacagcgatagaagcttcatgcttagaaatagactcctgaaagaccttctctctatccgcccttcccttgagctcctttctcgttaggaggacctcctcctctccgatcctgtcaacccgagaactagagtttagctcgatcgatctggaaacggccttcgagcttccaactccagagttcgaccgttccagtccatttttactcttcattctgtccaccattctcgtcctctccctggccaacggttttatagccgaagcttttgttggatctggccttgcttgggtaatgacgtgttccgccaggacgttgactgccctgacgccttcatgtctgcctagaactgaagcggtactttttgatgaatccctgtaaggaagtggagtatctagagatgatccgatagggtgagtttcgagccagtgggatagatgagctaaaccttgctgtttatagagctcaaggtggggtacctgagaacggataaaggaagctacgcggatatctttggacattgcgtgagctgctggtggatggaccgagaatgcgttcgattgatctaaggttggataattaattggggatgatatggaagagaacaagtatatgtaagagccagttgagcttaaggagggtggtaaagaaagggacgactaaagacagggaaagagggacgacggaaagagaaggtgaacaagagaatgagaacacgcgacagataaaatacctttgtcccggagattacgtcgtcgcgacgatatgagagcgcatacatcgcacatattaacaacgaatattcattggatacagataaaacaagacgtcatttctaagaacgaataaataaatagacaaacagatataccatatgtacagaagaagatatcaatggttgtataccaaagacttggctgagaggttcacacccaaagtctttctggccaagatggccgtgccatcatctatccaacggacatctgagatcaacgccacgtctcctacactctgatagagatcgtctacctcgttgacaatccgaggttcggtgttggtatcgtatggatgaaacttggcgacctgtgctgtaatttcttcgttgaaaaagagttgacctgtgtgaagagtctttttaggtaaggtaggagagtgaatcttgatatgaacatggctgttatcacgtaggacaaaagttagggatagatgataagcatatgtacactttgatgttgaatttttcttagtcttcctcttcgtcgaacagaagacatacgttgttcgaccaaagtaccagcccgggaagatcgtatggaatttggcgataccttcttcgtctgtcgactggatgcctcgtaggaatctcgaggtctgtgagaaacaagtcggagagaagcattctgatgagacatcgaatggtgggctcatttatgttgttgctctcacatcggtaggggtcctgggtttacgcggaccaccaggaccccctcttccccagaagcctccgggacctcctgggccacctcttcctggagggccacctgggccacctgggccacccggaccgcctggatcgcaagaatgataaaagtcagcagacagatgagacacgatcaccatatgatacaggtcatcgagaaaataaaagcttacctctgcctcttcctcttcctcctcctggtggacccatcgcaacagaatcaacaaacccgctgtatttgcctgtatatcgaacaaaagggcaaatggaacatgagcacgcatactctgcatgtttccctacggtcttgataggcagacagaagtttcagcagactcaccattcgcatcgcatgtctgtaagattcaagacgaattgcatcagctcaagttaggtcaatcgacagctcatataagcgtatgacgaacccaaatatctaccgctgcattactcataggaagattagtgtcgacgttaaagacctgaagttccaaaaatagaggaacaccctctcgatcctcagagatatccgaacggacgatgtcagctgggatatagtatggtccttcatgggaatccggagtgagggcgatttggtctttggtggaatgagtaggctcgactcttcaaacagcggaacaagaagtatcgcccaatggatgagcagcgtctcacgattagtatcgataactctatacaggcaagctgtatagcaaaagatgatagatgaaatagacaaactgcattgtggtattcagtgtttgagagaaagaggaagagggatatataagaaggtgatgatgagagggctgagacagggataatgtggaaaagaatatcgatcttgagagagcgtctttctcaggcacacactgcggcaaagggcagcatctctcatgggagtagtgttcgtttcttgatagtatcgacaggccgactgcgaagattgtggcattcgtacgtcagccaagtgaatgacattgcgggtgagaggagtacagaagtgaggtagaatgagttgacctaatgaatgctctggtaagtgtgacctagacgatcaaacggacatcgttatcatcccctagataagatgacgatgtaaaatgggatcttgttcccgtccagaagacctctatcctcctttgaatcaaaagctcatctcgaatcgtctcagtcttcatccaactagacgcatccatatagatctacggatctcatcaacaccacagatcagcatggtcgtcatggatggaacacgaaaggggaatagataactgttgtggttttcggttgaaagattacgtcattgggaaagattacgccggcccgatcgattaaccgagttagccgggcaacacctctttccctccgttgaaactccatcccagccgtcgtatctgaacatacacacaccatcatgttcaccacagagaaagagatcagaaggatagctaatttgagaaatatttcgagatccgtcgggaacccttctcagggctcgttgcttcccattattcctccgccctttgttattcctcagatcaagatccctgcacctccacttgtttccgacccgaacctcccagggtattcttctgctctccatatacttcctcttgcatttcctcgcgcatctttgaactcgacactgcggccggataggcttgatccgaggaaaacatggcttccggtggtagataagacagatcggagagaaggattgaaacgaatcaaagaagaagcgcggaccttgagcagagaggtcttttggggtagggaagggcaaggtaggatcaagatcggtcaagaggatcttggcggaacattgaagatggagaccaggagatttgttaaggatgggtggcagagaagggcaggaggcaagaagggtatcacactgatcgtggttcgtgttttgttctatcggaatgaaccccatctaaagaaaacgtttatgactaatgccgaagttcttgattccctaagggtcatgctaatggacttcattaccaagtgagtagacgatcggatacccatattggtcgtcatctatttcaaacactgattggatgtctcatttggccctccaggactggtacctgcctcttgctaaagccctatcatcgcttccatcttcgctcccaattgaagtcgccgaaatctggtttctcaccaacccgctgctcgatccttctgccggctcgtcattcttctggtcagatctaggccgcgacgtactctcattcatcaaccattaccttcctctcgagatctctcttgatgtacctcacgttctccctagaagaaatcagcctgcaaggcgacaaggcgtgttcggcgttggacacagtttttcgggttcgagtttcttaacggccgagttggaggcaggcggaaaggaaggaaaaggaatctgggacggtctgttcttggttgatgccatggtatgctccatcttcttcgactcagcacacaatggaaatctctaagaacttatggatgagaaatctctaaaacagattctgaacccgaacagtaaagtaacccaagatctattagtcgagcacccacccgatcagccgaatagaatcatgactggtgccataggtagacgggatgtttgggactctatgtaggtgtcctttgcctcttccatctctgtcagttctccatgtttcattcagtcagctaattaattgttgtcaaccatgtgaaacctaaaagtgaggaatgcagaacgtcgctctcgacttctccctttttccagcagtttcatcctacccaatttgattcatatctgacccacggtatctgtcccctcaatgagattaccggattgactacatcgaacaaccgggtgacgctcaaacaccctagatggcttgaagcagcgacgttcgccgatgggaattggggattggttgaaccttgggatcgactagagaaattcgggcatagagccgggaaagactgcaagagggtggcctttgtcgatgccggcaaaggcgggatgtacgttctcttttatctaaactgccatatccccctctcttcctctcttttctctcctgattcgttcaaaatgatctcaactgacatcttcttcctccaatatcttcgacctctcgcattgaaagggctggaagtagggctgatagagagctactcgctggcctcttagcagacaaccctttggtccaccagggaagatcccacgtcacatccacagtcatccaagactcgggccatctgattgtacaagaacgacccatcgaacttgcagaagttttgaagaatttcttagtggatgtggcagaggacgaacagatggcccggaagggctttgaagagagactgtcaaagtccgtctctgaattctcatcgatcgaataaaagatgtgtaggatactgacaccgtcaaacattcttgcgttgcgtcctgtctacccaatagattgtgaacaaccagccatgcggatcttcacctcctagatgaatgaccgacgcgagtatttctccctttgatcttctctgtttctgtatttcgagttgtatagaccgccttctgtgatccatgtttaacttatctatgttgcctctcaagagttcacgatcatcaaactgctctctcacttgcttctgaatcgtaagttcgatcgcttgctaggctcagaagaagcgaaatgaacgactgaacaagatgattagaggggtcgagaacataatatctttcgcgtttcacataaactactaccaaacggggagagtgattccgaaacaaaagagagaataaaaagaggatgaggaaggaaagatcaatgaaggaaagaagaacagatttggttttcaaagggaaaaaggaaagagaaggcgagatatagattcggaaagttgaactactctattggggaggagtcatggcgatcgacatcaacaacttgagcgcagtctgataaagaatgaacagaaaggtaggtgttagtcaaaaagttcttcagcaaggggtgcacaagtatctgaaggaactcaccaaagcaggcaagagtccctcggtaggaacattggtgatgatgttcagaagtgatcggtaagcgtcaggcaagttccggttctccatgttggacgcaacagatcggagctttgcgctcaagtcagccgagatttcatcgttgtttaacttgtcgtagaggacatccaacttggcgggtatgcgctgcaactcctgggcgatctgagggttgggggcgggcaaagtctggatatactcgaacaggaactgaatttgctcaaagatgggcaagttgtcgaacggaatgtgacttctgtctccggccgggtgtctcggaggagccggaggggtagctggagcggccggtggtggtggtggcggctttagtggttggttagccgcaggaggaggcgacctaaacccggccggtccattggatggttgactcgctggcgagggagcgtaccggttcgaggaaggcggcgcggcagtcgacgaagcttggccaggtgggggagcatacatggaagacgtttgcgagggaggaggaggtcgagcagcagcttgggcagccatattggaagacggaagtcgaggaggtccggaaggaggcgacattactcgaggaggttcagatgccaaaggagaggacactcgaggaggctgggcttgtcctcgaaggggaggggggccaggccctcgag

SEQ ID NO: 1731 - DNA, 20085 bp, Xanthophyllomyces dendrorhous
gcagcagggggtggagggggtctagccgctgtagtgccagctcgcggaggaggaggcaatccctgtccgggcgtgttaccacgaggtgggggagggaagaagtttcctggttgttgggattgtccaggagacattggaggagcagtcatcgctggcgagttggggaacggcgaggtgatagcattaggcttaggggcagccgatggaggtctgctgagtccggcctcgccagcttttgtaggaggtgcatcgttccacccagagatgtctcgtcgggtggctgcaggaggaagaggtggagtattcgacacagaatccaatcctcttggtggagggggaacagatacagaaccaggttgagaataagctccataagatccagcggccggctgaccgtatcctccggcctgttggccgtatgcttgctgaccataagctcgctgaccgtaggcagacgtggcgggttgtccataggggctactgttattgttaggcactccgtaaggcccagccgagacagtcgcaggagcagaggcagaagccgaaggagcagttgccggcgtatagggctggtaagaaggttgagtggaaacggcagggataggctgaacggcgggggcagcagtgggcgtatactgagaggcgccaaaggcagcgggagagttaggcctcaatagcttcatgggcacggcgccccgagtgaatgcaggagtcgctccgaaagccgaagtggtgaccgggataggtgtggatgagggattggccaagaagcgctgtctagaaatctcagaatccttaccttcgcacttgaaatccgaaggagtcatatccatgtactttgaggccgttttgaccagaccttgggtagcgagcaggtcagcatactcaaagtatcgctcatacagactggcaagtctgtaggtccgagctccagactcggcaaccgcctcggacgtggtaggcgtagccagatccttgtcgacatatccagtggcgctctggaagacggtgaccttctcaataaacgattgaagagcctgggcgtgagcagcgtatcgggaataatctccagtggcagcgatcaccgcctgctcttcctccttcatctcgtcagcccagatggtgacgaccttctccagctttctggcggctaggtagcagagcatagcattctttcgaagagtcttggccttggctgcggtctcttcgatctcactgacagaagaaactcggtactggtgttcaagtcgctgaccgagctgctcggcgaggttgttaaactcatgtgccttggcaaacgtgcaaaggacaacaaagatttcttgccactcggaaagatcggcgttttgaacgacgtcggtcaaatcatccgacacgatcgactggaagagtcgaaggtatgggaggctagtggtctgtcttcggaagtaggtctccctggtcttgtgtaacaaatcttcaccccctcgggcagccaagaggatcgcatcggcgtatcggtcagaagagagacacagtgaaacagcagacttaaaatctccaaggaccaacgctcgggtaataagtctgtcgacttcagattcatccgtggggtaaatcttgaatgtgctaactttgaggctctcggagtggacagaagaagtggcggacccaacggtggcggcagcagactcggtcacgtcgttcacatgaggaatgttgacatgagtcgggagcgcgcttcgaagcgtacccaatgaggagaagatgtcggcggcagcgtccgtttgaggagttccatttcctccatcgtcagtgaatagactagcagcctcgctagcttcggtttccccttccgttttcttagtagcatccgaaagatctccgatgctgaactctgattcggttgcctcggcctgtccggcagaagtcgcagatacctcggatccttcgagtgcagtggcctcgacggcaggctcggtggggctagactcggtaaggtcatgggtactcttaaacttgttgatagcagtagcgacctgctcggcaacctcctcctttgagaagcctaacagagagataagctcttctctagagtttgttgtgaagagagaggaaagggccttccagacttctgaggcgttgccctcggcggcctttgtcctctcctcgcaaagggaaccgagatcctctttggatccggccactacctgaagtcgctccgctcgctcgatgatgtcaggctgagtgaccaatgttcggatgtgaacggatgcactttggttcgctccagtggcggaaggcagattgctagtagaaactaaagctcctccgaatccgaaagaagccgagatagggcgtctaagccacttgggaggacgttgaagagacaatccggtcgatgcaggggagaggaagctagggtcgttgaagagatcgccgctagcagcgggttgcgattctgagggggtatcactctgaacggtctgaagagactcaacgcttatctttccatcgtaagaagcggtggctagaatgtcaggatttcgagggttccaagcggtctggaatacccagttgtcgctcacgggcaactgattgtgaaccaagaaatgatcggttaataaccgccttatgatatgtaacagaaaagtacactcacttctccaagcatctcggaactctgaggattccagaggattgtcctgttgtcctttccagacgaaagtagaagatccggatcttgcttacaccaggagagagacagaattcctttatcatgaccggtaagaatctgaacgagatcaacgaacagatgtgattagggctagatgctaagaaaacgagaagggaacgcagaaatctacgtactcgctcaggaacttcagaattcttcagatcccaaaccatcacaacaggagaagcatcgtcgtctgaagcggtgatgatcgacattggctataaacaaagaaaaggaagtttgaagaagaggttgagaacatgttctgtgagtaggacagggaacgcaggcactgacattctcagggtgccatagcacactgctcatcgcagctctaccacccgtcagagaagctccaaagccgaggccactcattccacctgcagatccagctcctccataagagagcgtccgaatctgcttgcgactccttaaatcccagataatggtgtagcccgaggatagagatgaggcgagaatactttgatgttgggtgttccaagcgagtgaggtgatatctcccggtttgctgggggtagatccgggggtgtaatgagtggaagtggaagaaagtgagttcatatcccaaataaagatctatggtgtgtcgaagagagaagtaaacagggatttgtatggtcagcaccaaacttgaactatgtgttcagtttgtctaggattggcatacctccccatcactagaaccagaagccagtagctgcttctttccatggttgaaatctaatcctcggacaggtcctttgtgtctagtcgcctggaaaacagtagaatccgacaggctgttccaatccggaggcaaaggagacatcgtcggccggcgcgtcgacaacaagagagccagtaaagatgagaacgagatcggagggaacgtacttggaacctcccaaaatctttgcaggatcataaactgatagttctccagtctccatgccggctaccagaagaccatgcgagcggttggcaataggatttccccagacaaggcggttgaatctagagccgacagacgagcgatcgacaacgagtcggagaggaagtcgatcaatataaatgtctagcaatgacagaagaagaaaaagcgggccgagaagagatggcggtagattgggaagatcggaaagatcgtgttcaaaattccgtttctccatccatttgagccaaccaactatacttccaaatcccatctcgctttttttactttctattcacatacgactagccagcttaaagctagtccagtgaataggagaacaagaggggaacctggaaactgacctggagttgaccttgaagctcttgatagatttcaactgatttgtaggcttgatttctgccaaaaagtcatcctcctcgtcttcatcagccccgccggccgtctcttcaccggccatctcatctattccagacttgtccctgtcaccatctctctcttctccatcgatcacgtcgtccgatctctcggccgactttctcgttccatccgggtagatatcccagaactccagaataccctcggacgagaaggactcgtcgagggctccagcggcggtacctgttgcgaggatgggtagggatgaggacgaagttccccaggcgaagatgcccgtcctagggatatcgatgatcttggtcatacggaaacctacgagtggcgagaggaaaagtaaggaggatttagttgtcttccgtagagaaaggagagcgtgggtctgaggaaaggtatgggtatgtggggtgttttttttctcttgttaaagaaggaggggtggaaagtgatgtagaagaaaagagagatgttgagagagagggcggacagcaaggcggcgatgattacataacacggttacatggttacaccaacagcacgcaactaggcacttctatacgttgacatacatgagagcacaggcagaaacattgatagatctaggagaaccacataaagaataataaccaaaagaacaagagagagatcacaacgagtgggaattatatgggaagagactctacgcgtagtgattctgatgaaggacgaaacgagagcacaagaccagatcagaacggtttctagagagcgaagatgattgattcgaacggataagatcactcacattaagtgactcgtaaatcaaaaagattagtgcgctactaggcgccgccctggctacggtgattccacacctgatggaaacaagaacaaatatattgaagaagccccaaagacaaagtatgatcagagtttgtccacatattggtaccttgtgaaaagatatgaacacaccctgcgtagagacctctaagaccacgagccttgtagatttctttagcggtacccatgaaagaaggttggcgtgtgagatcaggtcgaagctcagctgcagtctgtagggcggatttgacagtgtccgcagggaacaggacgacttttgtaacatggagaaatgaacaaataagtcagtccaaaaagtgatacaagtacgaaaaatatggtgttgcaatgtgtcaagaaatgagtacttactgttatatgccattccagctgcacctccggacacacagagctcccaggctttgagatccttcttggtcaccgagcctttgggaaggccctgctgggattctctaagccgcatgaaagctctgctgacaatctcgaaagcagagaaccaggcgctcgacccaccggtctctcggaggagcgtaccggactggccgagccagaacccacggagaccggtctgggcgtaggtttgcttgatgatagtccaagggcctggcaagcgagaaaagtctggcttcttgcctggttgaacagaggacgacgaggagagtagaccttcacgcgagagaagggtaacctgcatcttgactttgataagctcgattggtgttctaaatcgcgcaaacaccagataatagtaaaagaccggagaagaagatgtgagcatgctgtgggtgaatgagaagaaagcacgaacgcatgcgcagcaaacttacaacacgaaactagcgatgaagccagcgcctgccgcggctattgctaattcccctatgcttgctacctccggagcgttggcggatccagtgtctcctttgaaagaagttatcgctttttggatttgattatagacaagaaacagggtcgcattctcaacggaggcgccgactacaggagcacttagaccctggatacacgttcgccaatccatcatgaaacgcgtcagtcattcggagggatcagaacgcgccgaggagagacaaagctgaagatataaagtcgcgcaccctgtagagacctcggattccttctttagaccaggtttgcttaaagcagtccaatgggcctgtatatctaagagaaactcaagaagacagaattatcgcgtcaggctatctggtgcagcatcaactcacgaatcaggatacggccagaagcaagacaaacctaagcgcgctgtccggtggttgagattgtagacgaacctattcggagagaacagaagggaaacgacaaatgtcaaccaaatcagccttctaaatcaaagaagaaagaaaagaatttatcgtgaggagaactcttcttcaagatagacacaccttgcacaaatcgaacgggtgctcaaacacctttgcacaggatccagctacggatccaaaggctagatccttcaactgttgggactgagacccttccgggattgcaacttcagtcatcgaattccgaacagggtccttcagctgttggaacagagtcaaagaagaagcgcgtgtgatagatgaggaaggaagagacagagagagtaaagggaacctaggcgatggatgatgttttttttgttatcaagaccgagtatgaaatcgctcgaaataatacgtattttttttgcaataagatgaacccagccgaccctactgaagtatgttagggttatatggcatagagcgatagcagatagctcaaacggcaaatggttgaatggcagaagagactgccaaaagttaagcgaagaaacgaatgacgtagaggcagttggtgaacatttaggtaaagcgaaagaagcaagaagaagagtgatacaatgatcaagccgtcttggcgctgccagaatcatttatctcttacgttctacaccaactgaggctgtcgcttttctacactgttgaattagagagtccaaagaatttgccagcctattcggccggccaaccaagcccaactgacagactgaccacctagcctgggaggtatactgcctgaatcattgattaacttgcttatcaaccacccagggaccactccatccgacctcggcctggatattgatgttgagctacacagccatatagggcagcgaatgaatgataacacgtggacaattcacgccacaaaatcttgcacagctctctgggctgtgactcgtccaagctggatgactccctcaacgtttctctcattgttcgcttaaatacacaagaactacttctttcacagctcatccttccgaacaagtaccacactcttacatagcatagctcaagaacaaaaatcaagatagaaaaccattccagacatgcccatcaaaggactcacttcgccttatccttcctacccggcccacttcgatatcgaggctatcatcaggcctaatattctctcgctcgaaccatatcgatccgccagagatgactatgatatcggaatccttttggatgctaatgaaaatgcactcggtcactctatccctgttcgtctcctatctttgtaacgcgtacatcctaattcgatagatccgtggctcacaacgaaccgatcgtccgctggccgtcacttttcttcttaccatatgtgttcttacagacagatgacccgacattgacttcgcttccggctggtgcgaatctgaaccgatacccatcacctactcacataccgatcaaggctcgtttggccgagctccgaggactctcctcgaccgatcacgtcttcctcggcgttggttcggacgaagtgatcgacttggtgatgagagtgacgtgtcagcccagacaagacaagattctcacttgcccgccaacgtacggtatgtacaaggtcaccgctcaggtgaacgacgttgaagtcgtcgaagtcccgctcatcaccgatcagggaaagtttgacgtcgatcttgaggcggttagtgatctcttttgtgctcgtttcactttgaccacatcggctcattcttctctgttctcgattcactatcaggtcaacaaagcagtagcttcagatcctaccatcaagctcatcttcctttgttcacccggaaaccctacaggaacacggatccctcttccgaagatcatctcgatcttggagaacccggatttcaagggaatcgtcgtggtcgacgaagcctatattgatttcgccggagaggagaaggaggtgtcggctgttagcttggtggagaagtatggaaacgtgtgtgtcagtcagacgctcagcaaaggccacgggttggccgccattcggttcgtcctctctcctcttctctcctgttcacacacactggatgtaaagatagaatactgacggcacactacgtatgatcatctataccaacgtacgtagacttggaatcgcctattcttccgcgcccatggtccagattctctcaaacacaaaggctccctacagcgtttccaccccgactgcctctctcgcgctctctgctctctctcctcccgccatccagacgttccagtccaagatttctcagttgatcagaaaccgaacgttccttctcgaacagttcaagtcgatccctgcactcggtgccgtcctcggtgcgaaccacgccaactttatccttgtccaggtactcgacggacccaacggaaaagttagcaacacccgagccaaagaggtttatacccggatggcagagcaggagagggttgttgtcagatttagaggaaacgagctagggtgcgaaggatgtctcagggtcaccgtcggatcagacgaagagtgcaaggtattggttcagaggctgactaaggtgctggcttgagaagtgttttacttcttagacaagctcttcatgttgaaaacgtcgaatatatagaatgtttagatgagattcatcttccttagctttcttagcttcagactggttttctttaagcaggcaacaaggtcaacagcagcatcatacaaacatcgaaagatgatggtcaagagaatgatgagaatgggtgttggcttgccatgttgatcgtgtgtcgtgtgcatttacagataagattaatgccatgacgatttgattaaatcgacattcttccatctatccaaacactcacccgtcttcatcgtcatcgtcaccttcaccttcacatatacgtttgcatccacatccacatccacatccacatccacttccacacacacacacacacgaagaaggctgtaactataaacacacatacatacacaattcacaatcaacaagaaaatcaacgcgaatagccaacatcccgaggatgacgatcccccatacgcctttcctcccagcatccgctccctcaaccggtccttcctcatctttcgcctctactacacctacccttgccgaattgaatctgctcaagaacaaagtcataggagatccatcttacaaacttatcgtactcggtcaactgcctatcatccgctcactcaccggactctgtagattaaacgcaagcgggcctggtggtaaggagtcgatagaacagagagaagctaggttggaggccgtagttatcatcggttcattaactcatagtgagtaatcaatcgatattttcaacagatcactcttcgtactgttggttttcggtaaagaaagaacgtgttcctcttacaacgagctgaaccatcttctcccgctgtcctgtgtttacttgcatttcatagccgccccgagtgatttcattcctgccgtctttccttgcgccgatcttgtatccaacctcctaacatctctctcagccataccgtccgacaagctgtttgatgttcggaaactaaaagaggttgaaacagttcttcgtacggtagctggtctaggccgagtcataggagaatactgtggaggagaccgatatggtaccggtgtgaatctggaagttggagaagaggacgagcgttcggaaagaatggatgtcgatggccaattcgaagaggaggaggaagaaggggcagcgatcgagaaggagaaacaaatacgagagcttgtaggcagcaggatagcagagttcttgagcgtaggtctcctcattctctcttcctcttcctcttcattatacacgtgcactgtgctgactgactgactgactgataattacgactacgcccggaaagcctacaaatctatccataatactctcttatgtatttgtgccccaatcgtcatcccaaatgacaccgattcaacgacgtctgtacccactgatcttccaactgcttaccgcactcatccaaacttcgcatcatcgacggactctgaaagaatggtgctcgcttccgcttgaaagacctttcgaacgactcgtaaaagatgacatgcaagtcttgccagacccaaagacggaagaaattcaaagtacaaagtttttcgtcggcgagctatccgaggtattgttaaagacttttaactcagatggatcgaaggcctcaatagagatggatgttaaggtgagttgtctttctcgaggaagctgttctcttgagacgatcgcgcaggtttatcctcagtcttttaccgagattttatgcttactccgattttctcgtcttgtgacttaaaaattaaacaatcacaagacaacggttgctgcattggagctcttgacagctttgcgaaacactgaaaagaatcaagggagtcttgagtatatcgtcgagaaccatcagagcgacactagttagtacacatgtcctcatagcgtttcttggtatcgatttaaagacgtcactcattcaacgtgttgtttcttcgactggggctgatacctgacgtaacagttgacgatactcatccatacttatcaaatgagatagagtctcaactccttcaaagcaaacactgtagtgttcgtttggccagcgcgacattgtatgtggatatcagctccctttcaatacagcactttgattctgttgatttactcaactggtaattatgatctgtctttttcggattatttttggtctgggttgagacagcgcttgtgcggaatcgggtagcacgcctaagagagcggtctttgattgtttcgccaacctcttggagagaggggtaccagaggaggagagagtcaaaacaacatttacgataggtgcgccttcctcgtcatggccgtcctcatttttcaactccattagagctgatgtgtctttcttggccatcactaactatgtacacagccagagtcatccacagcaaacatcatcagctgatggaaaagttggctttggaggcgggtattcttccgaagcttggggttgctctttgtactgattcgggtgacaaacgggaaatccaaaggaaactaatcagtttggatgaactgaaagtagctggaagggtggttgtgagttcagccgaggatgagaaattgaaagccgagtgggagcgattagtaaaggaagatgttggtgggttagagtggaaggtccggttgagagaggtctgtatcgatttcgggcttctttggctttcatgctgtttccgtttctctacaacgcgcacctccaactaatcgtagttctatcgttcatcatatcttcttttctcgtgttagggtgtcttgactgccctcgctgcgctgtcttatcaggaccagactattcgacagcttgttctggatttacctctcctccttccaatactacacacctctctaacacatcctcactcaacaggcattcgttcagccgcgtgcgagcttgtcaaatgcctctctcgatcagtctcggtgctcagatcaagcctcgttgactcagggtttgctattatcctcctagagctactcgaggcagatttggccacggcatctagcgtgaaacctagacgatcgcatgatcggaagtttattggagtcagagcaaatgccctcggaggcttagcgaactttgttctagagttttcgccaatgaaaacggtatgggatttttttgtctgatctatttctaaaaacttgtgttcgtttactcagttctctgctctactctccttgcgattgtctttcctctgcatatcaaatttataggtcctcctagacaaaaatgctttgtcgaccgtcgttttctattgccaaccaaaccaaccgaacgttgttcgcttgcctgctctgcagatcttggtggtgagtttaggaaattatttttctgctcaatcaacagatcaacaagagcgttcttgggctgtatattgagaatataatcacataaataccgaacgataaactagaatatggcttatcgatcaagatgggatgtcaagtccaagatattgcaagctctcgctacaatcgatgtgaagtgagttgctgtctccgtccctctttcatctatgacttctctctagctctccttctcagctcctgtttgctaatctctcccgagtgtttttttctttcctttcactatggtccttaatccaggcaacctacttcaaccattggcgcgttatctgtcgagcccaatgatgctatcatcgtccgatacctagctgttcttcgaaatattgtcagcggtaatccgcatgacaaacggcgacctccgttggtgacgatctatcctttcaaccagcccggtgcgatgagtatcctccgatccatccttgagcgagctttgcgaatatccccttcttgggaaaacagcgatgtgcttattttagcatcgtccgagcaggtttgtctgcgcattctctgttcgatctccatctgcgctcaccgaggcttttatttctgccgttgcctaactaaactgatgagtgatttcttcatcgggtctgaataggcggtaagcgttcttcgaagtatgcttgatgtctgggatgaaaatctcttcgactggatagttcaggatcgagatttggtcgaggcgtgtcgatttgctttagaggttgccataggggtaagtctcgcccatcacacgcggttgacaaggacgaaaattttgatcatccttttccaatggtggttgattgctaactttctctctttccttcgcgcgcttttgttccttcattgttcggtgtcaaaaatgaaataaaacaaaatggaatcttatgatagaaccgggagaaatcggtttcgtcgtctatagtggaattccttcgcaggttgaccacgtcttgcatccgtcacaaacctcaagagtaccgtatgtctgcacccgttcattgtttcgaattgttctttctattcaatcaaagaaaatatcatacaagacttgaatctcaaatccaaaactttttcttcttggaatctgatgttcattcggggtttcaagaggataacttcctcccccaaatgagagaaggggtctttagcaagcatcagattgttgatccaacagtcatgtaacaacgtcactcatcgtatatttaatgacaggttaatgatgaacaaacaatagcgttgtacaatctctggacaaggccaaggttgatatcatgattagacacgaaaggggtcatgaattggagttcaggctacccttcttggtccgcaagtgacaaacctacgctcctttaaacacacgcgtgcatcccaaccttctttatcctgtctcacatagaaaactccttcgttcggctttctattcgccctttgaaaattacccgacgtctgctccaccacctctccctccgccgtatcccctgacgataggacctcgttccgatcgatccatcgacgcggaagtagccagatactttgtgtatagtgaatctacgaatacaggatccgtctgttcgtcagaacatgacccataaatccaaatgctcgaaaaaaggtcagtaaaataaatcgtcattgcgggaatggcttgctatacggacctgaatcagtcttacgacctggttcataaattctgtctttcccaatggagcagacgactgtgcttgaaaatcacccgattcgcgacccttcgaaggaacagatcttccgacaaacgctagcgcgacatctgattgaagcctttgcgagtcgagggtgtatccattcggtacgccagaaggagccggaggagggaaggagcttgtaggagcggcgcgagactgttgtaaagagggctggtttgcaggatgaggaggctgcataacctgaggaggctgaggataggaggatggagggggtacaccatgatggggagcgtacatcaacggttgagaagattgaggaggagcaggtggagccattgacggctgggaatgcactctagccggtgaaaaggtaggagttgtttgagggctgttgcttgccgaggcaaacaatgcttggagtaaatcgttccccttgaggttggttccatttcccggtcgggagggactcgtggggggagggacagatgtccttgatactccgaccgaagggtcagacggcaagggacgtaaaggagaagccggtatttgatgttgatacgaagctaacggtgggtgagggccttggggtattcttgaggtgactacaggagactgagaaacaacaggttgtggcatggcagacgaaatggaaggagatgagagccgattgagaatttcagagaaagaaagagagccattggacgatggagcaggaaccggagctgatgcagggggttgggccgtaggaggtgccacctgtgccggggaaggtagcggtggagagacgggtatacactccttgtctcgtagtctgggttttggagattcagcccaagaagaaagttcagcaactaggagcgagaatcatgctgaggatctttctacgtacgaggtcatgaggtccagcagttttttgccttcagcttcatcatggacccaaataccagataccttggctgaggagaatacagatgaggaaacataatcacaacggttaaggctctgtgacataaagtcgtagaccaagaaagcggagacaaaagaagatgaaactgaccatcagccccttgtgagccttgctcattgatcatcagaacttttccctgaatgtcaaactcagtgttttgggtgataggtctgacaaagttgtttggtccgtatctgttcaggataatgagccctaacggagggtttgaggatctatgagagagcagagagagcgaaccatcagtctcactaaagttggttgatgcatgaggtcaaaaaaagaaggaaggaaactcagccggaccttcgatagatgaacatagaaccctctataccctccttcttccacgaatcgtcgtggtaatgatacagaacaacatacgtcgctgaatcaatgatagaagagatagacgtgtcatgcctctgaaggaccttaaggttgagaggatgagctgccatcttcgagaaagaaaagccagtcgatgatggtgatgataacggtgatggttagcggttggagcgtcactgaatttctctgttccatccatctcccatcacacccttcgaatccttaataaccatcgccaccatggcatcctcatcatcttcgatagcacagaagacgtttgagttagttaatgatatcaagccgcttgatccatctgacgagatattcttgtatgattctgaagagcagaaagcgatcgatcgagctgctccttggaagcaagagtgagcgcttcctctttctctcattgtgttctcaatgagatataaccatgtttcctcaagacatcatggcatgtaatctccttcgtcgatgtatgctgatctctcgatgtctgactctctccttcaagtcccaattattttacagaggtacgcctcaatgacctctcttgccgtcacaggcgccaatagaacagaactcactcagacagtgacgtccactggtttctacattcaggttcgaatctcggccatcgctctgataaagatggtatgcgtccgaaatcttgatctctctactctttatgtttgtatggccatgtctgatatgctttctattgattcacaaggtcatccacgcgcggtcaggaggaatatatgagatcatgggtctcatgcagggtaaagtggtcggtcggacgttctgcattatggacacctttgcccttcccgttcagggtacagaaaccagagtgaatgctcaagcggaagccgatggatacatggttgaccatctgagtggaagcaaacaggttggagttttcaagccatcaccgaatcatggctgttttgtgctcacagacaacttgtgtttatcgtgtcgtctggattgcgataggtcgatcggccggagaacgttgtcggctgtaagttttcctatcatcttggcgcaagattagttcatcttacagattgatataaccttctatctcccttttgatttctctttcactttcctggatacttgaatcaacagggtaccactgtgagcatatatgcatcttgctctgcctatgaaatcgaaaccccactgacggctggactatcccttctcagctcaccctggatatggttgctggctgtccgggatcgacgtctcaacacaatttactaatcaacaataccaagatccttggctagctgttgttgtgagtgctcgatacttggagctcatcgtttaatgcagtatggggtttgattctgatgagtctcacgatgtattcgatgtctcagattgatccgaatcggactatctctgctgggaaggttgacatcggcgctttcagaacataccctgaggtgagtgctctgctatgataggtaaaggaattttcttcacaatctcagtatcaattttgacctgtcgatactcttgtgtttccatcatttacacactcttgaagggctacaaatcctcgtcgtcatcgtcagcctatcaatccgtcccattggacaagatcgaagactttggagtacatgcaaacgaatattacccgttaaaagtgtcttacttcaagagttcgctagataccaagctactcgatcttttatgggagaaatactgggtaaaaacattgagcaacagcccacttgtgacggtaagtgttggggtttctcttggtgctatcatcactctgtgttcggaagtgactgacctttggaatgtccgctggttatttcctatcaagggtcgagcgttccatgtcgaacaattgggtgacttggcggccaaattagatcaagcgaagtcatctctacagactgcgagccggccttcaatcatccctccggccggcaaacaaggaaagagcgcatcgaccggcaggactcaacttcgagaggaggaggagaaaacggctttaggaaaagcggtgaaggacaggtgcgtatcccgcccgtcggtgccatatattctagtattaactttactttgatgttggttggtttattcgcggacccaagtacgaggctggcgatggagactcagcatgcactgatggctcaagttctcaaagatcagcgtaagtcgcacgttgtcttgccattcggattgatatccaccagtctgatcctaatcatctctgtgttcacatcttcttcttcacatagtattcaacgctcctcgtatgacccaggatagctcgactgcttgaagagaaggctgatctagaatcttttggctgggatcgagacttgaatctacctggattatatatgtattacagctgtgacattggtatttgcttgtgtgtctttgagtcggatgtggacatgtgtggcggagacgggagatagggtgactaaccgaaacactcttagggcgctctccgtttcttcttctccattctatccattctattacgaacgacctctgtctatttgaaagtcagttgatgagcactgctaccactcgttccttcctcttgcgaacgagagcctgacctgttatctgtatctctataagtcacgattctccgaaagaaaaaaaagaagaactctttttgaacaatgtcttttggccgaccaggaaacttggtggatagcttcaacgtgagccctccggagaaggggtcttttccgctcgatcatgatcgttcgttttgtttcatcctgtttggtactgttcttctttgtatgatctgatatcctgacgtgtgagatcctcttactttgtgtgtcatgcttctctttcatttcgacttgatatcttcgtctggtctggatcggtccggtatggggtgatttatgcccgatgaacgaaatcggtatctccagatgattgctctccggtaatgaaaatgtacctggcatgtctgaaacagaaccagatgaagaacgagaaatgtagggtgttgagtaagcagtacctccaatgtcgattcgatcagtaagtctattgttctttatatattggtcgattgtggaggacggtgatgtctcatggatgtccgcctgatgtgaatcctcgtccataatttagtggcttgatggagaaacaagattggccgtctcttgggttccctgaggaccctacgacgatgacacgttctcctacgtcaaccgcccaacacatcgatccgtcctcctcttctacctcttcatcgacaccgacaaactctctaccgactccagctcgtgggacgtcgggctctcctcttgaattttcgagtcctccgatacctgactctcttcgtggacctggtgagttgttggatgcgggtatgggaacaggtgcaggcccggttggcgtgttaggtggtcaacatggggcgggaggtcaataatctcaatatagtttcttttgaggatcaataaaaacgatgtgacaacctgtgtgtacgagagcatgctcgtaacgtatcaaatattgtctttcgccctctgtctgaggttgtgtcgtggcttggcaaagatcaggcaggcaggaaaccattcgtcaagtggtcattgtatagaaaggacaaagggatagacaaaaatcaaatgtaaaaaggggggttgcgggagtgggatgaaaaagacactaggaatacaacaaagggcctctatcgatcacaccagctcgaaagggagaagaaaaatcaaaccaaaccgaaccaacaaaagacatatattaagagaggaaagaaaaggagaagaaaaggagagcacgtttaagctcgctctcctcggagtcgtcgagcaagctggagatccttgggctggatagtgactcgcttggcgtgaatggcggccaaattggtgtcctcaaagagagagacgaggtaagcctcggaggcctcctggagggccatgacggcggaggactggaatcggagatcagtcttgaagtcctgggcgatctctcgaacgagtcgctggaaggggagctttcggatgaggagctcggtcgacttctggtatcgtcggatctctcgaagagcgaccgttccgggtctggagagaagcatcgcaagggcatgtcagtctgaggttactctgagcaaagagccaaagatcaaaagactaacctgtatctgtgaggcttcttgacacctccagcagcgggagcggtctttcgggcagccttggtagcgagctgctttcggggagcctttcctccggtagactttcgggcggtttgcttagttcgggccattgtgttctgaggttgatggatgtaggttggtgaggtgaagatagtgtttgagggaaggtacgctggtttgttgatgattggtgaaaggaagaagagaaagaggtggtcaacgggcactcgactctttatggtcagcctcattcttgttcatctttggtcagtttttttttctcttctccgtcaaacatgcgctgacgttgacgacgaaggaaagagaaggaataaaataatggtgataaaatgatgaataaatttgttttatttcgacgcgacgcgacgcgatggattcacgcgtcagacgcgtcaaactagggaaatgcagctgaagactagacattgaactatgagaaattctaatgaattatccaaagacaaaaggccgcgtggcagaatttctaaaacgcgtccattgacgcgtctccggacgcgaatattctcgacgcgtttccatgacgcgctcagctcacgtgcacgcgtcaagagaccctggggcacgaaaaactgtttaaaaccagagatcgattcttcgtcttctttcttctttttccccatccctcaacttatgccttcaaagccaaccatcccttaac

SEQ ID NO: 1732 - DNA, 30187 bp, Xanthophyllomyces dendrorhous
ccccacccaacccccaaactaataacaagcaaacatgtcgggacgaggaaaaggaggaaaggtttgtacatttacgcgtctctctccctctctttcttcgtcatcactttcctttgatcctgacacgcgtctctttcttcatcaatctctttatagggactcggaaagggaggagccaagcgacaccgaaagattcttcgagataacatccagggtattactaagcctgccatccgacgacttgcgcgacgaggtggagtcaagcgaatttccggtctcatctacgaggagacccgaggtgtcctcaagttgttccttgagagtgagtttctttatacatctttcgatctttcccgtttgatccatctattaatcgcggctgtatcttttttcctgttctcttccacccagacgtcatccgagactctgtcacctacaccgagcactcgaagcgaaagaccgtgacggctctcgatgtcgtctacgctctcaagcgacagggccgaacgctctacggtttcggaaactagaggaggagatcattcctttctctcctttctgtccccgcctttgtcttggtctactctactacgtcgtccacggacggtcgcccgcagccttaccatcctttgattttctctcgacttccgtttttccctctctttcggctggaattcttagttgattctctgaaaccttgaattcggggtttcttcatatatatgtgtctattgttgtacattgttcataatcagatatttgaaacaaacaaacaaacaaacaaaattatcagcaaaaagaaacaaagaacgccaagtaatcgcattgcaaaaagacaagcaagatgagagaaattgagaatgaaaccacccctgttgcgcgcaaatgtcagttgttcaaaggagaaaaaaaaagacatgctcaatcatacaaatcatttttctgtaactgtcttgaatctccgaggggataggcttagcgaagagaacctgatgggaaagttctctctttgtctccttcgccaatgggtggtctgtccatcaaacgggatacgttcactcgtctttgacgaagcaaagaaggagagggagagagaaaagcttcccctgcgtgcaaagatcagatgtttgaagaggaaagcttatccagatccagatgcagaggtagaagatagagagacaaataacgttccatcatagaagcatgtcaacgatcggtcagaaagtggacgtatatacagctagagtgagagatacagagattcaaatgggatttgatgaagacaaaatccaccatggtgtgtgcgttggagtttaagaacagatccgagaaaagacagtcaggatccaggagaaccctgggcttgacaaatgattggcgagttgcgttttaaggagagaaaagaccgttccaggcaagtgcagggcaaggcgagacgcaaagagagatccttggatgtacgcggatgtgataaagattataaatacagaatcgttgaatgaatacagcatagcatgaaaggagggacagttctttagatggtggtctcagtgttgaggagaacagcatcgatgacgtgagcgacctgtggaagagcaatccagcgggtgtcagtaaacatgcgcgcactattcatcttctgttctcgatatgctactcactccgttctggatgatcacatcagcctgaacgatcttcgcggtaaagttgccgctagtgacgaacgtgtcgtttccggaggaagagaacgtgaatgactctccggcaaacgagtttgcggtgagcgagaggttggccgcaatatcggtcgagtagatgacacttccagaaatgaactgtgaagggtaaagtaccagagcatgaagaatcagcaagtgggagggaaagatggaaaccggtggacaagggcatgaagaagagtaaaggtaagaggaacgaacatggttctggaggacggtgacggcagtcgaagtgttaacagaagcgatgatactggacacgttggagacagcagcgtcattaggcaagaagatggtcaactgaaagtcgaggaaaataaaaggtatcaggatttggtcagattcaacatgcgtgtctgtacgaaagaagcaaatagaagggggaagacggcacgtacaccctcgatggcttccaaaggagcgacgataccgaccgaggtcgccaacgtggtcagctcgggagtggcgttggcggcaaactgggaaagagaaaggggcagattgaggacctcgtcgaggccgatgatgtggatgtctccaaagtcggaggccactctggaggtgatgttcttgagaggagcagcgacctcgagtcctccggtatcgttcgagaagagaacgagagcctgggtgctatgaggagagaaaaaaagaacatttccgatgttagaagacaaatcgcgcaaaacggggatgagaatctagtagagagagagagagagagacgaacaggttggaaccaagtcgagcgtaagatccggtgagcaaagtctttgcgatggtgtgtccaggagcggcagcggcaactcgctcggcggtgtagtagccctcaaggatgtggtactcgaggacctcttgaagctcggtggtctgtgaggagaactaggtgtcagtctatgttcatgtgatagaattcggcaagacacacaacagatggagacgaacgttgctcgagatgttggcgggcactccaacgaactaggcaagatacataatcgatcgatcggccggtgagcatcaagtaggaaacctttcttcctcgatgaaagaagccaagacactcacagctccgttggtgggcgccaagagggtcaagtttccactggcctggagagcggagagaataccttcggtgaaactgtatgttgcagccgtccgagagcgatcagccacgtgatcaaggggtgaactgcgggaaggacgtatctccttctccgtgcaggatcgaggggaaccaaggggaacagagagaaagacttacttcgtgttgttctctgcgacggcgacgatcgagaggacgagcgagtagtactcttcggcccacaatgtgttgaggctgtgcgattcgtcaatcgatgtttgaatccaaaagtcagcaagggccaaatcaaagagaaagtgatccagagaaccaagagccaaaagagaaagagaaggacacacagagcggagacggtgtcggttccgttggtgaacacggtggcgttgatctgtgcagagacgagcgatccggcaaagaagacgagcggggcgatgtattttgagagcatcatgttgttgagtgttgtactgggagagtttcgattaaaatgtaagcgagaagggagtttcaaggggtttattgtcttcaaccaaagtaaggttcgataggcgcgagggactgaatggaatcaggaaaggaaggagaaggagaagaagggatcagatccttgatcgatggaactggatgagtaggtttatatacagtagaccaaagagaaagagagagaggaaccgaacagaaagtttaaagccgcatgacgctatcgagagtgatgcaaccagaacgaagcgcaaggaggaggaggaggaagaggatgtgtgcgatgtatggtgtgttcctctactgtgcgcgatatctctctctctctccacaccggatgtctgggcggcgaacggggaggacgatccagtccgttaccgttgtcgtcatcagccagcattggcagcactgatgatagcagcatcggcagcacaccacctccaccttgatcaacatcatcaccgcccgggcatcatcgggaaggttaattcggacaatgattttcttttctcttctcttctcttcttctctcttctctcctatccttccttcgctttagtcttcgtgatgccaagaaatgacgcgacatagaatagactccttgtttcctacagtctggcttccaccgattccaaacccagctgagactcagcccaagcctggcttgaagaacaagacgaggctgagcgcgagatagaatcgagtggtgggatcaacacctgtaagaatagctgcaatgacactcgtagtgacaatgatagaatcagcgtattccaggaacagccacagccaggtggagcagagggaggcgaacagggcggttggagtggagtgacgtcatcgatcgagtaggccgtcagcctttctcgagttacatccgaccgttgatatcattatggttatcactataagcaatttttcgggcgatccttctcttttcgattcctctcgagactttttttttgcatcctattcgtcttctttctcttagtctttgatccccggcctctatacctggggcatgatcaatcaatggaaacgttttcattcactcggcacgatttcaaaggagaatagaaagagggcaaagaaaagaactaggcgcgaacgtatcatcgggatccacaagtcttggatcttttcgttcggcagctctgcttggcagaatgactcatccatccatgcgctcaatcattcgctcacactaagggttattggaaacaaaggttcatccatcgatcgagacaaacacccgttgtacacacaaaaaaaaattgacttttcttccatccttcctccttctttcgctcttcatccatctttctcatccataatcacacacatacacaaaagaaaattgaaaagagagatatgaaaagaagatacttaagagctaaacacaatcatttctcaactctccatctcttttttgattccatccgcccgcttaatcccatccgggagctcctccggcagcagcctcaccggccggtgcaggtgatccagcccggtcgatagggctccttgatcgtcgcctatcgtcgtagacagcccgggggcttccaccggcagcaggagcggcctcaacagcctccgcagatcgctctcttcgtcgaacgggcgatcggtcatcccggtctcgtcgaggagcgggtgatcgatcatcccgctctcgatcccgtcgaggagcaggcgatcggtcgtcccggtcccggtctcgtcgaggggatcgatcccgtcggtagtcgtcccgtcggtcatctcgtcggtcgtctcgtctgtaatctcggtctcggtctcggtcgtcccgccggtagtagtcgtcccgtcgagaggaccggtagtcatccctattcgcacaccaatcagatcgttagttcagtaaaagatagtgatgaaacaagaaggaatgagaagagagacaaaccggtcgtcatgtcgtcggtaaggcctggcaagagaaaaagaaacacacaagaaatccctcgtcagccacctctgattttctcacagaagagaacacgagaacgtaacgaaccggtcgtctcgcctgtcccgatcatctcgtcgggagtatccttcgtcacctcggccaccagctccgaaccggtcggcctaagagagaaacagagacaaagagaattgtgtttaatgttcggttctcaacgagaactcttgtagaaatagagaaggaagaagaagaaacaaacgtcggtaccgacctcgactcgagcagagatagggtttcctctaagagtacgacagaaaaccaagtaagcgggtagctcacagccacgccccagaaaaatggatagagacaaaccggatggtaagaccctccaactttcggacagcctcctcagcatcggccacagtcgggtactcgatcacactagaaacaacaaatccggccaggcagacacgagtcatacagcgcatacattgcttcgtcagttatagttctcatatctcatttctgaaaagagaacaatgagacatacccctgaccctcgttgtctcggtcgatatcagcataagacacatctccaccttcccgaccaaagtccttgagatcctgttgaacgggaaatgaagcagtccacagaggaagcggtcataccaaaccggccgaccgaaggagagaacaagtcaggatgccgtccgggtatgtttctctttcaagatcagttatcgcatcgatggtcaagagataggaagaggagcattggaaagaggccgcatgccgtacgccaaaagtgggaaatccagtgggcgaaaagggaaggagccatgccttgaaccaaagtcgacaaggatcgctgaccaacgccgtcctgacccatggaatgaacaaaggagaaacagagcgccgaacaaggtaggaaacgaaatgactccgctcccggacaagatacatcaaaaccgaccgaatcgcccgttttagtttccccgttcgttctccctacatcccagtcttttgtttttctttcagaaaatcgctaccgtccgcaatgaaccatagggctgatcaagagatggacggcctccggtgtcataaaatggaagggaagcgagaccagtccaggacaggagcaaatacgcatgtaacctcatgtaggatgtatgttggaatagaagatcacgtcctgatgactagcaccgaacgaacggcgtcaatgaaggaaggagagaaggaagaccgcacctgccagctgacgtctctggtcaatcccttgacgatgactcgtcctcgaccacctcggggaggtcctcggggaccaccgaaaggtcctcctcggggaggtccaccaaagtctcctcggccactgttgagaacagaaaagtgaagtgagcgaagtatagatggataacatctgtaagagctatagagacaaacccagcgaaaccttctcgtcgtcgggaatccttggcgggctgaagggagatactattggaaaccacagagcaagaatgccatgtaagaagacggtattcctagtgttctaaaacacaacaaccaagcttacggctctccactgggtgttgcggacgagatcggttgaaaagaaagaggaacagaagaaaattaacacgcgtccagcagagaaaacaatgtatcaaaaaaatgagaacctaccagagatctcggccgttcaactcatcgatggcagcctcggcatcctacgaccgaacaatatccatcgaatcccaaagagacgtccaaagcagtacgttgagtatcatcttttggtaaagaaatcactccccctatcctcttctttcgcctctcattctcggctgaaactatcaactgaccctaaggctgtcaaactcgataaaaccgaaaccgttcaagactcggatgtcaataacgggtccggactttgagaaaaactcttcgacatctcgtcgagtagcacctggataagatgacagatcggagcaatggattgatacggttgattcaagagaaaaaaaggaaagagaagaagagaaggaagcaaagaataaagcatcagagaccgattgagaaacgaagcgacttttgacaaattttgatattcttccagcacttttaggtagccgaaagaaacaaacaaataaagccacgacatactggtagaaagtcgtccgatgtagagtcgcttggaagacatgtttgattttgttaaaagaaagaaagcccaaaagagatgagagagagagaaaaaagagaaggtggacagactgaaaagactcgctggaggtggcgggggagaggaaatggcgcgtaaccaatcaatgccgatgcgtaacctcaaccctaaccgacacgccctacgagattttcgttttgtcttctctacttcctcttccagcacccgttccatccttctttctatcctctctgtatccttctttcttgcttttcagtttgtaaagagcggtctttcttgttcagaagatagacaccgtccagaaagcaaaaatggcaaaaaagacaaagtcgacagagtcggccccttcaaccgctcccatcccttcgtcctcgtcgtctaccactacatccaagccttccaagaagcaggccgttctcaagatcaaagactttactgttctccctatccattacactactccttcctcgtccgcaccaaccactcattatctctacatcagatctgatgcttcgacatcgacatcgtcagctggacagatcgaagaaccccggacattgttcgtcgccaacttgcctcctgactcgacggaggataacctccgaacattttttggaaattgcggtccggtagaaaacgtcaagcttggaggacagcgaaaaaagtcgggacaggagggatcagatatggaggacaacagtgatgatgacagtgaagatgatgatatgagtgaggacgaggatatggctgcagtggaggaggacgaggctccccgacctgtactcaagagaaataagaagaaggacgcacacaagaaacgaggaccacccaagatttctccactgtacgctgaggacgagactccactcctaaagctcaaccgaacgtctcagtctgccaaggttctctatctttctccgctctctctcgccagagcgctcttgctacctaccgctggacctctctctttccctccaaagtcgaatcaaccggaaaccgaccaaccggttggtctctcccggtacatcacttcttacgctttgtccagaccttctctcgccaagatcaaagcacacgcagactcgagtatcgcccactttgaatacctcaagaagcaggaggtcgacagagtcaccaggatgggagaggatatcgtggacgaggacggctttacccttgttgtgcgaggtggaaagtatggaagaaacttggccggtggcggtgtcggagttgccagtcgggactgggagagaaataaggaggagatcgagggaaagaagaagaagagtaaagagctcaaggacttctataggtatatctcttcttggttcgagttcttcatatgaaaggccaacgactgacaaattttctgctccttttatgatactatttcctcttttttaaaccaaccaggtggcaggtacgagaagcaaagcgagaagacctcgcccagctccgaagcaagttcgaagctgataaggagaaaatcgaaaaactcaaaggatctcgaaggtttaagccttactagaagaagacaacaacaacaatcaagaaagagttcgaaacgactgatgggattgcatgttctcgttcttctcttctttcgggatgcgtgctcgattttctgagatgttgaataataagcacataggactggctatcagagcaaactacggcataagaaaacactctatcgagcatctttgcttgcatgctacaacatcagagtctttgttggacagatttttgcctatacatatcggattatcataaatttatacattctatataaacagggcaatgatgagaactcgatcaagataatagagggcatcagactggagtctctgactcgttcttaaggcacccaggtagtcaaaaaagagccgctgagccttcagatcatcgctcttctctcaagagtgcgcgtacgagacgttctcctatcctctttttgacttttccttcgacggtgattgcgcttcgaaaagtcttgtcgaagataataaaaatacataatagccaagagtggtctacgctagcatgccgccttgccacatctatccaaagcgcgttttagattgaaattcaggatatcagactggtccatagcgtgcatcggagagagaaacttacaagcttttcgaaatcgtccagggataacacagatttgtcaggagcagaggagaacgacgcgatcatctctttgacctgcgcctggttccaaccctctttcaataccctagccgcttcccagacttccttgaagccgatcgccttggagctcttctggtcgtccgtaaagaacatactccacgcctccttggctcgcctcttttcgtcctttgtgagatcaatatctccgatcatatcttcatccaacaacatcctcttcgtcttcctcccttttagtttcccgactggcttcgctcccttggctagcttggcagatttcttgttggatgctccagactcagagtatgcagtttcgtcatcgtcaccgtcttcagatgagggtagcgaaggtacaggagaagcaacggcagccgatcgcgtattccggcgagttcttcgtcgattcgggttgaagatatcatcttcgtcctcaccctgttcagtcaaacgagatttgggagaagcaataaaccctccagcttgatctgggtcgtcttccatccattcatcatcctcgtcatcttcttcgtctcctccgacttcatcctcctcctcctcttcttcgtcctgctgatcctctgagttatcgtcattttcaccttcttcctctctggaggccaacaagatagcgcacacactgaaccaatcccttctgctgactcctttttcctcatgcactcttcttctacttcccccacctcctcccaaacgagaggctgctcctgccgtgttcaggtccgtatcatccgaccaaccttcggctgattgtttgaagaattcgaggacttccatatcggatggcggaaggtttgccagcttcagagctcgagggattagagacagaggaatatgtgtttttgctgatcgaggtctcgattcgtctgttgaactcggcgtggatatatcggcctggttagactccaccacctcgatatcgggatcaggcaagaaaccacctccattttggtcctcatcgtccatcagaaatcctcctcccgcatcgtcctcttcctcgtctactatgaatcctccaccctcttctccatcatcatccatgacaaaccctcctctctcgtcatcgtcctccgtgacgaatcctcctcctgcttccacctctggcatggcagtaatatcttcaggctctatggattctgtctttcgtttcttcttagatggtttttttgtgaccggcaaaggatcaccagcatgatcgaacgcgtacgacagaagggctcggttggcagaagttagatcggcaaattctgcagaatccagaaaggattcatccccgggctgaatttaaagaacagagtgtctagctcagatcataaacacgagcacacatattgacaagaactgaacgaaccatgttatccaggccctctctatagatgtctaaaggaagcaagagttctttaaggccacaagaatcgctgatggtggtccagaagagaatgcatgtgtccgggaatgagtgatcgacgcgcgttgatgatgacgaaactcttgaacacgcgtttcattccacgtctagcccatcctcttgccaaccagatgaagcgtcatctacgatgcaactccaaaatatcctatgtactccgtgtccgttgtatcgctcccttctctactctctctttctgtgtattgagtaggaggctgaggtcatatctgtctgatggccggggttgccgctgactaagcggtttcacatgtgtaaccctaacatacccttcatctctccattcctctccctttctctgggatcactcaccatctttgtttcgtctacttctcccctcttgaccacttgtagcatacccaaatcgtgagtacgaatttcatgactatgtcggattaatagtttctaatttgttaattcgttcttcagccagaaatctctttcagcggatcctgtgacacttgaactgatccaataagcacgctcgtgcttttctcctctttctcatctactcaggattcttacgccttctctcctttcaagccaagagaaataaccatctctgctcatcttgtactagtgattcggtctcagctcgttaaaaccatcctcgtagaatgcccttcttcccaaatcatacttcgtcctcatcaaatggaaccgttcaaactgggtttgaagccgatctgttgacattggcagctcgacagtatgtatccttatcctcattcttcaccagctgtcaggacgtgatcaagaagcaacaggtttatttcgtctgacgacaaactcgttttatagccagaatcatttcacacctctagctagggcagaacttcaaaagtatctgtacacaacactctgggcctcggagtcgacacggttcctagatggacctgcacctaccacggcagaagaatggtcaggattcaatctgacgagggcgcaacgattatctaggtctaagggaagaaacaagaaggacacgaaaggcaaaggaagagagattgagttcgaagaggaacgagacaagagaagaaaacaaagaggaagcaaagagtcggtaaaagacgatccggctagtaggttggatgctagatgtgggaaagcttttgagaagggcgaggtcatctaccgctgcaggtgagatatttctatcgcttctgatccaagacgcatcattctaatcatcaatccggtttcttttgcagagactgcaactttcatgatcacttggcgctcatgtgttcggcatgctaccgcgaatcatcccatcaagatcatactatcaccctcaaggtagcatctagcctaggagagttctgtaacgctggtgatccatccatgtggctccgtccagtcccatcttctcttctctctccttcagccgtctcgtcttcctattcttcatcctcatccgccatctcttctacagaagcccctcatacatcccaggaacacatctctgaatttatcaactctgtttttgattacatccttaccacgttggatgtttctccggaagaaaccacgctacctacctcagaggcagatctaacgagacaagaaagactcgaaggggttaagtggttcgagaacgcctgggcggttgtcttatggaacgacgaaaaacatacaagagttgatgtagctgttcaattgggggatgctattgggtggacagaggaggaagggctagaatgcgcagagagagtacacacagaggtctgtcagatttatttcgtcttgccttgtcctgctctgaggcatcagaggatcctgttgaaaatctgactatccatactccctctatttctgtatcgacagggacgagaagtcatcgagatttcttcgagcgttcctcgacttttgcatattgctcataccctcgctcaaatcgatctaggcgtgacacttcgatcagcgcacgatactttccgagaatgtatctcggcttacctcctttccttcctcttggacctctcaacatgctcgctagaaggaagcgattctgttctgagggaaaccatgctttgcagtttgatgtcctctcgacttcctgtcagagacagaggggatttccgagaccgagcaggcttaagtcggatcggtggggtagaaatcagttggaacgaaatgaaaagggtggattgggccatggtctatcattcgaaatggtggaagaaaccgagagtcgagtggggtctcttaatgaaccgactgatgttggttggagatcaagctagattggatatcggttcgtcggtcacctctctcatgcattctgttgtacatctacaaaagactgatacgggtttcggcattattctgtgaaatgtaacagctagtcgatatgctctcgtatttcctaggttgatcgagctgtaccttttcacagatcgggaaagcgaaaactccatgacctccgtcgcgtcaaagattttccccatcccctcagttgcttcctacttagtctcccactccaacattcttcctgtgtatctccaacttttacgatcttactatactggtcaatttgcttttaagcgaattactttccctcctggccccgccgcccgtgtcgagcccgaatccgagcccttccgtctaaagaaatcatctcctctgttttctcacctgagagatctcatttcatcctccggagttaaagcatatatcgcccagcacgcggactcaaatgaaggaatgcttagtctaggcgaaattttcaccggaatgaactctcaggtccgagctgcagagaggcacgtcgagtacgaaacggaaggatggaccaaggcgttccaagtgacaggtgaattaggccgactggctcgagcatggggcgaaggttacgcccatagttctacccaggatctgatgagcgcaatttcggctatcggaatgaggttaggaaaaattctgaacatggagataggaacgctcgatcccggaaagtaccagccgccttcgtttcatacggttcggtttggagtggattcagggactgagatcaaagaatgggaggtcgttcagtatcaggtcgagtctcagtatgtgagctttcataacccgcttcactgggtgctagctggcttgttaaagcatccggggaagcttgaaggagtcggaagtgatgcgttgatcagagcattaggcggcttagagaactctacggacgtggacgagaagaacgctagacagagggcattagtgttgttagattttcctttgcgaagttcgttccttccatttgttcatgtttcgttttgattgacccgtactgaatgatctatcatcgggctttttcacctggcctttcttagtcgttgttttcattgcccagcttcgaaactctctctgggtgagaaacggccagagcatgcgccagcaacaacatcactaccgagaacataccgctttaggtgttcgggaaggatcttgggacaacgatatgttcctacttcaagtgttcctctccctgcttgagcctgacttagtactagctactttcttggatcgattctctttgaccgagtggtttcaaggccgagtggaccaccctgtgtatccgttcccatctgcagggatggtagaagagttcctctcagtcctgattgtttgtcttagcgagcccgccacgattggagcttggtcgaccgaacgttacgtccgaagggaggtcatccatgcgctcgtgctcggcccatcgacttattctgacttatcaaaacgattgccagaacgagtgaccgagtcacacttccttcatccactattgcttgagctagcgtcatttaagcctccagagtcggctaccgatttcggattgtatgagctcaaagacgcatgtttcgaggaagtcgatccattgttccatcacttttccagaaatcagaagcaggaggtcgaggcgattttggagaaaagattcaaaaagtccaaaccgaagggagagtaccttcatatacccaaaccgatggaacctctacagaaccgatacgcttctctcttgcaaacgtacaaatcgaatttccttccgcagattgtcttcttcacgctatccaatcttattcctttacatcaacaagccgacaaggagggcactgttgaaggaaaagctcgagaatcccaggaatccgtcttggagcttgctttacacctagccatgctctgtcttcagcatgagttacttttgtttgcaaaggcggcggtcgaggtagagtatcttccagggcagacgcttgtccggattctttgctcaatcgaagatgaatatctctttaaatcgctgaaggctagggtggcttggtgtctagacactatcaagaagcatttcccatctcaagtggaacagtggcgagtggttccacccccggttgtcaagaagacaggtcaaggcgccggagctgggcgaaagcaaaaggcagccgccagacaggctgcgatcatgcagcagttctcggccgatcagaaggcatttttggatgcccatgaggatgagaatgacagcatggaagaggacgagacggacgaagaggacatcatctatggaagttgtatggtctgccaggagaactgtacggcgttcgcagcctgtggttctttggcgctcatccagccctcaaaactcattcgacacattccactgaacagtcagccttggctcgaagaggttcttaattcaccatcttctctcgatcgaaatatcgacctcagcgaccacggagcgtcatcttccttaactggtgcatatccaatcaacaatttcaagtttggtctccatacatctacctgcgggcatcttatgcacacggagtgcttcgatagctatatcaaaaccactgaaaaccgtcatcatgcccaagcggccaggaatcaccctgagaatgtagcccgaagagaattcaattgtccgctgtgcaagagtctcgggaatgtgctccttccgatgcagaacccttatgatcgaccttccaaacctatcaagagtgacgatcttcctttgagagattggttacggctgatcaacaccgaagcactcagagacataaccgacacctcgatgatgttccaacaccgaacggatacaggcgagctaccacctctttttgctgatgcaacatgtgtgattgctcttcctttggaggaacggtctcctcttcttgatgcggcgcacaagatgctcctggatcttcaggctgttgctcgaccaatctctcagcaatcagtacacctccgtcttcgaggacaacctgaatctctacgacaggatcgcccggccgttgggatgtatcttcctgacgagctcgttgctcatatgattgccggactcgaaatcacctaccgaggacaagaatcctctgggcagactgtcgcagacagcttgaataatgcgaattgtcaactagtcaaatgtcttcttggttctctacgactcgcgacatactcgaacctgggtggaaagcctggcctcgtcagcgcacgatacggattatttgctcgactccttccagactggtatagggatgccaatgctacaacccctattctctgtcgagatcccttgggtgtagtcgtggagggtgcagcaatagcatacgaatatcttcaaccgatcctcattctggcctattacgccgagctttgccgaggagtcattggaattcttcatctgatccgaagcttcccaaatcgatcgcctagtcaatggctcaacgtagtcgacagcgatgcctctcatgcagtcgaagtattcggaaatatccggcagctcttcctcggaatggcttcacattccaggatccttcagtttgaagtaaccgaatacctagctagtgttcctgatcacgtcttggcccgtcttctgtacgcgttcactctgcccttcgttcgtcgagtatctatcgtacacaaggtggtcaagatgaaccaaccttcctctagcttgattccttctccactggcaaaaatggatccttcaacttctgaatacgttcgactcatggctcatcttcgtattcctcttcccgtggtttcgttatcccctcctaccactgagcctcctgtcgcttctaatgcggccatcgtggactgcgtttcgtcatatttgaaacagttctcggcgttctatggacctcgatcccaatcatcacttatccgtcttgaatatcctgctatctatcagatggctcgtattcccaacagcctggagggagtctttgagatgtatgggcctagagaatgcgcgaactgtaaaacggccccgaatgctatggcggtgtgcttactctgtggagaaggtgtctgcgtggggtcaagttgctgccgggagaatctctggggaggcgcggaaggattaggagagtgtaatattcatatgaggaagtaagttccttctcagatcgttgattctagtcatgattgttgaacgaactagctgacatctcgacctttcacttcaagatgcaacgctcctataggtattttcttggatcttcgaaaatggcagatcctttggctctgggccggcagtggctcatggggacctaacatcttcttagacactcatggggttagtcctcagttaaattagcgttaccctcttgttcacaactgatcaccaacgtgctttctgtgaggcttttcaggagttggatcaatcaatgaaacgaggcttccctcaatctatccatcctcctcgactcgacgaggttagaaagatctggcttacccacggcgttcccagttttgttgcaaggaagatggaagctctgttgtgagtttgtcatctacactaaatctttgttcgtctaagttgtatcagccttcttactttcttttcactttgatctgttctttcttcttcaagggatggcggaggatgggggcatttctgagagaccgaaacgattctgacgattctgcggacaatggatagagattattcactgttaccgtaccactctgtatttacccccaaaatattatctttatcgtctgcagccttgaggatgcatgctcatttatttaaacattgccgccaacttcgagtccagctcgtcaggcgaaatacgtatatctgttcagagtatacactgtagatcagcaagaagttttgaagatgtgaagagatcgagacaagacagaatttttctttacgcacacttggttcctaaacttccatcatgcttggcgactgcggtcttgtaagccttaccaaccaaggtcttgacctcatctctcatccgagctttcatatcacccgctcttcctagatgattcgtcaagtgaacttgttcttgtcgatcgagaaggtcccagaatttgacaaactggtctttgacggcctgacgaccggcattaccactattggaggatgaggaactggcttggagtaaaggagacgtgagttcattccacggatcgagatatgttgctttataattttacggttggtgagattatttgagagaggaagaaaagtatgatacgtttagcgatatgtctaaacataatagattgagaaacaaagaagagtaaagcagaccttttgcattcttaaaagctttgtttaatagctcgtctccattctcgcccaagagatcgctgaaatttgaagatgaatgaagcactaggttgtctctcacgaaagacactatattcccatcgacatgaggacgattcatttgagcatgtcgttatttcccgtagcccacagaatcgatgaggaatgacaaggaggacgagtggggactaactgttgttcatcagaaatatcccccctacaccacgtcggagcgctttggctctttgatctagactgttgaccaaggcggcggtgacatcatctaaaggacaaagccagtcagatacgcgcaccaaaaaatcagcttgtcatcgtgaaagaatcaaaaagaagatcagagtcacgaaaagaactcaaaggacgaacagatgaagtgcgcgatcagtccatcatcgtcgcctacaggaacattggccatacttgcacccatcaaccacttacgatccccgatcgtgtttaagaatgtttcaatgaccgactggtagcttggcagatttaataaaaaggacacaatctgttctcaacaatacaaaaagagtacataagacgaggataaggtcctgtttcaacagcaaatgtgcgattaggtaaagattgttgcctcacgctagttgtgaccgaagagaccgacacggattgaaactcgccaggtttcaccacgaaagatacctgtccaaaaaaaaagaacaaaacgaaatggaacaaaagggttcagatgatgattcagctatggatgttctggttcgttaaagttctctttccgacacagatctagcaagtgataaagaaaagctgacctttgcactctcgactgcctctggaattgatctcaaacagatacccttcaatccagcctgcataaagccagagagttctccttgatttttcaaaccagcgctctcaaagaaatcatcccatctattgcttagcttactcagttcgtcccatagtgtgtacgccttccaaggagcggactccttctttagcagagtgagcaatgacgcaagtacaccggatgaaaagtatgtcaacgaaggagtcagtatcgtttgaagtgttgatgagatatacgccgatgaatccgggactagggagcagaggagggcatgttccgatttggccaacgcaagcaaggtctcgcccagtttcccacctgtttcgtcagactcggatggttgcgtacctccttcgtcggctgccgaggcagcgataagcactcggcgaccgaggccttccagatgcttcttcatccaactccccctggtttcgccccacccccggaatgactcgtccaggtaggtcttggcttgagtcagagcgagcggagaggagaccaggtaagtggccaggttggaggatgagagcgtgccactggtagacaggatggataacggccgaggaggatctgaaaaaaaggaaacaaagagggtaagtatcctgttcgctaggacacaacgagaagatgaatctcaccttgaagaaaggcgtcgatgtctaaagagatatttgttccatcctgaatctgttgcgtcaaaatcgtacacagtttcttgaatgcgacttcggccagtttgacctgttgacggtatgccgaaagaagattgaagatgaggctcttgttgcgcatgcacgtaagattacggaacgatcacctacgttctccttcaaagctccctgcccacctctcagcccactactttttagatccgagatatgctccatcacccggtcgaatgtggccaaatagggtcctaggttggaagggtttggcctggagacatgccaatttaccaacggtatcgttagaggttaagatcaaccggcgcagaacggcaacagagcaaacacgtactgagccatcagcgcggtctcatcactctgggtcttttcttggttgactcggacagtagctagtgcggccagggtagcatcgatatctgccatgcatcaaacatggagtcgtttgttgttcaaaaggcaatatgaatgtagtgttctagtcagccatgcaagggtaaactaagcaactgaggctttgaaacctcgagggacgagagaaaggtagatgctgacttgctcctaatcgcgttagcgactgtgtcgagttgtgaacaggtgaaagcgtcttctctagtcggataagcctcgagtcgaaatgagccaggatacctaaggagagcgtgagctgatgcatgtcagttctcgaccaggataggaagcatcagctgaaacacggacctgccatgcgagatgaaagctgatgtgtctttttcaagttctggtcaagctgttgaataaggaatccgatgggaacatcagttcctcggtcgcagggaaagggatatcgatcatagcagactaaccagctctatctgagcagctgattccgataggtcggccatgatggcttctagagcaccaggtgagatggagtatgggaacggaatggatcgatggagatgtgaaccaaaacacccgcgacgatttcatcagcttcgtttccaacctctcgcccgaccaccatcatcatcatcgtcgttgtcatcatcaagaagcttacacgtttgctcttgctcctgtcctaatcctattcttgtgttgtatgtgttaaactttcctatttattcactttggatgctcatgctcttataccttgcttgcaagtgaagtatttgaggaaggaaaaactttactgaaacgaatccacgcgttcttaaagaaagaaaagctttttctctcagttcatcacttccttcatcttcaatggacgacgaagacgaaaacctcgtcgactggggctacgatgatgacgaagaagtcaaaggaacaccgtcttctcatggtcacccggcttcggataatgcagacgggttcgatgcattggtcggggaggatactacttcgcagccttccaaagggcctagtctattgagcagaataagtggcaacatccagcctgtcttttccccaacctccaagaaaagtgttcagaatggtatgcttgcttctttgtctgtctgaataccacggcgtgggtttagttaacgtgatagctacttcatccgcctctacggggatttccttagaaacacaaaatgctagtaactctgttcgcagctcgcccaactctggtcgacccaccacccatcgacaatccaatgaccctactactggagattctgaaaaggcctctctcatcgaagcagctccctcccagtctgctccttccacttcttatcccgcttcatctgatcccttctcgaccaccgatcaacgctcttcgagcggacacgaagaattgccacctaagatatcttcaaaccggcaatcgaccgctgactctgttcgtttgaaaaactctagaccggtagacagtcacgtccctgatgccttttccacacagcgtcgaccaccaccaccacctctgccgaggtctcagcattcggctgatgaggcaaccgagacagagacgacccgtccatcgacggttaccaaagaaggacctctttccctagacgggttgtctgccgagtgggagattcgtacatcccgaacttcacagggcgcaaagtattattttaacaagcgaacaaaacagagcagctgggagcgtccagagggtaccacagcgactgggtcgaacgctgatctaaacgagagagatagacatggctcgaacaagtctgatcctaccagatcagaccgtgccgacactgggcctgacagaagacgctcaggcgattgggacagaaatgctgccagctcgcgtctaacgaactatggttcaagaagcgaggatgacaggcgcagaaatcgggcggaaggatgggatctagaaagaaatcgacacgcaggtagagagggccgatcggatattagcatgaacgagcgaagagatagacaggccgctatcgagacggcttacaaacgtccttcgggtctctcttcaagatcagcatccaactcgtttcaagaagcgcacgattggtcgacccctggttctcggaacggccagtctccatcaaatcatcggcgctcttcacctgcgccgggtgctgctgcttctggagaaagacctccatcggaaaggacatcccagccaacgggagatagatctttggatctttaccgggacaaatctcggggtacgttcctgacttggtgctctcctttatcgttctcttaagcgttcttttcctctccctcctcctccatgtgtgaacgagcgtccaccggtcaaccactgcatcaaccagactggacggcgtacgatccggggtttccttgcgatgcgacaagatctgctggctaggctttccgctaaatttcacagtagagacgtgggcaggcaaaagttggatgagactcgcatcgcaagaaccccttttgatcgcgtgggaagaagagaggggaaagtactggacggaagattcaagacctcaacccggacgcttgttcgactcccaatctcgagggagaggagagagaggaaaaaactgaagacaagagattcatgatcggatataaatttcgctcacacccactcttgttccttctcttctcttgtttggaccgtgcactgggggatggaaattgcgcatctacttcagataaacctccttttccttctactgccaccactgacgaacggtccaacacacttcctgcccgaggtgaacccattccgagccgtgacccggtgtccggttctgagaagagaccacagcctgtcgttccatcgggtccgagaaacataacattggacgggccggttggcggggaaccctatggtcgtcggagagcaccacctgttgctggtgtcaacgcggtttctgcccagggttcgacgatgagaaagtggggcccagctgccagcagtgttgatgagagaaaacagaccaccgagacggctgatgtttcggctagagagaatgatgacaagaggagggaggaggatgaagcggagagggaaaggacgagagagagagaaagacagaggcaaagggaaagtgacgaaaagaagaggctagaggaggagaggaagagagagaaaaacatagcgaggtcgagggacaagccacgagaagtggtaccggcgccctctccagcgtatgacccaacagccccttttgaactgtccgaggaggagaaagcgttgatcttggccaaacgtcagagggtcggttgtcttctcgtttctctccttcttaactcatgtctttgttctcatcctaacgatatgatctctcttgtttcgatctgtttctgtgttttgtcattccaactgataggcagcacaagaggaacatgctagagtgattcaaaaacgggatgaccaccttccggatggcgttcaaaagaccggtgaacaggccacgagggatgcttattctcgtcggcgtcaaccaccagagacgaccgtaagttccgctaccttacgttttgcatttacagaaagatttattcaatcaagggttttttttttggtcaacatcactaacatcctgatcaaacaatttaatgggatcgaacaggtgacatcttcatatggtcacgagcaaacctcgactccagtccgtcctacccgagacggagcagtcagggtgatcagttctgttgccaactcgactggagcacggccaaacatggggccgtcaatcgacctggtcgatctgacgtctccgtctcctccacgggctgttgatgtggaaagtgcggtgccttcaaaacgtggacacgacgctttggagccgccgcagtcgtccacgcagtcgagagagaagaatgggaacgaggacggagacggggataaggttaaggacagggtggaagagcctcggacaaatcgggcaagacatcaaggtatcggaccggatgacgtgaacgatggtcaatcaaggcctgtcgtcccaggttggggaccaggaagtaggagagttggaaggggaggtatacccgagcgtccgcctccgtacggattacccaggggcggtggccgtggtggtttcggtaggggaggaagaggagatgcctggtctggcgctcgttctagatgatggaggaaggcgagcaagaggagactccaaacaaaggataagaaggagggacaaggactcgcgtctttatcgtgctggcatgtctgtgtgtattgtttcaatgcgtatcgccatgtccgatgggtttaactttcacacgataaataagattgatcagggtttaaagccaaagctttttctctcctcgtgaaaacaagaaacgtggtagttattaagtttacacgtgtttttatcttggttcaatcttcctattccttcttgttggttctctttccagtcaacgtttagactgttccttctgtcgaatcgatgctttgcacgagtttattttgattcatgttctgacccgtatcgatggcatgtccttgtttagttcatttattaatgaacagcaaacaagaaagcggcaggcaggattgaggatcacagaatgatgaataagaaagatatcgtagaaatactgtaaacaaaagtttttaaaaggtctcccttcccttctcacttcatcctcttgatcgtctacgggcgagactggttatcaaagatagatagaacaaataagagtttactcaagcgtcgacgcttccgtcgctccattagttcactaattcaatcgatcggcagtggatctttgagtgaacaacgaacgtcaaacatctgaaaaaggccgggtgttgtactgcggatgcaatagccagttatattatcccgcggcatgacgtccgtggcgtccatatgcttgtgtttctaatctggatacaatccgcagcgaccagggctaaactataagcatcagggcaggcgatcaaccatcagttaacgttcagatcccatgtgcctggctcgttccagaacgtgactgacacggagaatttcccacgccagccgagcatctttcgagtcttcttgttctctcctctttttctttctcttcttcttctcctctcctttcgcttccatacagaactgatacacccttgttgatttcgctgaccatcgataatacaactgccgacctactgacaccccacatacactgacacacagactgactctatgcttacagagacattcattaaaagtttctccactgtttagccgggtttgacactgattcagtttgaggagcaagagtgtttttctttctcctctgtctttcgtcttgctccttccgttttctctcttcgtctccattcttcgttctcttttttctttgtctcactcactcactcaccctcttccatttccttcttctccccgtccgatcttccctaattacactcctcctggtgaggaagaagatcaaggaaaaaaaaagtttcgaactttactcagtccagcccctcttcccaacccttcgttcttcatctcaaacactacagttcacctggcgtggctgttgtaagcggtatctcacatccccagaatcgtcgtcgccttctcctactctctctctcttgtaccattggtttgactttctctctcggtcaaatcgaccacagccttttgtctatctgtacccacgagagcttcccacgagagcttcccactcagcttcttcacgctcgtttcccccttgttcattttaatattaattctattcctcccccttccttactcattccctcttcagattactctatatcgcctcccctacatcttctctcttatccacttctttcacaactgaccttgtctctcaccgaccaaaacaatttatccattcaatcaaggtttgtcctcgtttcacaacgctcgctcaaaagagagtgatatccctttctttcggaagcttgctcgtccacgttttagggaagcagaaaagtccgccccacatgtcaacggttgattgatgggcgtgtttattgaccgtagtttctcctctgtaaacactcttaggttcagccaatttatcgtcttacccatttagacaagaaagtttaaatcgatttcttccattgtcttccccttatattacccattctcctcctcctcctcctccttcttcttctgcgtcgtcgtcgctgtcgtcttccctttcgcattcgatcactctcgcttcttccgagtagctctattcaattcgttcccattctatttgccctcgggtttctcgtccccctatcctatttcactctctatcgttgttctaacttcttatccatcgttttctcttcatccatccatccatccatttacccatccgttccttcatacatctctacacttcactttcttgttcgcctttcttgactacttggcagcttgcctcttcgtctccaggaattctatctagcaatgtcatcgatattccccccaaactacacgctttccagatcatccacaacgaccactgacagtcacttccctggcggaacagacatgtcctcaccttcctcttccgtgttctcgaccccttgctccagctcctcctccctcagcactttggtcgatccagttccgaacgtcggtagaccaagcgtgtttgactactttgcaccgaaagtaaccttgatgaacgataagcaggacagtctcggccttcatgctaaatttctcagacgaaataaatccgatcgttcaaggagctcggaagagccggccatgctcacgcctactccaacgaccccgactgagcaggtcacactcggtgtaagaaaagaacggagctttacgtcccctcttgccggcaggaaatcaaaggtcgcccttcaagagtcccaccaccactcatcctcatccttaccacaagtgaccactccggaaaaagtcccttcacagctgacccagccggaaataccgacgccggtcccgagccagagcaggaggagatggtcgatttcaccttcctccccactatacaacaccgtctaccaacaagcaccgccctcatccgaaccgtccggccaagcaacatcgacgacaaagccctccaacccgtcggttagacgactctccctcgatcttagatcgtcctccgcccctgacatcaacaagcatacgcttgggtcaagtccgttgccgagtccgtcgttgagcatcaatgggaatcaggctggtcatttcaagatgtccaagtcttcagctggtggtgccagacgaagaattgcgcaggataccgatgagagtgcttacgcgagtttcgagagttgtatcaatggttcgtcttactcgttttgaatttctgaactgatacatatgaatcttcctttactcaacataacgtcttcctcctcactctaggtgcattggcccatgagaagaaggcaaagagttacggggatgctgtcgagtcgagcgcaaaggtatgtccatgccaagttcatcgttctgttctgtcctgtgctaaacattgtttcctcaaaactacgataaaaaggccttccatcactttacccgagcaaacgatctgttgactctagctctggatcagagaccagacgacttcgaggctctcatttacaagtgtgtccgctcttcattcatcctttctgaccagtttgtcctgcggaacgaagccactcaccatccactttctttggaaaaaaatcagggcgtccttgatccacatcatgtcttcgcgattctaccttgcgtccgaatctttaatggctcttcagtcgatccttgccaagctccgctcggcattgtctgatccaatcaccgagaaggtcgtgcccccgagtctctatattgccgcacagttccaaaaggcccggtgcgtgtacctcttggcgacgctgagtcaggagattcatctcagcttggtccctcgatcgacctggacgggcgaatgcggagaacttgccagagaggccgtcgtactctggcaaggagttatcgacaatcaactggccgtcatccgacagtcggcccagctgagcaatcaaccacagacccaaagcttacaacctgaatcagatccagtcgatcctctcgagccggatgccggggttagagaacgaagaagaggatcgattgcgaacaagcggttcgagttggaccaactgtttgaatcttatatagagctctaccaagctgccaagttctgcgccggactcaccaccgatgtgttcaactcggataggtttttcgatatcgccgaacgagcgctggaacttgctctcatcctgttgaacccgataaagacatccaacatcctctccgtcgtctctagattctcattctcgtccgcacatctcctgacgactcctccgtcaccgacgtcaccaatatcgagaggaacggacttctcgttctcggttcaaccggagctgctcacctcggccagagcgtccgtcctgctcaaactaggcccgcttaagatggacaggttcggacacacactcttagtctgcccgcaaatcccgttcaaccaaaaccaggtgacatgcattttgtccatcatggagggcctggccactcaattagccgatgtatacactaattcgagctcgtcctattcttgcactaccaatgactcctccgctaccctggagagtagatcctctccgttatattcatcgatcgcaaacaactctacccccacccgggcggaagcaaagcacttcaccactctcgcctacacaaacctggccgacgctcagttcctaacggctcatctgtcgaaacgagcttggaagaaaaaggcgttgacggccgcttcgaaagccggtagcaggagaggatcggctgcctcgttggccacctcgccctctcacatcccgggtgatctggcggcgagaagacgatcgtctgccaatatggttggatatgaagatcctgtcggggcctctaccgccgccgccgccgccgctgctgctgctgccgttgtcgttgagggcgacaagcaccggacgattgaagaggttgaggagattgaggaggatgctgggtcccgttcaaagttgactcctcaaagtcctctttcccaaaatcgaccaacctcatgcataagttctggtgaagatagatcgtctttctatcctaaccatcagctccacctccctcagcttgccacacagtcaccaaggaatacgttgtccatgtcgatgacccagtacaggagaacctccatggcttctatcgtctccgccagttcctcattctcgaccggttgggatggaggaatgtgtaccccgccgttactgggtctgtcgatatcgccttcggatcatccgatcgtccccctaaccgtacagacggccgagtgggtcaaactcctcgctttaccagagtcaacttcaccttcatacctatcggccaatgctttatccacatctcccacgtacagcatcgcctcggctttgtccgctacaccggcgcctgctggcccgagtttagctcagttggcgtgggatcacctcacgggttcgatccagaactacaagttggcactatcacttacaaagccgtcctcctcctcctcctc

SEQ ID NO: 1733 - DNA, 1301 bp, Xanthophyllomyces dendrorhous
tcctcctcctcctcatcatcatccttggccggagcgacgcccacagcgctctctcttcatcgagccaggatatttctttcgatctcaaaaacggcttactttcaagcgacgttggcacccagagtggcagcagcgagagaaggcaaagtcgccctgctggtcaccgctgaagtttatgccacctgggcagcgaaagaggtcggctgggattggatcaccgaaggaaaatccagacctcatgggttcttgtccacaccaatccaaggaaacgtctttgtcagtcaacacgccgctatcggtcagaacgctatctttaccttgcttcggaccagtgagtcttttttccgtctttttttccttttcttctcttctctctccaagtctgctgttcttgtctccttttctaacgatctcatctctctttcactcatatagtttggcacaaagcggtcacaacagcttctgccgatctgtcaagagaggaaaaggctcacgcgaaagaacgagtcgagcggatcattctctgcctccgttcggaactcggtatcggttcgtacgacctcacccgattcaaagtcggggtcgagcggttcgaaggtgatttcgaacaggtcgaaagtctctactggtccggcgtctcgaggacgttgaaggagtccggatgctcttcgagttctagttcaaacccttcgtcgacgaggatgtcgaaggatagggacagagatcaaaccggaccgagcaggtccagtatggacttggtcggtagtcggtctagtctttctcatgctccctctcatgttgctcgtcttcgagtatagatagcgtaccatgtctcctctctcttctcatcttctcattcttttggctctttttgttcttcttcacccttttcacataccttgggcgtggggtttggtcatttcgtatgtaaactttttctttcattctatcacactatacatcataaattatgttttttttccctcgatttctttatatgtctcttcccttccttgttttaacatgtttagatatcctgaccaagtctcaagactctaattctccccccactttgttttgcaccctacactgttccttctttatgtatatcaaacttaggatctgatttttcagattgatcaaatgtcaacacaatcacttgtctatcctcgccgtcgtgttcacattgtgaccgtggtttcttcctctgagagacatctacaatatatcaattcgatcctatctgtctcctataggtgtcttttgagtctcttctggaataaaaagggggggggggggtg

SEQ ID NO: 1734 - DNA, 54343 bp, Xanthophyllomyces dendrorhous
ggggggggggggtggtggagacaagagacaactatcagacggttagagatagatacaacaggaggccactcaggatacgagatgagcgacagaaaggcagatcatcgagttccgaacacgttttcatcttagagagcggctagtcgagcttggacagatttcatttcaggaacggcctcttgcgctccgtggctctctacgcacattcctgctgcctataagaccgccagtcggaccgtaatcattgtgatgtcagatgtattcatgcttgaaaaaggaagagagagagagagagagagaaggtacgtgtaagagggaaagacgatagaaagacggtatagactaacctgggtggcgactctcatcacatctctcattccttgttgatcgctctcggactttccttcacccaacaatctcatcagcccaccgacgaggaacccagcaaaacaatcgcctgcgcctgtggtatctctggtctcgccttgtaacttcgaagctggcgtgtagatcaaaccgtatcgaccactaggtccagaaggagagagaagagcgaacgagccggcagagcccagagtgaggacgatagaaggtgaagtcgtcttgtgtgatccggcgggtggttgaagggacttatgtcgagccagttgaaggagtgtgggaaggaaggtctcgtatttctcgggcgcagcttccccaatcgtctcgattgattctttcagatgttttatatctgctgatggagaagaagaatccgaagaggaagagaggtctttgaggagatcctccatctcgccttcgttaacgatcagccatcctagtttccaccatgggaatgaagcaatctcttccgaggaaagcataggcgacgggttgaagatcgcggacgtcccttcggatgaagaggatgtaggaggacagagagagaggtaatggagggtttgagggagaggaatttcgttttgaagcaacaaatgacttggtcgaggagaaaactcggaaggaagtgggagctcggcatggttcgctccttggtagaggactgttgagtaagaagggaagcacccggatgcccagatgaacatagtcaactctagatgatcttgggagggaacgttcaccaatgatacgtactgatacaattctctccttctccatcaagctgaatcaccgcccttcctgtcacaccatccttttggacaacgacaccatctacatcgaccccgtaggattctaaaaggtcctttgcccagattccatctgcaccgacagctccgatcaaacgaacgggtcctccggcagatcgagcaacagcacatgcttggttcgctccttttccaccggcccgacgagagagagaggttgaagaaattgtctctccaggtcgaacaatatgagggagatgaaagaattcatcgacatctgtgtgagtgataagtcgtaggacatggcaggttaaaatagaaaatagaagactagttgagaattgagtcgagaggaggaaaaatacgcagagtggtcagtgcgaagaagggaatctgacgaactgatagatcctcgaacgagacaaagaggttcagcaggcatagttctaatacgtgtcgtttgcttttccttaagaagagagaagaatgaaaggttgggctgatgggtgatgggttcaaagatgaaagaagatagaaggctagaaaatgaaatcgtgttcttttcctctaccggcccgactccgccggataaagacaatgatcatctggcaagcgtacaagcatatcacagaaacaaatagaagcataacatatatccaaaatgacaaccaacatccgtcgggaggcagatgctctctcatagaggcagcgccaagggtttcattatttcggagcattcacatgtccacactttttgcacgttcttctttcctcatccgacatccatgcctttatattcgtcgtttcgttcatttgcaagttcgaagcattttagttagtggtgtttcgatactgccgaaaatgcggcagtggtgtccagtaagaattgacagagatatagactgacctcgataacaggttttaactggctacccaagttcgtcacgtggaaagactccttgtagacaatgaacggtccttcggggtgagcctccaagttctgacagtaccactgtagagaatctataagaggtggtagcaattaaagatccaaatgaatatgtctttagttagttatcttcttcctgcataagttggacacctcaaacacattgcaatacataacgatagggacttgccaatagattctttgggcctgacccgctcaacgacgagtccgatagtgtctgcaaatcgacaggggttgtgcggagtgtttcctacagggtcaattgaaatgaaagaaatcttggtcaacatctgacatgtccctctgaggaagatactgtgaagcggacaggggaatcaacgatcatcgaacaaacctggcaacatgaacatttctccctcgtcaattcgaatatccttaaactctccgtcgtcgacgactttaagaatcatgtggcctttgtattgatagaaccattcctgcggtgtaacgtatttgtgcaaaagtgaaaatgtagagagttcggtataagtatatgactcatcgtgtgtctccaatggaacatcgacgaacctctgtctcgttgaagtggtctggatgtatgtacggaacgatggggttgacgattctcagctaggttcctatgatttctctttctctccataagcaactcctatcctgctctctctcgataggagcactcgggcaaaggcgcctagatgaagcatactgacaatcctttctggtgttcggtccaccaacaaccatgacgatatgatcctggccgtcgtacaggcaaaagttacccaccggtggcttgagcttgtgcgagttttcttccagccacttggggaaattgatcggtttgctaagcgtcattactgagacctctgtagagagaaaagagagaagaatggcgagctaatggatgaaaggatggtggtgttgatgatgatgatgatgatgatgagtaacaaaatcgagtcaatccgatctttgggtttcggttactaaccggatccttccatcatctttgggagtcttctcggcccgagcagccatcctccatcatctgccgccatcatcatcatcatcgtcattgattgctgagacctttacggtcaataggaggatggacaagacattgaagacctatgtagagctcaccgaatccctccgtttgactctttcttcccttctttctccttcattgcctctttcgattctccccccgaagctagagaccagactctcagaagcactcgaatctccttcgtctctggacccagcggtagataagccgcaaggaattgagcatgggttaataagagagctgggatactggtgtgttcttaccgaggcaaatgatggaggccgtgaaaaagtagaactggctggtctaggtttgtcctctctttcgaccttcgggccgtcttcttctttcctcttttactgatcgaagcggaggtgcatcgttggattcttacgcagatccttcaagatatcatccacatactttgctctcattgactcagacactccttccaccaaacatcactcggccacccgctccatcgacatcgccctttagtctcccgtcaccctacctaccatccgccaccacgtcatcttcattgacatcaccaaccggagaaaacgtagagaagtcgttcgctcaagaagtaagatcaggggtaggaaaagaagtgacagcagtgttgaacgtgttgttctcctccggaggtgtagcaggtggagtttggtggttgggaacaggaagcgcaggttggagtctcaataaggtttgttctggcccccttttgatgtctgatgaccgtccatgcttacttcttctaccctccctcatcatcactctatgtcgaccagacagtcctcctcacttttctgtccttcatattcatagcggccgtcgaaacgaccctctacgttattcacttccagaaagcttccagtagaaagaagagggacgcagctgcgttggctagatgggagaagactggtctgacgatgggcgttcccatggttcgaaggactctagatggtgagaccgagaccgagaccgagaccgagaatggggaaggagtgcaattgatagaagacagtcggagggaagaagacgacgttcttcggaatagaaagcttagccgtaaaaaagcatcctgaatataaaagatacccttgatagagctttttttcttgcactcttcagtaaatcagattgtcggaatatcattcacaatgttagagatgaaacagttcgattacataagaagatccatacaacttgaagaaaaagaggagaaagatggttgaagagtaggtattgatggagaatgcaggaaagataacggaatgtatgtgcatgagatggtcaaggagacaagcagagaagaatatacaactaggactcgacgtcgcatcctggagttggatgttgagtacaatatagataacgggaagcggacaagaaggccaactaaacagatagactcgtggtcgtttgttagtcctccagagggtagaccgaacctgtcgctctagcctcactgtcgaatagggtattcaacaccgccgccaatcggactgatcgtataaggagaaaaaaaatctgtcagctcatatcgctttcttgcctaagcgtaccagtccggcaagcacgcagggaaagaggagacaagaacgtacgaccacctcgagccagctgcttctcgactacccaatctgctttcaatcggccatagtactcgggggtgtttagctcctccaaagtctgcaggttcatcggccagacatacttgcaattgatactagagtcgacaacaaaattttagaccatcataacacacacacttttgcgtctcaagaaagatgaagtaaagagttgaacgaacgggtgagactctttagcccactcccaagggcaaacaggaagcgagttgtcccgctcatatttatcaggataggcgcctatccctgggtcagacactgatagctgggtaaagaatgaagcaaccttggagggagtgaacatgaatagactcaggtttcggatgagcttctcagaaaaagacgtcgagacatcatagggcacggaggaggcatattgggtacattcagcccaagtgagggactcgtttcgccagattcctcgaatccctttgaaactcaatagattgattagaaacgttacaaactcgagacaagagagaaagagagaaagaagaagaaaaagagtaccttcagtgattatgaatcggatataagggtcgtagatctttccgcgcaatgctttctctattcgttttctgtaagaggaatattggcaacgctttggtcagtcccgataaagattcgataaggaagagtgaaatcatgaacgaacgaaggcaagggagtggtgtagttgccaagttctcggatggatttttgaatcagcagaccatcccacacactatggaggctgttatcagagacatgagaacatggccaagtcagtcctaaggttcagtaacaaaaatgggatttgaggagaaacttactttgatcgtcggccttcaaacttgacgatttctgtcgaggtttaaggatccaaagcggatagtaagaaagaccgttgcgtgtgtaaacagaaatatatatttttaaccagatcagaggatgcacgaacgttgattgccacctcgttgttttcctgccagatgaagaggctgatgaagatcacccagaaaatggacgaggaatctcaagggaatatctctgggtttatcccagacgttaagatgtcaataacatgactaggatcaatttgatgaaggctcctagctaggtatgttgaatagagatgaacgaacccttcgccttcctttaccctccaggtgtaatttcccaccccagccaacaaatttcgatccttatcgacccaaccatgttccccaaaggaacatccatcaggccctccaggatcatctccgattgcgttgacataatgtaagccagatgtcctttggtcgttacgggaatgattatatcaggtccacaatcttcaaattcagagtagaaaagacaccgtagacagaaactcactctcggtgagcccatcgaatcgaatctgcccaagcagcaatgggagctagatgtccgtctgagtagtctggaagaatctgggcgatagcgctcagggcctgaggagtaagatgagcctgtgcgatggtcgctgtgatttcgtgacctgtgtggagatggagagcaagatgtcagttctcgtttccctcggtctgaccaagataaatgaaaggctttaccgatagcagaccaagcagacactggttgagagagagcaatagctagaggaacgattgagatgagcgatggaagcatgttgagaagatagatgggtgtatggtgagatgggtcgttgtctcatcttgagatatcctggtagcggtcgagataacaacattctgcttagtcatcctgggattgcccacccagagatcatcaacatctggaacgtttgtctgtagatatcgagcagagaccatcgaaagagcaaacggtctctttgagaggctcatgtattcgttattgccttgcagctaggactgacaattcttgggggatggatacactaacacaaacagagcgcactctgagatggacgagtatgcgcgcgattgactatgctcacctcattttagcgttctatagcttcatggtatcattaatggtctcagatcgaggtggatgggtaatatctccttctcttttttatcctctcgcttatgatagagtgcgctgtcgagtcattcgttatcgattcattcgctttactgaactatcttgacaaacaagtcttgaatcaggtattgactagatcgatctcatcagaacttagtggcggtcttcggtagctctgagtcaccttacttctgactcttcgttcttgtatataaacaaacctagacttctttaccgatgctctcagctatcaaagatatgaacattggacttctgtacatgtttcgtgcgttcacctggtaggctgatggtctcgatgtctcgtgcatggtcttctcctgatacacgatgacttcgttctatctgaactgcactcacagtcttgtatttatgacgaacagccgacccttcggtcgaaagccatctggttttagccacagcggcttttgctggccttacccttaagcgagtcatcatacaatgcggcgaagaaaaagaggagaagtacctcaagaaggtccgtttccgtatcatggaagagtcatacagttctgatcagatcaacgcttgagacactagtctaagcaaataggatcgccggtttactgacatctaattcgatccggtcattatttctgccgttgtcgctatcgctgccattgttatcatactatttgttctttgctcagtttccctcgggcaaagttccagcgtttgaacaggatgggttcttccttacaggcggcacaactatcgcttactaccgtatgcctctcttgtctcaataatggcgataatgccatcgatcattcactaacactgtgggatatcattccttgcttttactcaccgtcaatcaaatcgatgatgactgactgataatgatagttgctcgtctggcgcctgaatgcggtctcattccttccgacatgcaagatgccgcactggtcgaccagtggatctcttttgccgagcatgaattagacatgaaaatagatgacttgggcaatgagcaagccgagatcccaatgttctatgttctggtgggtcaactggtatcacggtcatgcccttgtcggcttcctctccccataaatctcatcacagagagaagatgctaacttatggactgagtctcaatttatgccttctctattcgaccgacccgttgttcagcatttaatggagagaggccaaggtgccataagtcgcctttcggagcactttgttatgcgattttatgttcttggagagcagctcaccttagctgacatcgtcatcacttccgtgctcacctatggactccataaacccgaaaagtatggcataggccagtaccaccaaaggtatatctctctttgtagatttaccctcgtgcttcccttcccgcaaacaatatcgaaaagcaatttgacgctcttgatgtttgttcgttctatagaatggtagagcatcctaagcttgctcccgtcttttcagaaaattctcttcgacccaatctagctgcttatgatagagcaagagcgattgaataccctgaagacgacgatgagtgggaagacaagtcgcagtcagaatcggaatctctctaccaacacacatggcgttgggcgatatgaaggccttcagtttatttcttcattgattatccacgagcaatattggacgtgatctctatttgtctcgttcgctttacttctcttcttctctctctctcttttggctgtataccttggttcaagctcaagattcatgagatctgtttgaaccatgcacagagatttctctggcttcgaaaagtcttgataatgagatcttccatgtaaccccatgaaagacgcagtcaaaagctctaaccgaaaaaagaaaccgcgcgtttggtagaatcattctgttgtacgattcgtccatcatctcatatgtctatagcacctacacagttcagtcgacacagacggagcaagagttatccaccgaggaatcctccttcgtccggcattacctttactctgtccgatcattttacgtcgtgcctcacgctctgcttcacctgcttcccttccttctctcgacgcccatccgaagaatcatcatcggacgaacttggttttccgagagacaccctagatagtctacttcctgccttttcttcagaacatggcaaccatcgggacgacgctgatgacgatgccgctgcttggggttccgacgcgctctcacttcgtagtcaattcggaacctcaaaaaggagttcgagagaacgaaaccctaggggagcttggaggagctggttaggtcgtctgatcgctgggagaggtgaacgtctaagccttgaagtggaggagggagttgatgacgagagagatttcttggaggatcctgtgattgattggcaaatagaggatcagactagaatatttaacgacaacggggttgatcgggacagcaacgtcgatcgacgatcgagaacgatagacacgctacctgatcgtatattcatcgatccaactgaagtttatcaagcaaagcaaagaacggacgaagaagaaaggagagaggaaggagaaggagaaggagagggagaggcagagtggggtgcgtttttgagcgctccgctcacgagacgatctcccaacatgacaacatcaacatcaccatccccatcctcatcaaccttgccaacagctagagcttacccattcccaacatccacctccgcctcaacacacttggccgaacccaatatcccggagctcgaaccgtcatcgactccaggtccattagcttctatttcttcatcttcatcatcgtcatccgcatcttcatcagagtcgaaacatcggtcctccagatcatcgaagtcattcaataaaaagaaatctcctcctccctcgaacgaggttgaaccgacgcccgccgaggatgtaccgcccagcgtataacttgttgaatgaggtacatagacatgggaagcttaatcacttcctggacgagatagtaggagagtggtccttatcgaagtgttaatcaatcctcatgtggcttgcgccaattcttggttcatgggtactataatcacaacgtccagtcatgctctcatacactctgctccaaatgtatcatggaggagggtttgacaaagcgggatcatgcatctcaacatccctcacgctcctgctctttcctttttggctgtttgtttgttcatttattttgaatctcttctctttagatgtggcctttgttccggagatttcagctcttttggtgtattgtacattcattgcttgtctgattgcttagtaatttgatatatacatatgtttctaaacaaactcttcaatgactactcgttcgagttattattttgttgaagaagaggaagcaaaagtttcaagagggagctctactcgacctcttcaatctttttctccccagcaagatctaccccaagtaatatgttgtccaacagtcttgtctttcccaccttgatggctccggccatgacccaaccttctccatcttttccggttccgagtggttcgtcccctctaacgacctcaaacgagcccggtcggaagattccgatgtactccatctcgaccaaacctctgctcatcatctctgctcggtagatgacaccggccgcagctcgtcggacgtcctgagcggtcgccatcgggtcatttaaccagtgagcgtgcccggcggtcagagcttgttggagggcgggagcggcgaggagctcacgttcggacaggtaagcgtttcgggaggaaagcgcaagattggcgggaggaggagatcgggtggttgggtgaatgagaaggttcgaagacgacggagcactgaaatgtagatctttgagcactgcagacaaaggtaagataaatcaaaaagccgtcagatcaagttttcttgtccatacaaaagaaaagagagagaatagcaaacgaactcgttcgaaggagaagcgcctgttgaatatctttctggccgaaatgagcgtagtctggctggacaatattgaaaagcttggtcacaacggtcgccacgcccctgaagaaatttggtcgagcggctccctcccttcattgatgaaataccaagttatttgatgagcttatgttgtcgaacaaactgattgacacaaacaaaccagtacatggactgaaaactcacaaaatgtctccgtatcctttcacttcgacaaaagcgcccttttgttcgctcacttccgtagtgattccgttggggtacatttccttcacgtcaggtacaaagactaccagaggagagtctatgttgaccggtgcatcgactgaatcagacttgtgtgcgctggaaaaggcagaggaggcgtgggattcgagcagagtggtaagggaagagaggtccttcggaagatctcgggggtaggtagccaaatcttctgttggcgagaactgtgaagagccacatccagaatatttaggacacagagttttgaatcaggttgttatttttattatttgtagaaaaacgctatagtgactgtagctgaaaccttacctgtgaggggttgacaaagatactaaggatggtcaaaggcgacttttctaaggatcttgagactggtcgggatcaaaggaacacaaattctcgctcaatctctcagcattctcgtacggacagagccatatatccagacagattttgcttaccaagatccaaatgaccctgatggagactgcccatggtgggaacaaagccaacggacttgcctgcgtctctcgcggccttcctccactgtcggacttgcttgaccgaagtaagcaccgggacggatgagttggatgccaacgcccggagagagcttgcgcttaaactttggctcattatctcggtccctggttctcagatgagagtgttttgatagtgtgtgaggttgaaaggtcaagagatcaataaagtgatgtcgagtggaagaccaggatggaatgaccgttggggttaagcaggaaagaagaggaaaagaaagaaaaaaagaggtacacgtggcgaaagaggaaagacgcgtcgacgcgtcatcagcgtccggcccacaaccgacacctcgaatctttaatcttcatccatcctatatcggtcactctctcaagtctttcttcttttgacatcttctctctgtagcctcggagaggctgacgatgtcaagcggtaaccaatggaaagatgcagatcctattatattgtcttcagatgaagatgagctcaaaaggccctcccagtttaatgtgctctcgacaacttcaggaccttctacctctgactttcaaggtcctaaaagacgttcgatctatccacctgtctcgatgtctcatctgacggccgaggcaactccttccaaattgtcaaacaagaactcaagagccaaagagactcctgtttctcaaatcgacaagtttcaggacaggcgctcaaataatgtcaacctgtatgacgaggttgaggtattggagaagtcgaatagctcattcaaacccggcgagcaagtcgtccgggatgaaggagactactttcaagaccaaaccgctcggcaggaagcctttggaaagttatctcgaatagatgtagaagtcagttctgtatttggtttatttccggtcagatgtgtcttgttctgatgacatatagtcacacttcctcaaatgaaatcatatagattcgaggtgtacaagatcagatacggtctcttcaaacactagtcgaagatctcaagcgccagaggaaggaacttcagcgcctaactgaagatccctcccgcagggagggtatgggggtgcactctgctctaaatcccacgtcagtaggaaaggattacagtcacggtacattcaagtggaccggcgcgcttaaacaatcgatgaaggacgtattctcaatccaccagttcagactctgtcaggaaggagtttgcaacgccaacatggatggaagagacttgatatggtccgtttcatgattcgaactttcgctttgttcccaatgacatgtagcgcgtatataataagcatgtcttgattttgacactttgaccatctccttatgggaatgggatggggtatatgcgcatattgtacactattcatccagtataatgccaactggttcgtaaagtattcaacagaaatgatatttattctcacactgacgatatcttcatttttgaatcattcaaacgttctaggcggaggaaaatctctgacttaccagctgcctgctatcatatctcgaggaacgaccgtcgtgatttctcctctgctatccctcatggcggatcaaattatgcaccttaccgagcacaatatatctgctgtcatgctcactggatcgacttcaaaagccgctcagagagatatattcgatcggcttctttatgggggagacgaaacacctcataaaccgaaaggcaagggaaaaaagtctgctacgcacgcgagcgacggggaagaggatggacgtgagatcaaattgatttatgtcacggttcgttcggcctctctgtcttctgcaaagatatcttaacgaggcttattctctagctctgcatttgatagccggagaaagtagcaaaatcgaaaatgctcagctcaaccttccaaaagatgcatacagccggtagactgtgtaagcctttctgatcaagtcccttcggttctctatacttcccggcctaggtgccgactttctttccgcatattcttttacagcgcggttcgtactagatgaagcacattgtgtctcacagttaggtcacgactatcgtccagactacggtacgaccaccaaatttagcgtctttgcggatgaggaaacatctcctttactgatgcttcacctcctcatcaattgtcctgtctttctttggtttgaataggaaaactatccgttagtgaaacctctttttgccaatttgacctaatctgggttactaattcagttcgtgatcctttaaacgagaacagattatccgaacgctctttcctggtgtgcctatcatggtgtgtttctgattgaaattatctgatctcgatacacctcacttatgctgatttgactacttgatcaggctgtgaccgcaacttgctcacgtaaggtcttacctgacttgttgaagatactcaaaatgaaagatatcacccctgccaacagtatgtttatcattctctctctctccatatacctgacccaattcttgtcatgatctgatggacttctgatcaattacatcttttgaacgataggcgcaaactcaagcggaacagtgttctttgatgcaccactatacagtcagtcgcatctgtgccttatctatgttgctgtgagtaaatatgtcgattggacatcatttgaactgacaaatcgctcgatccaggaaaaaaccttcattacaaggtcctaccaaagccgtcaaacgcgaaagatgcgttggttgtcatggccgattatatcgtacagaatcatgcgtgagtggatttttgaagattgcaaacactttttgtactgtcagaagttgagaatagagctgtgtcgtttttgtagagatgagagtggtattgtgtattgtttgagcaaaaaagtaagcgcatttcgtatacagaatttcacacgatctaattatctaggtgtgtatctgaatacacggattcgttcatgtcgaataggacacagaggtcgttgctcaagcactcatggagtactctcaaggcgctatcaaagcaggggtaagcctttgaatgatatctcatttgcctctggtactaagtaagtctgaagctttgtctctttctgaatgtatttgccttttctcttttcttgcctcttgaaacaggtgtatcatgcagatgttcatgacaatcataaacaagtcagtaaatcccatctttgtcctgagtttctcaataatgagccacaaaagggtccaccattgaatctcatctatcgcctttcttcaaagatgctgcatgaacgatggagattgggagaggtgaatgttgtcgttgcaactattgcgtgagtagtcttggattctaatcggtctagataatcgtctgttttcctaacacgaaactaatcaatttcttggaaactatgacaggtttggactaggtgtaagttccaaacaacacaaaacttccagtcagaacacattgaatgctgacttgacgtgagatcttggaatgcataaatagatcgacaaaggcaatggttcgttccagctttgtctgtcttcagtagattcgagttcgtgcacatgatagcctttctcaaccgtataccacctatcttcagttcggtttgtcatacatcacaccatctctaaaagtctcgatggatactatcaggagacaggtcgagccggaagagacggtcaggattcgtcttgcgtattgtactatcgaggtcaagacgtcggtcggatgagcgctcttatatgtggggtaagcttgatcaagctctggtcttgtgtattggtgatatgaaactgacaagttactcgattctcttcaggaacgagaatctcaaggaaaactatatggttcgcacaatcttgtgaaacatctgcctctcctgtagagattagaagaaatgctcatgtatgatcgtcatcacttgacatcactttctagacatggttgcttttgctcaagaccttgaaacttgccgaaagatgtaagtttccagaaagatattcctgatgttgatactcgaggaagaagctaagagcccaacctgtttttgcttgatatagactgtttggtcgatacttttcaacatcggcatcactcccctcgagtgcgtggtctgaacgggaagaagcctgtggtcactgcggtaaaacaagattcaatcattcttgatctgtgtgactcgaccgctcacacaatcgttttcttttatgtaaattatcttcaagataattgcactcgagatccagagacgatcatccagcagatagtgaccgaagagtcttggaagatgtatgtcgcaaagttttgtgatttcacccaaagaacgtccagtttggaaatctttctaactatctattgcacaatttgttcaatttggaattctactagctgcagagtcgccacgtcggttcatcaagcagaaggtcgagtgaccgtctccaaactggccgacctcgtccgcggtctcggtggtggaaactttgcatcagcagttcaaggagatgcaaagaagcgccggaaagcgcctgaaatggagaatgttggtttaaatctggacgagatatgcggtggaaaagtgatgatgagtaaagacgtgagttttgtttttccctggtctatcttcccatttgatgtttccttttcagcgaaagttgacaacatgaaattgttcaattgatatttgctatcgcaaaaggaggtcgaacacctaataactaatttgcttctgaaaggatatcttgccgaatgtatgttttttgatgtcctcttgtcgttcttcttcagagcgctgatgaagaaaccatcgatcaacatatacagtattcaagcaaacggcttatacagtcaacgtgtgagtctttgtccatactcccactttcactcttccatgtctaactcaacctttcatcaccggacactatgatgatccgtcgtagatacattatgccgggtcctcagtccctccgattgactaggcagtcgacgatatccaatgatgatccgtccttctcatctcatatcacctgtactttccctcgaaaaagcaaggttactcgaaaatcaaccagtcgcgtttctctagacacactcggtgggtcgtccaatgggaacgcaccagcaggaggaaatggaagcggagttggaaaaggaaaaggaaaaggtaaaggtaaggaagctgtcaaagcgaaacagccttctgttcgagatcgaaccagaaacaaacatggacgaaatcaatacggggacgatgacgaggacgaagataacggcgacgagtacgaagatctggatggattcatagatgatggcgatgatgagatagagatagagatagacgatgatgatgacgagcgggagaaggagattgtggtcaagcgtcaacgaccgaagctgaaatcaaaattcggcagacaaattctttcctcatctgatcatgacgaagaggaatgggagcaagtcaggaacgcgaaaagtagtatctgggacaagtcttttggttgagacgatctaggagtgaaaaagtgtatcatatatatatgtgtgtgtatgttttcatcgttgaagtatgttgcacagaaagtcaaagtctatatggaggaagttatttcatggtagtaagtaattaaagagaagaaatgctatgtgtacgttcgatgtatgcaagcatgtatgtatgtatgtataagaaatatggtgatgcgctgtctagtctcactcggatgatcgcttagaacctgattcagagaagaacgccagaactgataagcatgtagaaaatagggtgaaaagtctgagtctgcgcaaaagaagattagaacatacgagctcggatggcaggtccatatttgtagaagaggaaaggaataggcatcatcatctatacgccccgattgaagatcaaacccgaagacgtgagttacattgttcttcaacttcaacgaatttacagagtcatcagagatttaggcgagaagagggtaagaactcacaatagagatgaaacccatgatggcactagcccatcgagggccggctgcagagttgtagaacctatcgacgaacattgggaatgctccacctttgtttccccaaatcaatttgtaagagcgcaaatagtcagaaactgagacgatgaagataatatcaaaaattgatgacgaggcaacataccaacgagacgagtaaagagagttttggaagccatgcatgatgatgcatacttcggatacgaatccaccaaatatgtgtttgctccaactgtcgttcgaacgtggaggtgatttcgaacggtgagagaagggttgaaagcggatgtcagatggttgtaaacgaagaaacgaagagggaggggatacgaagactgactgtagatggcgataatggagaagcccaggaaaccgcaaccgaaagccgctccgatccaatgaacatgttcgtaactggtaaacgcaaagatgaagaatccagcgggcaagatctacaacaggaaatggaaaaagacgatgagtttatcggtcaacatgtttagcacctaaataggaagataatgaggaagaaaggtctcacaatagaaccaaacatcattgaaggaagtcttgcctcaggaggggtaggaattcctttctcgacacattcgaccgtcctcctggcgtaatactttccttgaagtgggatgacagtggcgtagacgactcccattccgagcctattgattagagatttgaaaaggcgcttagatcatggtgtctcgtttgaaatcaacatacatgatgttaaaaggataaacttacaacacgggaatgaatgagagaccagtggatccgaccgagaagctgataagataagatgatagattataacaatcaaggatcagacattacgcgctatgacgaaacaaagatagacaggtatactgactggtgaatgttctggaagacaatagggatggcaaagaacaggtagtacaaaagcccgtctgaagagaaaagttcgaccgttgatcgattagtatgagcaaactggaaggggagagtacaggctaagaaagaatagaggtgcaaacttacagatcaaacagaggtacatggtaaagagaacgataatgggctcagtgagcatcagttgaaccggtcggaccaaactctcaaataaaatctcggtaatcggtctcttgtttctctcctgttcggtacagaaagtttcatcgccggtctctttgatgagtttgtgagctcgcttcttaagaatgactggcgcgtaggtctcttttaggaaaaacaagttgaggaggaaggaaactccggtgattataagcagaagatactagagtggacacaagtcagagggcaaaagaagttcagtacaggaggtaataaccagatgagacgaggggccaacacatgaatactcacataaggccatcgccaaccaacagagacgagataaccagcgacgactggtccgaccacaggtcctgcgaaaagagtcccagagaagatggccattggtaatcctcgatcgggagtgtgccagagatcagtgataacacctgcgacaacagtgaccggagcggaagcccccagaccggccagagctcgaccaacgaccatagtggccgcgttttgagcgaatgcagagggaaaggtgaagactaatagtgagaggcacatagattagcttcgtttatactacattcccatgaaaagatgaaaaatgtatggtagacttgccaaagtacaagaacatggacaacttgagaataggtgctcggccatagagttcggataggggggcaaggatgagaggaccgataccgaatccaaagacaaagaccgcgattgtctggaatgatcaccaaaagaatcgaagaaacaagactgaaattagataaaatgcatcggaaggagtactacgaagtaaactcacgaggtgcataacatccaagttagtatgaagatccctggcagcatcttcaaagtccatgacgacctgaccgagcgagaacgagaaacgagcacaggattaagcactctgaccagatattgtccaaaacaaacgatctcgatagaactttacatacaagtgaacttcccaaagcgacaatgaagcaatcgaatgagaccaacattgtcttgaaccatttgacggacagcgacatgtttttcgggtcttccgggctggtgaatacatgtggaagagaaggctgaaggtgaggaaaagttcgatttacactgagaaaacctaaaggactgactcattctcttcgaatgtcactatcttgtaatctttgatacctttttcttgatctgatggaccacacccgactagagtgggtgtagcagaaggctgaatttggtgttcctaaaggtgggcaattgaaaatagattgtgtcagcctctctgtaaccacaaaccttctatcagataaggatgggtcagtaagaaccccggtggaacttacttcttccgaggcgaggatgaacccgtcggccgtatgggtggtgtatctagagaacgatcaaagcataagttcatgacatttggatacaagcatgcgcgcgcgagtaggtgtatcacagcagcaaacaagaagacgcagacaaggagacgaactcatccgttgttggacccttttctgttaattgagggtaattcagagcgtccaaccctgtgggtggggtatggtcatgtgtaggagcggacatggcaagaaagagagatttgcagacgtatgcggcagagttacaaaaagggatgctctatgtacccagcggtcctgagtatgctttcgaacaaggaaaagaggtgtatgtgcgtcgcgctgtagaggaaggagaagaatagagagaagaagggaagagaacgttcaagggcaaccctttatatagatattcccatcggttcgaccatggagccaacgatccgaattctaccccgcaataaaaacacgatcgagtgaaaacatcaaggagagcgtaaacgactcgagagaaacagaaggagcgaacgagaatgaaatgatgagtaggagaaggaatcctcggacatccgctaaccaggcagcggcggaaaatctcggccggctgttatctatcggaagaaaccgggagcttaagcggcacaagaaaattctctttcgacgcgcgattgttccctgctgtaatcgtcttagattgtcgtcgtcatcaagaacagcttctcggaagttggagcaacttaaaaagcatgtgaatcatgagtgagaaaaaaacagtagaagggaaaaagaaaggcgaggttcagatacatgaagggacggatggatggatggatggatggatggtcggaaggatggttggttcgcacgaggaaacaaacttgtcgaggagagaatcttgagatattttcactccggacgcgcagtcgatcttttgcccgtccccgtccgccgctccggagccggatccactcgaccgtcagacatcatggtagaaaaggagtcgatggtgcaaaggaaagaacttctcagatcaacaagatttaacagcattgttcgaaaatgactaaagagcaaagaaaacaccaaacggctggcgcgtgtacagatagggtaaaccacagaccgatcaatcagaccggccagagtgaaggagagggcgaaagagaagatatcaagtcgaaagagggctatagaccagcacagagcaagcaatggacaagacgagcgaaggattatacacgtaggtgtatttgatagtccttgaacaagcaataggaggaagtatcaagagaggaaaaaaaaataaaaaatgagatgaggaccaagatgatgaacaaaaatgaagaccgaaagcaacacatcacgaagactgaaattcaaaaagggaaaaagcgtccttggagcgcggtgagaacaaggaaacgacaggacctcaaccctgccaacctagaggtctttcaacatccatcggcttcattggcttagatccccatccgggtccaacttcagtcgaacttgcgcccacaggacgccccaatgaaagccctggcggggcatcatatgcgattccatcatacacatcctcgattccatcgtatgcagagtttctcaccatcgcgcccgccgcgatctcgtcaggcgataatgttggaaccggtttcctctttgagatcgaaaccgatcgctggactgggccagcagtgatggccgtcgaggagtcggctaccgacatcgtcggtgtcgtgtctgccacaggtgatccctgaggcgttttgaatgggttgccctggccatggttgggatccacctgttggtacccatacggttgcttctggtgctgatacagcccctgttgatgagaagaatctgaactagggggagagtttcccatagacgattcaaaagactgatacgcactcggaggagcagacggataaccggcaaagagatttcccccgttagtctcgtttgtcatactcatcgatggcggaactggtaacggcctaggggggattaccggcggcaaattctccatctggatcatcttctcatctgctcttcctacgtaaggctccttcgagtatccacttttatcctcgccctggttccgaacccatcctgctcctgcgcctacacctgctaatccgccgccaagatcttgcccgtttgattcagcgtggaatcctgtatccccatccgagggtcctctcgagtgagacaccccgtacgcaccgtccgatccttctcttgccttcttcttcttccaaaagaaaaagattccgatgatgatggctaatccggcgataactcccacgacggcaccggcgattgttcctccactaacagaatttcctttcgaaccagcagcagcagcagcagcagttccagacgcagaggcagaagcagcagatgcagaagtagaagcagaggcggccgacgttgacgaagctcggatggaagtcaccatggaaggagtggcagacgaactcgatccggaagcagcagcgattaaagcgctatttctgaacagactcatgtcttcgaggtttgtaacaaggaatccatttcatactcagaactcggcgcgtcgcgctttgcgactcgagaggacgattcactcacagtaaaaaccaccacatgccgtcgttacgtttccaccgcaagtgtactgacagtcagtttccccggaggttaaaaccgacgtagtccttaaatcattcccgcatgtacactgggtcgaatactactccaaaaatccacacgaagatttataaattggctcatcagaaaatatgctctttttcaaagcaaaagcagacaaagagaccgacctcaataccggcataaccccaaccaccggtctgacagtacgagacacacatcgtctgagtcatatttgtactttccatgtagccggtagacaacgcatgggtggtactgttgctacctgaggatggcaagggatcagagtagcatcccgcgtagacccaagaagtcgagagtgaagtaggcgtcgacggagcagctgtggtagttgtggtagctaagtacacatacgctcaaacgagcaaagctgtaagaattcctcaaacttcgacttgaaacagcaaaagattaaatgaataaataaaagatgcttactttgagcattaaccaacgaggcagcgataataaacgcaatcgaggttgcagtcattctggaagccatcgttgaagcttctttgacgtatcgtacgtatgtatgtaaggtgaacaaagtcttgtgtgtcgtagtgaaacttggtggtagatgtttccctagagggccggcctcggaaatggagcgtatatactcttcaagagtaggatgagtcgtgggcggaaaggcagagaagacagggatggggtcttgttgaggctgcatgcgaggatagtcggaaacgagcaagacaagcatgggttgcatctgcaatgtcagtgggtgcactagatggcgtattattatgccccagatagtaaatacatacagatgatgatatgaaagtagttgaccgctaaaaagcacggattaaaatgataaaccctgtgatcaagataataaaccctttgatcaagatagatgggaaagatacaacaagaggataggaagacaggtcaacgatatgtgatgtatgaggtaagagtatgaaggttagtcctcatcaaggatggctggaagaaagcaggtagatagaaaagaaaacattcaatagcttacgtaagatttttttcctcttagcttccttgcgtgattcgctctggatgactgctgctactcgttgtcaacaaacatcggttcattcgagagatcaccactatccttgctcaaagcttttaattcgtcctggtagttagagagtcgatgcatgagaaacctcagcccagtgttcaggctggcggtacaatgaagacatcaaacgatcataaattctatatatgtaggagagaaatgtggaaaacaagataccaagacaatacaggatcaaaacaggaagaagcagaagaacgatctagcgacttgcagttgtatatcaaggatctcaaaagacagagagaaaaaaaacattctagttgtgacctccacacgattcatgcccaaccaattgtctacgctgctgaccacctttaggaattttactggtggtattccagaaaaaccaatcgtcgacgtgctcgttcaactgcacagtaatcggatcaagcgaaagacctaagtgagaagcaattctcgccccgatctatgataattgattgatgatgaggagaatcagcttctgaagcgaccaatatatcgaagaggacaaagaagtttctctcaagaattacctcgtaattctctttcgatccatggaaatcggtcgagaagggttccatatataaattctgtgggatacggtcattagagcaaatcacacttttcggacaagaatcaagatacatcaagctgactcacaacgtctactccagagtgaccatgggtagcccatccaagttgagcgcgataagaagacatattcgccaaactaaaggttgattgaactcttcttagtaccttcaacaatcaccgaagactcttgtgtcaagagcaaacgacggtcagttgagacttacaatacatccacccaccactctccacctacaatccccatcgactcgcccaaaccagtgacttcatcgtgtgttgcatccatgattcctaagccctgcttgaagatctcctctttcaaccaatcttcttgaatttcaccctggtgaagtttcgaatgagcaagtatcaactggccaagcgccgccgttgagtgagtcacattcttcagtgcttgcgggtaccagttgtacactggataatgatatggtgaaagctgtcgagcgagagacagtccgccagtctcgtggtcagatacagagatcaactgggtgttacaggagggatggtctttaatccattttcctgtggtgaggaaatcgaaatagaatccatgcgaaaacagatcagttggacggcagacgtcataaaaactagaagaagggaacaaatcagacgcacgaacgacagccacagttctttgatactcaaaaatctgacaatttaatcaaagtggtgtgattagatgagcatctacaccatggtttgactaacgaaagaagaaccctacctcctcggcatgcgcccctggatcattggaatggcctgccatatcgatccgactgccctcaaccatcaagaagaatccaaggccccagccatcgggtctgttccagaacttcaatcgagaccagatcgaaggctgactattttttgctgcttcatcgagggttcgaagggcgatttccgtcatgttcatcaacgagggctcggatgaggcaggtgggagatgaacccgatcgagattgtagttgagatggtcgccttttgaatggaaaaaaatctacattcagatccgtccgtcacacaaataccggaagctgaaataaaattataagaccaacggttgaacagtcctaatacaggtaagggtaatgcttttgcgttccttctcgatgagtcgagcagttctttttccgaaagaatcacgttaattcccttctttctggccgactcgagcatgtccatgttgtctgttctacatgatgaagacgtttcgtttggttgaaagactgttgttgttcgtttgtttcatcagtaccagtgaaacacacagatcagtcattgacctatattggcaatgactagtcacgatcaaaaaataaaagaacaaacagcaaagacctcctcctaaggcgagatctacaacatgacccaagggaccatcgccgacgctgattcaaagaacgaaatgtgagattgtgtgagtatttgtgtaacattacccctcaagtataatgagaaagggagaccaacaggaactcggcgatctcggactgggcagaacggaaactttggttagtacacgactcaagaggaactgcaaagggcggggaacaaacctccatatctcgatcaaccacatgggcataaaaacaggcaggagctaggaggacacgtgccaagacggataaaatagtaagcattcgattgtttgtagatagcaaaaacatagagtggacgcactggcatgggtcaatctactggtctggtgtgtttgattccatcgaacaatgaggatgtcagctgagaaataaacagaaataattagaaggcatctgcttacaacgacaaggcctgtcttgtaacctctctgtttggccgcctcgagaacggttccgcatggcttgtgcctacctatgaatgttgaacaaaaccgcctcagaactcagcgcgcgcacactttaccgcttcaatcgagacgaaaacattcctttcgatactaaccttctggctcaactgaaatagctccgttgtaagacttcatcgcacaagaaaatgcggtcgcgcctgctgctgaatcggtaacaaacgaatttgaggaccttgttctcgagctcccgacgaggatctcatctagagggaatttgaaatcgtccttccaatccaagccatgagtgtgtttgtagaactcgcgagcgaatgtttcagatgctggaccaaatccatcggaaatcatgagaatgaagtttgttcgattgggttctgagaaaaggcattgatccaaacagttcagtcacgcatcagaagaagattacgaaaagaggtacgaacgatgtgtgctagcaagatagactccaacaaacatgatggatattggcagagccatcagccatgtcggaagggatcttaaccatgtctgtcaatcagaaaatcccgatgagaaataaaccacagagatcccacatggtattgaatgcgtttgttcctcagctagacatgagcgataaaaggcactttccaagcgtgtacaggaaacataccttaaatccggcgttgtttcttctagaccgatcggaattcaactctccaattgtgtcttcctcgtctccatcttcgcttcttgcgttcagtaaatgttgtgacgacatgaggtagacgtacacgaaagggttgaactagagctctggatgagaatcatctcggagggtatcgggatagatagggttgctgaaagctgtcctatatcacgtgacatgtcatcgccacactcggcaaagacaacgcttccctcaccaacgcttcgtctgcttcagagattcatccttctttccttccttccactcaatctctttctctcatcgccttcttcattcgaatcaatatgtctaaccctggtaagcctgatatatctgtttgttctacctatgagttgcatgctgataatcttctgttctttttgtcactcactttacggtgttactcatcaccgtgcgtgtgcgatcgatgatcgatcttctcgatcacgcggccgttgacgtggtggaactcgtcggccttgcatttacaatgtcgcatcacactttctcatcaaataggaagagtaatcctttcgcgcctggcgcgtcaacttcaacagtccgccaagtctggtggagggtccaatggaggatctcctcctccgggagcccttctcggtggaggtggtgttgctctcttgattgctggtggattgcttctccagaacagtttgttcaacggtcagtccttctcttatattgaaattcgctgagcatactatatggccgctcttgatctgctggactctgagtctacagtaactccataaggtttgtaatgcaagcaattatacatggtttctcaatgcatgttttgcattgtttgacaactctttacagtcgatggtggacaccgagcgatcttgtatacccggtaagctcttgacgctttgttcgccttaatttactatcacaacttagaatatactgactaatcagttcgttaatcatgtcgacatggaccgaattaatctagaaccggaggtatccagagcacgatttaccctgaaggaacccacttcgctgttcgtatccgcctccccctttttgccgtcctctatttttatacaggcagcggcctcgagtccttacaatcggcctcatatgttacaccaaacagatcccctggttccagactccgatagactttgacgtccgggccaagcctaggtgaggatccccagaaccgtcttttgtgtttaggtttatgagccagctagtctgtctaattctaaatagctcaccattggaccacgttgaccaataaccacagaaacatcgcttctttgaccggaacaaaggatttgcagatggtcaacatcacttgtcgagtgctttctcgacctgacgtgcagaaccttccgacgatttaccgagagttgggaacagattatgatgagcgtgtgttgccatcaatcgtgaatgaggtcttgaaggctgttgtcgcccagttcacggctgctcagatcatcactatgcgagagcaggtacagcacgatttatcatcctcagcatactcgtcttggcagtatataactgataaattgaaattcaatcttccataggtctctagattggtccgagataacttggtccgacgagccaaccagttcaaccttcagctggacgatgtgtccatcacccacgttgccttctcgcctgagtttactcacgccgttgaaggttcgttgtgacccttcaaaccgatactgttgttcatactgatctaaatggtatttgttcaatatacttcttttcgtcaaaatgaacagctaagcaaattgcccagcagaccgctcagcgagccgctttccttgtcgaccaggctattcaggagaagcaatcaatcattgttcgagctcagggagaggccaagtcagctgaattgatcggagaggctgttaaggccaacaaagggttcctcgagctcaggcgattggaggctgccgttcgttttatttgttttttcttaaaatcattatacgagtgccggaatggcaagttgttgaatcaactaccttcctcttttcacataacagagagatattgccaacattgttgccaacagtgggaacaagcttatgctggactctggatcccttcttctcgatggtgtgttcttcttcatggttctggaacatggatgaactcgcggctgatattctcatcgtgtggattcttgctttcttctatagtgacggaagagtctgccaaacgttaggagaaaaacagttggtgtgggagcaacggggtggatggatggttcgctgtaaagatacaatcaaacatgccttctttctaaacttgcactggagaatgaaataattaaagcacaacaccggatggcaagagcccagagagggaagtgcggcgaaaactgccgtttattcgctgacgattgttctccggtccgcaaacccggggcccggaaagcaaccccaacctttctcgtctcttttctcccgtccttttttttctcttctcacataaacaccttctaacactgactaccaactcccatctcttctctccttctttcatctttaatcaatcatacaccatcatgtctcttgcttcacgttagtcttgggactggaacctttctttttcctgttctttttgccatgccgcttctccagtctttccatctgctgatgttttttttcttctccttcatctcaaacggcatatatattcgtccggcatagtctacccttcctggaaacagctgcagtctctccacgactccaaagctggctcttcccttgttctcaaagatctcttcgcgtccgacccgaagcgattcgaacagttccaggctacatacaacgcttcgacagaaaagggctccgaagtcgagatctttttggattactcgaagaacttgattgatgaggacgtctggaaggctcttttgagcttggctaaggaggctggttcgtttaaagattcttctacgtcttgactgtgatataaacacaatggaatacccaagtctaactttatttgggacgctatccttacccttactcagatgtcgagaagaaccgagatgatatgttctctggaaagcacatcaacacttccgaggaccgagccgttcttcacatcgctctccgaaacctttccaagtggtcaatccctgaggagggtactgaggaggttttcgaggtcctcgagcacatcaaggttttcaccgagtccgtccgatctggcgagtggaagggtcacactggtaaggccatcactgatatcgttaacatcggtatcggaggatccgacttgggacccgtcatggtgaccgaggctttgaaggactactccaagcgagacttgaagtgccactttgtctccaacatcgatggaactcatctcgttgaggagctcaaggagtgcaaccctgagaccaccctgttcatcatcgcctccaagactttcaccactcaggagaccatcaccaacgctgagtctgcccgagattggttcatggccaccgctaaggacgttagtttgaacgttctacatcttccgctcaccaattgatcattacatgtccgttgagccttctcttcgtgcccttgacttcaaaacaaacagaaagcccatgtcgccaagcacttcgttgctctttccaccaacaccaaggccgtcactgagtttggaatctcctctgataacatgttcaagttctgggattgggttggtggtcgatactccctctggtccgccattggactttccatcgctctttccatcggttacgagaactttgagcagctccttgctggagctcacgagatggacaagcacttcaaggagactccccttgagaagaacttgcccgtcattcttgcgttgatcggtatctggtacaacgacttctacggttcgtgcggagtttctgaaaaaaaatctgcttgttcctttatgtgacagaaagagctaatctggctcactttggaatttcttggttattttcgtactctaaaggcgctcagactcaggctttgcttccttacgatcagtaccttcacaagttcgctgattacttccagcaggtttgtctgtcttaaaacttgtacatccgcctccttgttctcacacactcgtctgtttttttcaatcaacgttccttcaccatgaaaacagggagacatggagtctgacggaaagttcgtcactaaggacggaaaccgagttgactaccagaccggagtgagtttgacttatcatgtgggagggttttttatctttgccttatgacttacttgatcatgtaatccttttcctcgcctcagcctatcatctggggacaggccggaacgaacggacagcacgccttctatcagttgatccaccagggaaccaagctcatcccctgtgatttcttggcccctgtggagacccttgtgagtagtttcgtcatcagtgcggagtccccttggcccaaagatgatgactgacgtgtaccgctgtgtcatctatagaaccctatctctggtggaaagcaccacgagatcctcctttccaacttctttgcccagcccgaagctcttgctttcggtaagaccgaggaggctgtcaggaaggagctcggagctgccgcttccaacgaggctttggctaagagcaaggtgtttgagggaaacaagcccaccaattcgatcttcttccagaagttgactccggctactcttggttctttgatcgccatgtatgagcacaagatctttgtccagggtaccatttggggcatcaactctttcgatcagatgggagtcgagcttggaaaggtgttggccaagaacattctcgctcaactctccagtccagacaaggttcagggacacgatagctcgactaccggtcttattcactacttccagtctcaccgaaagtaatcaggaagacggagtctgcctgtctgaaaccttcgtattcacgtacttactgtagtattatatgcgtctttttatctctatcaatgtgttaatgtgaactcctaaatcagttgagcgtagataagaaagtcacgtgatcatcggaaaggtccgagcctcccacaaggttgcttctcatccttctcctaacaacgatcatctcatcgttcatctctatcacacatccatatcatggttccaatcttggcttctattcttgcactaagtgtacctgtccttgtgatatccatcccgatgagcagtcgggatgacaagctgcggcatactattgttaccaatccttctcccgctttcatctctgctcacgggtccaactattacggaacctacggctcggctgaatcctctaccccgatttacattgtctctcagtccgagtccggtcgattgaaagacaatttcggtggagtcagtgtctcttacgatgagggacaacggcttttctggatcggtcaggcaggattggctgaggattttgacgaggggaaatctcctatgaaattcgcggaaaacgtaaacgagatcctggatcttagtggatcagctttaagcgctttgtggtcctcaacatacctggccggtcaagatcatcagatccaggccgcttttgggaaccctactcctcgagatgaggctgtcggactaattcatctggatcccaaagagtttgctgtagtccaggtcggaaagaaggtaatcccgtacctcgatgtacttctgcctaggggactagtggcggtcgcgttacctgagaacccgttgccattgatggccaacaaggtcaatgacgagagaatagagttcttgagaaatgcgttagtcactgagctcttcgacttgcactctcggcatctgtcctcaattattgattgttccatccgtcttatctgaggatatacagcaccaaacatgtgaagcatgactccaagatcgacaagatagtctcatctctaactatctctgaattcaaatcggccgttcagtatctcactggcgaaaattcgtccagtcagtctgtctttgacttgatatccaaatggtttgtcgggtcttctaatcacgatgactgtttttcatctaacggtccgtttaggtcctatcacttcccgacactccttctcggatggggctaagcttgctgctaagtggattgccagcgaggttgaagagacaggggcaagctgctcaacacacgatttcttacctgggtttgctccaaacgttctttgtgagtatcccgttcacggggggaagaagccgaagaacggtcaaatcattctttctggacattacgatgtaagttttccagtctgcgtcaaaacattccttggctttgaatgcaacgtgaaaactgacgacaaccatatgtctgttcagtctcgaggtacttttggaagtcttcgaatgcctggggcagacgacgatgctagtggaacgagtcaatttataggcatcgctaaagccatcaaacgagctggtatcaagtcttttgaggagaaggtattgtccatctgtttttttcttcccatacgtcagctcaattttgccaactttgttcttgatgttctatctttctgtcaattcaggtcacatttgcattctttgctggagaggaacaaggtctcctgggaagcgccgctctcgcaagtacgtacagttggaatcatgcctcactttgataagtctgtacaaaaatgaccaagggcttatcactccccttcttgatattttgattcgctcacctgtagagcagctctatatgcagaacgctaccatccttctacaagtccaggccgatatgttagcctaccatgatcctgatgagccccttcaattgggcttccctgactcgttagttcttgatatctcgagctttgtacatgcgtcttcttctgactaaacctaaattctggaatggtatcgtctcctcttttgtaaaaatgttcttagaatcggacttcccgaggctgcggagcttcttacaaagatctctggaatttattctcccgagttggtcgttggcgtaaccaaagcttgctgttctgatcgtgggtgttaacgtccatgtttatggggatacttggagaaatgtgatgtattgaccatgtggatttcccttgaatgttctgaatatccagatcaaagctttgtcgagtacgggttccctgccactcaagtattcgaacgaaacggccgttagtatctctgtctcttcttcgactatgtcagtctcgagatcctgtctaatctcatcttcttcatcctttgatttgtctctttgttcacagcgatcattgatcctacgtaccacaacagtggtgatcttagtgagcgtgtcggctacgactttaatcagctcaggtctattgccaaagtcactgtgagttttggatgctcatcatctgaagatatttatgagaagctagttgctgggctttacaaattgaggtgcatatactgacggctttctcaaccgtagtttgcgacgttgcttgagattggaggatacgtcgtttgatttcttctgaagtctaccagatcgggctagccttttctgcactttctcgtgttttcttgcccattgtgtaataatctcttgttctccttctcggttatgtctatcttataagctccatcgctaagctgcagatggtccactcatagcataggtttattcacctacctttcttatgctctttgcccataacactctatggctatgttttgtttgatggactttgccctcactgctcgtactgtatctttgttcttcattctgaattagttgatgcgcttctgcgtctcttgctctatgtcgatcaagatgcttaaatatcttaaacccgaatccgcccttctatgagattcctctaaatcagatcaactgttgatgtcggagtgaaagagaccatatcatgattagaaaacaaaccgcagttggaagcagagccggtctgtcatatagcatgatgttgagttgttcaaatctcgcatttgtctccctatcagtgatcatgggtagaatatttctatcgtctcttattccatttctactgatcgtcgtacatctagtcatttatgtagtctgacgtctacatacaggtctgaacaacacttgggcttgcttcttgatatgtgaaagcgcgttttaccaattcggcttccgtcatgagctgaacaagacctgtaaggaacccgaacgtggctgatgggtgtgttcgttgttggccatggtagttgtacgggatgctttgaaacttcttcgatagctacctacggatttgaaggtcctttcgaacctgcatttccaaacccaagctcccatgccttcacatcgaccgccattgtctcttcccactcaactctacctaggccttgtctactgtttttactactgctgatgatactggaaggatgtggttcggcagaggttccctcccagaatccttctctctgccaagcttcgagtgccgattttgatgtttcgaatgaggcgctggaggactggagtatgagagatagtgacctgagtgttgataatgacagtgagagggatgtgaggagtggaggcagcgagttgactatgatttatcacgacggcatcaagaggaagtgttttagtctcaagaaacccctgcacgagtaagaaaaggaggttaggaaaagggacgaaccataatcttgaagagaccatgatacccatagaggggtgatagttgcaaattcgactcctttaagcttgagagcttccaagagaaggtcttctgctagttcgctgagcgctgcaaacttgaacaatcgtttttgctattgtacgtatgcatggatcgaggtcacggtcagtatgttagacaggataacaacgctgtatctaagaaaaggaggacaaaccagtttggtaagaacactgtcgagatcttgtttggatgaagaaagcttgatcaataaggacgaaggtgttgggttgaaaggatacggctcgttcggcttaacgcctagattactggttcccatttttgtcagacgtctctatcaatttccagctgagtagggaagttcaggtggagagggaagccaacttactcgagttctgttctcgaatctacacagccttttccagccttaattccatcggctaggacaacttgttcccagtccctcaatgccttctcgaattcgatcaagatgagccggattttgcggtggaagggagttgggtcatacgagggtccggtgctctttggagatattggcggccggatcggcgtcggtgaaggtgacgagggacctttgagtgaagccagcctagacatgagagaaagcgtatgtttgttcttgtatatacgtgaatgtttgtgtgctttacaaatgtgctggagacgatgacaacaacgacgatgatgatgatgctggatggttgggatggatgtttaacgtgaacgagttttccttctttaccaccatcacctctcacactctctccctcttcgctcatcactccttccaccaactcccttctatttcatcccatatcgtttcagtcactctatcaatcttcgaatcgttccagatacggccgagagatcaaggcgatcagcgagagtagagagaagattttttatttttttaatcgataatccgtcaaaaagggtgggaatacacatacacgcacgcctccatctctgacatcctacgttgaatcctgagtcttcttgctcatcgaatcttcgatacttcgtcttctctgttcgtcccatagtcaattccatcatgccttcaaatacaagtcaccaacagcagtctcaccctaaccatcaccatcagcagcagcagcatcatcagcaacaatcatccaagccacctctcccaccatcaactcaaacggctatgaatcaaccgagtggaaatggagctggtccagatggatacccaccatcggcagcggctgttccatggccaggactgttgccgtgtttacatttgtatcctgtgaacgattcgtttttgcccaagcttatacagcttccacccggaagtgttcacgtatgttgctctttcctctagtctttctctcctcaagttcaaacgtgtttaaggtcgcgcttcattgacgttaatccaaataaaatctcgtgtatgctaatactgatcacggtcgatatttccgaggacaggttaagatcgggcgacagacgagtgctaagacggtgcctgacgagcgaaatggatattttgataccaaggtactgagtcgaacgcacgccgaggtttgggaagaaggaggcaaggtaagcaaacatttccctctgagctctggatcgctttccgattgacggttacggatcaatgagttaaatcttcgcttaactttcgggctctggtgttgaacagatatatatcaaggatgtcaagtcctcaaacggaaccttcgtcaacggagaaaggctttcagcagaggcgacagaaagtgaggcgtacgagttgaagtccgaggactacgtggtaagtctctgacggaaattcttagactgttctactgcttatgtttgagcttgtctaaccaactgctccctatgctctctctctctcttcaaaacgcgcaccttatctcttttccttcttggatcctaggaattcggtatcgatatctgtggggacgacaacaagacgatcgttcatcacaaggtatcttccaaggtgtactgtgttttgggtccgcaagatgttgaggcttctgccaggtgcgtttgtcttttcggatttctgatcacgtaccttgctgaacactagttcggaaacacgtctgttaaaactcattttagggaacttcaagagtacaatcaagccatgtctcgacttgccaatatgcgccgaggaaattcgaaacctgttggaccaaacgtcaatgacctcacaaggcagctagcggtcaggacactgataattttttctctcaacagtttggcgactgatcaacatatgattgtttcttcgcgaacgtacagaatgagcttcaaaaaagtagggagacagcagttgatctgcataacctccataatgcgatgaatgacatccacgagacgttaggtggtggtaacgtatgtcttccctttcttatcaacttgaatcactgcaggttcgaagtacgtctattgaacatttcaaagttctctctgaaccagttgccacctcaaatacatgctatgcacccgagtggaccttcgcatgctggttcaaacgctccacagccgtcatcggaggttctacaatatcttcaagctcgaattgatgataaccagctccagctttactcaaatttaggtcgggtccagacccttgagggtcggctgagtgagcatgagctcatcaaaaaggaggtcgaggacctccgggataggctaggcagcttgcagggtcaactggagtttaagacaaggagggctctgattgccgacgaagaagccgacgatgatgtcaaggattaccatcacaccggagaagatgaggaagatgaagaaacggaggaggaagaggaagaggacgattcggatgatgatgcgagaagcgtgcagaccgtgaaagagggcgacgaaggtagagcgggagggagaggcattaagaggagacgaggaaatggctcttccgctgtgagagcttcatataactatggagaggtcgacaatgagcgggaaggagtgtacagaggttcctatcatggtcgacacggaagatccacctcggacagtaccggacgagcgactctgagagatcgaccttccactccggaacctggaggaatctctagttcatctcatctccgatcgggctctcccaacagtttgaaaaaaccagaggaggatgaagaggacgataaaaacgcgcggggttgcaaccggatagacgaggaattaaaacagcagcttcaagaacatgtccagcaaacgcagacggtgctcgctcaaaatattgcgctgaccactcgtttagatttgcttggatctgagttggatggagtgcttggactttcgaaactgcttcaggacgaacattccactgctctttccaccgtcagtcttcttgaaacccgtgtggccgagcttgagggacaggtgggcgaggtgcagggtaaatgggaagtttggaaggaaaagatggaggaaacatggaagaaagaaagagattcatgggatagcgaaagagaaagaatgaaatcggtcgtcaaagaatgggaggaggctaagagacgagccgaggaagaggaagaggaaaggaggctgaacggcgatgaggaagacgaagaaccagaggatgacctccgttggggcaatacagatcctacagataaaaccggacgaaaggcattcccgatcatgggctcgaacggaccttctccggacacaacgaatgatcccaacggcacgattggcgcactagcctctcgaacgcttggcaaacagctgtcaaaatctcaacatcaaaacactagttccgacaatggaactatccatgctcgatctactggatcatcctcttcgactgcatcatcgtcatcctcttctgtctctgccggagtaggcacttcatctgagagccgaataaagtattcttccctccgaacactccttaacccattgtacactctgcctcaatcttccattacggcggataaccagactcaacgaggccacgttccctcatcttttattcggggagcggccgcgccatcttctcaacttgattcgtcctcgtcttcgtctggatttagctccaatggcgagaagcagccgctcaagaagggcgcaagctcagggacgactcaaggctcgttgtcggaaagcggggcaggaaggaaaccaagtgcgtcactcagggctggttcgggtgaaggtgcacttggagacgtgtcggagggagaggtcgaagacgagaatgtaagcgtgacgaaacgagcgactgcagctttaggaggaggcaataagaaaaagggaggaccagaagattatacattcacgcctgtaagcttaaaactttctactttcctctggcaccactctttcgtatgaggcacaagactaattcttcgttcccaatttcaacccaaacagatgcaacttcaaggagtcgtcgtcgttggagtagccgttgttctggcatttaactatgataaactctcccagttcatcaaaggttgatcttctctctgcattcgttcctcattctctcctctgctgtgtatacggcttttttctttatataataaagtgtatatgctatcatcaacgtcttttcttattcataaaactcttcaaccctcggatctttcgatgttctcctcaacttttcgttattccaggcgttcaccttttcgatcaatttcgtgtcttctttgcccttcttcctcttcgctcaccccatcttctgctctcttcaactctattaatgatatccaacgtcactatggatatagagcacactaaatattgagctaaccaacaacggcatgatatacagatacgatttcaggattctagtggtgatgaacaaagtgctatctaaacaatgtaagaacgctatggaaaaaagatcctctcagtctcaacttcatgatacaaacaaggtgcgtcctgtgcagttcacgaatcttctggctcagcgactgttccatctaattcgcagatgctcacgaactgttagaatagaggtgcaagtcagaggagtgtgatggtttttttcatccagtgtcaacaattttactctaagtaacggacaaagcgaaaagaaaagacacgagaaaaatgactaacttctttcacctgagccgaaaacatctccatatcagtcaccggggttgtcgcgccaggaatgctactcaaactaagagcgactgcgacggttgtttgtcggatggcaggtttttcgcctatggcgctcttcttcgcgcccagaacaaacttcttgcatttgctgtagatacaagggggagtaaacgagaaagagtcagtcccgatctttacgccgaatacacttccttagaagaaaaaagttgcattgaaaaatgacttactcctcagataagttgtaaagcattttgaggtgtactctcagaacaaatgctagggagatgatcacagaaacattggccagtgtggaagctcgatagaatactagattcacataacgaacagcaaagagatcaaaaacacttcaacagtaaacctatggcagaacgaaacgacccaccatcactgtctgacctctctgtaacaagctgctcgtcttgaggcatctcgtcctctggatcgggtgtcaaactctgatacaagagctcgccagtaattttgacgtttcatcaggaatgttatgccgaggcgtatcaaaaaccagtttgatgagagcaaactcacacttcgctcctcttctgagtcttcaggtacctctgttccctcgttttcatcctcatcctcttcttcttcatcggattctttctcatctttcacactcttattttgctgtttgaagactttagagatacgcttacggcgttctaagactttggatactcgaatgaatctgtcgtcaaatgatgccgcttcttccaatggtgtcgaaggtcgcatgctagagattactccgaaaaggtgcatgccggtgactgaaatgaccgaagtcaggtaatggattacaatgagtacttcttcctgagttttgtactcgagggtagctaggttatccgccagaaaaaggcagaatccgacatcgttctagataacagagagaacatcatgacgagagcgttaacacagcttctgtgagatcgaaaatgattgacgaaatacataccttagaaaagatcagtttatttggagaggtactgagatcgacttcgaacggcctcaggagaaaacgaagaaagtccttcctcaaaagacgtttgtctcggagcagaccataccagtgccttaaaagagctaacggagtaggctctactgaggatgtctgaatagtcaatcggaagcctgtattatagaattccaatactgtcaatttctagctaaaaacgtcctacattcagtttcagccacttcatacgaacctcttacgactccatgggccgatttgacttgatagtcataacaaactcgagctgtttcgaagaagcgactgttgatgatagatccatgtttgtggtgtaggatcgcatgcaatgagaacgcgcgtgaggcgacatgaaggtcggcactagtttcgagagcaattatgatcggcgcagactatcgtccaaggcagatgtcaggcaaatgccacgtcactctgaatagaaaaaccgacaaacctggataggatgagccaatccttgtttgacagtgaaggtcaagatctccatggcgatgtattgagtttgtagatgtaaagcagcatcgagaatttttggaaggtatcgttgaacgatggtagaaccgacactaaaaattcattagagcaggatgagcacttagatcattgtatctgagaaggatcaaacgtaccctgattcagcgaaagtctccgtatctccgatgagctcggtcatatttacttcgaacgcgaatggagaaacgatacgttgagcgtcagtcatcaaattggctatatatgacatatcaaagcagatgtctaaccttctcgtgagcttccatcaggttgagcaggaagcctggcagcttgggaaatgagaaaatcctggatagaattgagcaaaactcctatagtctctagatcaccggaggcaaacatgtcgtccataagtctcaagcttattgcttccaccatgaatgtgggaaactctcggaataaaaatcctgatttacacatgcacgagaattcattttagtagcgattcactgaagatgaaactcaaatattctaacctagagattggatcatagcgcgtgaaaccgctgggataacaggaagagctcggaatgaatgaattaggcggaaaatatagtctgagatattattctaaagaggtaaaaccagcgaatagcagtcagcacgatgcgacgtaactggagaaggacatgaagtatctaccttggcaattttgaagatgtccgctgccaattctatgatgttgaaccaccaagttagcttttgacgagttagatgatgataggcaagacatacctggtcggcttttgcgaagctcatcaaaatcacagttttcccctagaagagcagtgatatagagtaatagacaaatgcttcgttggttttggggtaagcttcccgtcttctcatagctcgatcggacagcctcaagtttggctgtttgaattcatagaagaagattcttcaatacaacgcccaacaaacttcacaacaacgacaaaagagagaaacacagataataaagacataccagtgcaactccctaacaacttgaccagccgctcgaaattatgcgtaatattattgactacagcgcacagacaggcaataatctcttgcaagccctgttgaagaaagcaaaagagttagtagagataataagaaaacaaatactcaaaaacttacagcggaacctccgacggcaccattgaccataggtagcaatttaccctcgagcttcttggcaaaagtggtggcggttttaggcatcttcgtcacaatttgtcggaagatcttaagtaagtagctagatatagcttgttcatcggcctacatagttgaaggatcagctccccattcccgtgttagactcgatacaaagaaaacgaactcacatttgtaggtgaccttagatacgggagaagatgagaagcctttgagctgtatatacatcccggatatgcaacacagaggtgataaacagccttgatgcaattcgaaatactctgtgaaccaagtcattagtctcaactcaagatcaagtacatggaggaagtaaactcacgaaatctgattgatctgaggcatcgataaggagatcgatgagggcatcgcagagctcctgaaacttctctcgtgtagccgatgctgttctagaatcgactttcttcgcgttatcggaaaccatctggaatgacagcaacacgagtcagaatttttctagtaatgaagagttgattcgagaggccaacaccgtacttgtgtgaggaagctttctatggggttttggcgttccttgaaacatcccgcaacaccgatgaaaactaatgtcttgctctgcatactggaacgagtcgtaactcgggagactgagttctgggcgaggacctgatcatcctcttgaaaccagagttcttcaattgtatggacagccaaatcctacagttgcatataaccaagttgattggtcagtcggcgtgccttactggaatcacgtttgattctctatacacacttttacagtttcgtcttcatcgtctatgcgctcaatcagcttgacgcacatatcgatcttgagagggatgctggtagtaagagaataaagcgatcttaagagtttgatcgttcttttgcggacggcaagccctgcatcctaccaaagagaatgtataattagctttcatcaagcgatgcggacgattgcagtatcgagttcaatgctagacttacatcaacccgctcaccaatgagagacaaatacttttctatcaaagcaggatcctgtatcagatgtttccccagcaactcaacagccacatctcgtacggcgggtgagggatcattcaatcgcgtttctaacgttcgacggacgttggcctgttgatgatgaagtaaggatcgacaccttttcagccatcaaaatttgaaaacgaagcagggaagaggtcactcacttgtttgagaatggttggatctactgcaagtacagggccaagagctttcaatgctttggttctgaatgtaaccgacgtcgagcttaaggagaaaagaatggcgttgagaattgaatcaagagcattcgagatgtgtcgagtattgttgatctcctcagaaatgatgtccaaagtagcaatatcagcagagttgctagacacgaaagcacgagtaaacaatgatcaactagactactcagatggaatattccgcaagtcataaaactttcaggcttacccgacattgaacagatctgctccttctgtttccacccataagtcatctaagcactttcgaagcgccaaggtcatattcagaagtccttctgtatcgctctcatctgtcaagacggagttggcaagttttgatagctcaagactgatttcttggccccagatagctgtacaatactcataagagctctgcaattcaatgaaagtacgggtagatatcatgatttcagctttcttcgatccgggggggggggataaacaaagagaaccttatccaacttacagccaaggaaggatcggtcgtagcagcacggcatagatgctcgatcatctcagactccaaagaggacaactgatctaactgttcaaggttcaagttcgaaacaatctgtatatatgtaaatcaaagagcttatgaatcagtgcttttattgccaaaaccgaagttgatgatcgggtggaacatagattgctgacttcaggtaaagatacaacgccgccaatatcctcgagaccagccttcttcgcccgaatcgatgcttgtaagaaagatgtccggagtcgagcgccgatgagtccaagatgatcaagagcgatagatttggaagcgttgtcttctgcgctagtcttctcatcgttaagcgatgaaatctaaccaaacgaattctcgttagttctgaatgattcatctgattgaggcttcgaacgttcaaaaaacgacagaacactcaccatcagtttgcagaaccaggtcagaagttgagaggctccgggccattccggccagaacaaaacggtgactagatcatgtaggatcatgtccaacactgctcgatgctcggcttcacttgttttcgaggccttgctcgatgcggttctatcattgggggaaaaaattggaaaaggagtaagtgatatgaagatgcacgggatacaaagaatcagcgatgagaatgaccgccgaaacagatgctatagagaaaaagactttgcggaaagagaagaagagagcctcgtacgtattgaccaagaacaaggcaatagattttgcgcttttgacagcagcctcatttgcagcagcatatatttgtccaatctaggagaagaatgatgattatagtaatacattcagatatgtttgttagttaaaacctcacagaaatcagatgtaaatccgattgttgattcacctctttataggtttcctgctttgtttgtttgggagcctttccgccctttttatcgacaagcctacgcatgttcgagcgattgcgaatgcggagtatgtcttccttcacagtatgtgtgcatgtctggataagctgaagaataagcgctgagacaagatggatcgatcttccatctcggaggctgcgaatgaaagaacaaggattaatcgaaagcttatcggtatttcgttggtagagctgagatcccaaaagaagactgacttgaactgcttttggttcttcttgacgtcgggaagcttgatcaatgaagtcaaaatttcctgaatgatccaagtgcgctgtgactcgtgttttccaaatacctggtaatcattttcaatctcgaagagtgattcagtttctgatcttgagttggctctgagcaaacgaaacaaaaccagagagaaaagacccacagcccttaataatcctaatgcatccaatctcagtcccttcaagctcttcgctccagctgcctcagctatagcatcactagccttccccttcacagttctgtctcttccttttcccgtcaattgaggttcagcaacaaagaacggtccgatcgcgaggtagaccgcattgattacaatatcgtcagacatggtaacatctggagagttgataaggtctcggagatgctggaatgtcagtgataaggtttggagaatctggctgatgagattgatgtggggctgggaaactgtggatggaactttgaggaaatgcgatagaacctcaggacagtctgtagcgtagaagcaaaaggattaaagagaagtaagaacaaaacgcatttcgttataccagctaagatctgcaatgaaagaacgaacctgtagagcctgccaatccctccatgtaagggtatatgatctgaaccaagagttgtttaatcaagtctagacatagcttgatggtctcttccgaacatatctttagggaaagacacatgatcagagcgataaggggtcagttctgaatgtcgtcaaagtaaccaggacgacgtacctgctttggtattccctttccagtccaaatcatcaaacatgtatcggccgccagaactgcttccaaagcaatctccagcttggtttgacagacattctcccacgatgatgcccgatctatatcctcctcatattcttcattagagggaggggtagagatgcccaacgtgctggtttcctcgtccagcaaagatgactttgctcgcggcatttgatcaacgtcagctccgagattgtactgtccttcattcatttcccaggcccttccgttctcaatcccttcctccaaactccttctcagaagcgtgataagtttctctggcccaccttcccctagatccagaccccaccaggatcctgtggatttgtccaccatgctagtaaacttagttagcttccgaaaagaagacggattaagcagaggctgaatctcggtaccggaaattaaacgactgaaaaatggatgagtcgaggttcctcggttgacactctgaggataattggatgatgcgaattggagcaggtagttggagggaaccggatacgggattgcgtccatcgactcgaagatatcctctaccaactcgaccagcttcttacggggatctgatcattcgagcaggttgatatgagtatgaaatcaggatacaagtctgacagggtatcattacttacctcgaatgtctctcccaccagtgcttaggacggatcttcgtgagctcataaggccatccatatttttactaggcgagtctacattcgacaacttcgtcttcttgggcgtcggaacactttcttctccttccgagcgcatgtagtcgtcggtcccatcgtctggtactccggccgttcgggacggacgagggtgagacaatttgatcggagtgagagatgatgttcgagagcgcagacttgtctgcaaaatttcatcctcatcgcccataccgagaggatctgacgaagtgacaggatcggtctctggaggcgtaggggctctcttgatgacaggtttatcggtgtttgcaaacaaatcatgagaattcttctcagaggcgtcattcgttgtgccaggcttgcgcttcagaggaaccttcgaaggagtgtcagaagaagagaggatggcatcgtacggctttatcgaagggcttgactcggtcttgacaggattcatctccagagaagacctccgaaacgaactcgttcgggagagcttggtaggtgtcctggtgggtgtgctctcatcgtggtacgcagaaggtgacgacgtgttgagggcgggcgtcccggaactctgacgatggttgtaaccaagagcgctagaaggtgtgttctgagtgtatgcatccatcgagacgacggtctgatcaacaaaactgtcaaagaaagctgccgaggtggacggtgtgatgtcgggatctggcacagaactggcgtaaggatcggtatatgcgtagctttgaagaggatatgatctcaaaagtgaggaagcgatgttactcttaggaacttggtaagggtaaggattgggaataggattcgggggctggtatcgagggtttgctctgtttatataacaatttcgagacagaatgaatttcaacctgtcagatccagacaggaacgcatataagccatcggacctgcctttcgtttgcatggatcgctaccatcaccatcgttctctggttctccagccagtttttttcctggtcattactagggccattttctagaacagcaagctgttgagagtactccgatcgtaagtggtaaccagggaggaacccttgaagaccgggagcgctgatggtcaaagacgaaagatgatgagcgactgatcgtcgtgttcattcaagatcccagatagaatcaatataagagagttagcgctatcatatgaaaccctgatagaccaggccaaacaagaaaatggtgagcttacccgacgaagaaggtgtatggggagctccgagggcgtagaccgctaaaagacgcgctgggtctgcgatcatcccaggattatcggtcgaaagcgaatcctgccccagaggatgattcgattcgggtctaggagattcctgatgaacttgatacatggttttctgactcgtacgcctctccgcctgattatcgagcaggcaagacgtcggcctgaggtatcaactgggttggggggaaggtgtgtgtgttctcgtgtgagtgggtgtgattgatgtttggaggaaagtggacatgctcatttaaccgccacacacgtgattgtagacacgtcaagcaacgtctgcacagcctttcgagcttgctttctctctggccccgtactcgttcttgagatggacgatcaacaattgacaacgacaaccaaaaacgagcattagatgaccagatggaaaattacaggtgggttcattctcctgaggtttaccgaggcttacttgttaactctgacttacgatctgccacagcctctcaggcggcctatcgagcaggatctcagaggatacctatcgaaacccggtcgattcatagtcttagcgtaagcagacaatctctttctggtcatcttcctcaaaccatactaaacacttgctcgagtctccaggcatcttaccaacagtcaaatcagtcggcatcatacgcgccttcagataaaatactatcgaaagatagcgcgcgtaaggaacctaatttcgatgcctttctttcgttgagaaacgcgacgccgaggaagtcacggcagaagaaaccaacatcctggacgcctaatcatggtaatcgttcagagaagcgctctacttcttcgtctaaaccctacaactccgaagaaactgcgtctgctataccaacaacctggaatcgatcccaaccttggtctcgaccgcggcctccaatcaacgcctctaaacctacacctcctatccagctttcccagccagagacgatctcgtccgtaccaacgattgaatcgtatactccctcattctcattctcttcacctacggcccctgtctctactcctcgttcttctccttcgatctcgaagcatgatctcctggcgctcatgcagcatgcccggccatcgtcatcatcgtcacctgcacaaccaaagctccctctgacgttccatattccaacggatctcttagaagctgttgagaaccaaaaacagggagattcaaaaaacctcctggaatcactattggtttcagtaatgagcaggtcgcatcaagctcaacaggtgatgacgcctggttcgacttcacccagacagacggccgatggcttttctcggtcgtcaacagagcaagataatgcccatccgatcagaacggccgacatcgataggctcattcttcggattctgagtccggcttacgaaaatcctgcgaatatctcacttcttctgaaccttctgccaatgttactttcttttgccccggaacgtagtcggtatatgtctccaaagacgatagcttttcttttgttcaattcgtccgatccgatcaaaggtttcgagtatctcgatagccaatgtcaacctgaagaccaagctgagatgttcagtccgactgatctgggtctcatctggaaggcctgggtaggttctacacagccgtaccaagcgcttcagcatgcccagactcgactacgtgctatgggcctctctgcgaacgaggagacgtttgacgatcacattcttggaatcctcctgcggtatcctgctgttcaccacttggaaacggtcgtcaggaatttacctagtgactttcagaaagcttctcgaggtcaacctaccgagtttatcgtgacgatgcaggacgtgttggtccgtctatttgacctggcggagattgcggaggataaggaatttctatattggatctctcaacagatctgtcagttaagtcgagtcgagccgatcaaaaaacaggcccagagtgtctgtcaacagatccaagcagcggccgaggtggtcgtgttagactttgtggagagatgggatctaccaggaatgagaactcagatcagtaatctcactcggtatcttgacccgctggactcgatcatcatcccacctcgatggaccgagcagaacgcctcgaaagacgacacagtctctgggtgtagttcttgcacgccggtggacttggatatacttgatcggatatcgagaacctgggcggatgatcgaaaaggacgactctggaaagcactcgtcaaagggtctgcattggaagacggacaatcttggaagtcgatgtttcaaatctatctgttgggatccaaaggaatccatcatgagctccagagaccggacgagatgatatttccggtgatcgatacactgggtaagaatctcggtcgatacaccggagaccagaagaagaagtttgctcgtgaagttttggtcgacaaggcgttcatccataccttgatggcaactccagccttccggttgacaccctctgactctactgggatctcgatctcaactccggccattgttccagcggctctatctgatcaagccggcagaattatccgaactatccttgaaccgttcctcaggacgcctgtcctgccacgaaccgagaacaaactgtacgacgccctgctcgaatccctatcccatctgacgacctaccagcctgttctcgggctcggctactcaaaggatgcgctgaggcatctcttgacgctcgctccctctccagctctgatggtccgaacgattcgactcttccttcttttccgtcctcatcaaacggcgtcctccgccaccaccgccgccgccaacgatgagcacggctggtcacgatcgatcttgtcacccgaactagctgcagaaacagcaaactcgatactctcaagactttactcaacaccggacgtttcccaacctggcccgatcttggatctggttgatctctcgaacgagatcgtcggggtcgataccgatgtggagacaaaactgagctggttgagacggttgttgaggagatacatcgagattctcactcttctcgacctacctgccgcaaacccaacctcgaatgagggcccaagcctggacaggcgtgagaacaagaggccgggctcgaaaggaacagtcaacaaggcgtacagagcacaccaacttggagaaatccagaacgcgatcatcaaagtcgaacgttgggcggcggaccgtccaggtctgttcgctccgtcgtcgtcgacctcgacggtaaagtccagtggggacgtccgtggtttgatagcccagatcaaactcaaatcggatcgggcgagtcgcctagtttaatgaggtgaggcaagttggagaattctactccagttagccccgaatgttcgctcgagcgcaagttgagccactgatggatgtatgaacagaaatgtaattttgactatgtttgtttactgctgataataacactgatactgacgctcaagcgtttaccacacttttcaagaaagcgggaaaggaaaagaaggacgatcacattttagaaaagacaggaaggtaaaatgaagctgttaacgagataacgaggttcttgggaaaaagtaaagacaaagacgaaatcagagaagaaaatcgaagaaaacaaaagagccatcaaggccaaaagaacgaaagaaagaaggaaggcatcaacagagcagccggataaggaggggtataaatctcgtccgctacgcgagccaggttaaggggtatgtcgaacactttccaagaggataaagagccagcttatgaagatgatgaaaaagaaaggatccagcgaacggacagagacaaaaaaaaaatagatgagaacagagaaaggaaagaaaagatgataaggcaaaaggcagataaagtgttctctgacgttactggaacgcttgagaagggatatatacaagaactctccggagcgtcaagctcgatcaaccggcctctgagaagaggagaggaaaggaaaggggagagagagatctgggtggggatccgttatatttgaacaggtgatctactcgcaccagggaagatcttcgtacgcgttctgtgaaactcatcaataagccatcgcgtaagttcgaagaattctcataaccttcaagcttaacaacaagcaagagtaagaaccgagaaacgtacagcgttggcgaggtacgtagtagactcctcggtggtgacctcgacgatgttaggataagcaaacgcgtcgttcgccacacacaggacctcaccgatgtaaatatttgagcagtccacgttgatctattcaaacaaatcggtgcgcgatcggagctccgtcagtcatggcagacgagattgagatggttagattcaagcacgaagaagagcaagcttacctgggggttgttctgatacaacgcggtcgagttcaaggagtttgactcaatgatgccgtcacaagtgcttcgaattgataaacaaagagagaacgatcgtcagctcagagcaatctcggaactaagagagaaagaacatactcattatcaacgacggtgtaggtctctttgcagtcgtaagtatccgttccaaggcatagatcctggccgatctgtatagatttaacgggaagacagagcaatcagcttcagactgtttacgcgtcagaaggggagggaagggaagggagtagcgaagaaaaagaggagaggacgaacgtagaggttggaacacgcgtcgtcgacgtcattgttaagaagagcgagctggaaagtcgagacgctgttggctttggctgatgacatccaataggacaaagacagaagatcgtgatgagggaactgcgcttgtgaaatggatgtgttgttcggagagccaagggaaaagaagaagccaatagatttgaaaagaaaaaaaaacttacagatccaatcacaaatatctcctaataacattgtgtatgtccccgagaacagagaagatggcaatgcgtgaaaagaagtaaaccatcatcagtccaagcggacttgacgagagcaaaaaaaaaaaaaaaaaa

SEQ ID NO: 1735 - DNA, 23383 bp, Xanthophyllomyces dendrorhous
aaaaaaaaaaaaaaaaacaggggggaggcggggcgaacgtacccgagactacggtataagatcgcgtgcatgtggcatcagtagcagccagagcgactacatgatcaaaagcacaaactagatgagcaccatgaataaatacctctgaggttggatcgagactcagtactgaccagaggcgagagagagaagagcagagagcttgagggcgaacatggctggtcgtgtgaaggttagagggatataaacaaagaagagaaagagtgggtgggcgtggttatgtgacaaaagagtgtttttttcttcgtggagagctgtaaggagcaaaggataaaaggagtgagggtgacctgggtagagaagaagaagaagaagagaaagaaagaaagagagcaagagagcaagagagcaagagtaaggatgagatgatgatggaggaaaggaagaagaaaagagaaatcaaaacaaaacaaaacaaaaaaaaaaaaaagcgcggctgtcttttcacaagtcttttctttccccggctgtgcacacatgggactctctctttctatgctgaccaagtatcatgagattactatataagatataccatctatagaaggatgtataatagattggggtctaaggagaacaataaggggcaagcaacgcaaaaagagaagaagaaaactatgcatctatatctataggtgagcctttccggactttgactcttcgttggcaaacgggtagtcagtgtatccagcggcatcctgggtgtagaaagtgtttcggtcatatgcgttctggaggaagaagagacacgactagttagttggatatcaatggcgatagagacatggttcatagacaagggacgaacaagctcaacatggttcttcaatcggtacggaagatcagggttggcaactgggaaagaatggacagaagagtcaggtaaagagccaaaagtataagggagttgttttctttcctgggaaataaacgaccaaaaaggggacatactgaacagtcggccgaaacagatgacatctccggtcctctcgacgtggttgtacacgttgtccggcttgaacccacctagagcaagagagcaaatgaaaggaaggtcagcgtgaaggtcgcaaggcaagaatcccactccgtatatcggagatccgtctagagccaagagaatgccggacgtactagcactgatgaccaaagtcggtcgctcgggtgtcggctctgggaagacggtcgagtggtcattcttgatagagctgggctcgattcctcgaacgatagcccgaagagggtcgtttccgggaatgacgccctctgcaaggttcttggtatcgaacgctcctgttgacgcaaagtatcggccatggaagaagtccagagaggacgttgagcaaagcgaaagtagaagaaagagaggaacggccgctcgatttaactgcagagaaacaacgtaccagggtgccactcaacaccttcggtcatgtggacgtaaccgaacttggggtaagtgtctacgatcttctggaccaagtatgagaatgtcttcaagggatctgcctcctgcattccttggaacgtgccccaaggtgagattcggaacccaaccttctcctgtccaacctcggccacgacagcctcgatgacttcgagtgcgaatctggttcggttctcgataggtcctccgtaggcatccgttcgcttgttgctgttgtactgagtgaatctgtagagtcgggatggtttgaagggaggcaaaggatgagatgacgtttcggacgcagcaaaatgcagataaagagagcatgtggataaagactgactggtcgatcaggtaaccgttcgcgccatggatctcaaccaagtcgaatccagcctccattgcgttcctagcggcctgtcggtagtgtccgatgtatcctattgatgagcggcaacagaccagcagaagggcaatgttaagcatcaacgaatagatccgataggcaaaagagaaagaacgtcaggactactaacgcttgatgtcatcgatggagagctcttcgggcaaaggctcgccctcgttgatgggtacaggggagggtgcaaccgtcttgacgtacttgcccgcaccgaacgggtcgtctgataagggattagaaggaacaaccgttttcagttgagcgatgtacgtttagtggatgttgacgtcgaaagatatgccaagcacttactgttagctcgtcccaaagcccagctagtgtatagacgatcggaacagatatgtataaagcgtttgtcagcaagtttttaacatcaagggcggaaggaacggaaaagtagggtgggccaggaagaggacgaggaagagacgaacagctgcaaagcaatggtagatcccttagcatggacggccgaggtgacctctttccaggcgtcgatctgctcctgcgagtaaattccaggggcgagtgggtatcctccggctgtgtagaaagaggtaacgaatgacgagtgcctggtcagcgttaagaaaggaagcgatttaaaagatccgaactggacaaaccctcgtgggcgatgaaggttgcctcgctagagaaggagcgagcgaacaagatatgaagcatcaaaatcgtcagccgatgtgatctctggtatgataattaaggcaaataatagtaattgatcgactaacgtgacgaggaaaccaccctcagaggctcgctgagtgtaatactcagccaccattgggtttcgggggacctaaagatggtttgcttgggtcagtgttggacacttccaaggaaaaaacatagaggatggatgattacctgagcaccagcagaagctctcatcctggtgagagctgggacacagatgaaatcaagcaaagtgggccgagtgtgagtccagaagaaagaaaaggcgataaggcatctgagaagaaacacatgttactcacgagcgaggcctactctatggatctgctttccggccagctgaacaggcttgaacaatcgagcggtctctgacaaggtcatctttgaatcggaggtgagagtgagtgtgagtgtaggagtatgtgattggtgacaaagaacgaatgaacgagaaagaacaaaccacaagagaaaggaagaacgaaacgatgatctttatacaacgctctctccgacggtaacgctgctgacgacattatcggcgaatttgtctgcccggggatccgggcatagcaaataccgtgggaatcgtatagactttagtaagaaaacgctattagtaattttgaaatcaactagaaaatttctccagtcgtccataatgagaacatgctcagtcggccggtgcgcagcagggcacagaaggtggagggcttctcggccgggcatgtccgcttcggttaactttttagccgggcttcacgctgtttgtgtcccacgccgtttagccttgtttcatctttggaccaacaggcttggacggagagcaagatagaagagagatatataagagaacgcctcggtacagaagagaggggagcaagaagtaagatggagaatttgaaataaaaatatcgaaaaagaaagaaaagaagaaaaaaccgaagggtcgttcagatagaaagaacgagaaggactagggattagattaaggaaacagttggaagaaaaaaggaaaaagaaagagatcaagagcaacgaaacgcgcaaaagtaaaagcccgcgtttgttcattctttgtcttcttcatgaaggaagagagggaaaagaaaaggatacaaagaaagaagaaaagaccactaggaagagaaaaggaagaacaaaaataacacagacagaccgagaaggagagagagagtaacaaagaaagaaggaacgaaaagcaagagacagattactccgaatcagagtccgattcggacgaaccggattcagattctgagtccgagccgacggcgtgtacgccgtgcatggctgcttttgacccaccgcaaagtagaaaaagagtcaatatccgacaaaccagagttacacctcgaagagaaacagaaagggcaagtaaactcacaagctggcctctcgaactgtttcagattttcttctaattgccggatcttttcagactctgcatcctcgttcgtcgtctttctgttcagaccaccagttccacccttgttacccttcccagttccctttcgtttcgccttcttgactaccaggttgtacaatctcagcacgatcgcaggtggtagactctcaatatcaagctcgatctcttccgaaccctgattggtgagaggaaagacatagaaaacaaaggctgtaaggatttgtaccaagaaagaaaatacgaaagaaagaaaatcagtcaaagctagagacttacctctcccatcggcatgctctcctggataatgttgatcgccttgctcagagtttcgccctcggtcgtagtgatcttctcggcaagttcctgtttctgtgcctgcgtcaacatcaccacgttctcctcttcgctctccgcctttgactttttcgtcgtcgactttttcggtttcgatccgctgtggccgtggccgccactgtgaccgccgccgccaccgccaccgcctccaccaccagcaccaccgatcgagttcttcttcgacggcttcgacccggacggccttggcgcctttgacgcctttggcttggacggcttggaagtcgtggccgcggcagcagccgcctttttctgcaatgacttttgcttctttgcctgcttcctcaccagcacatctcgctgggcctgaagcgcggcgatctgggtgtcaagttcggcgatcgcaccttcgtcatcagactctggctcgacgacttctggttcaacctccacctttggctctggctccggctcactactctcctctttgggtggtaatcggttccaaacgttttcctcccagtgttgcttgaaagccatcccggagttatggacaggcgacaacggcgggttaaacaggaaacagttgtgaatcatcaactggatgtctgcattcacaaccaacggttcgtcgtacactctctccagcaaatttgttcggattgtgttcagatccattggtcgtttcacgatctcgttgtactctggtatgttcaacgccaccgtatctatcggcaaggcgaggcaagaagaaagaaaagctatcggtataggatccaacaaatcagaagatgacactaggggagaaactgtacttaccgacaggataatggaaaggggaagcccaactggagtatgccttctttgacatcaactcgtccacgtgtttcaacaaaaactttaattgcggatcctgcggtccctttttcgagatcgccgccttcttcttggaatcactctcaaattctcttgtcggatggatctctcgtttcggacggccaccttcagttgagttccgtcggccggctgggtccccgttcagtgccccatgcggcgagccatgtgcttgaccaagaccagaagagaccacccccccaagctgactcgcccgaggagcaggcgaaggagttttgtttgcctaggaagggagatagaaaaacatgacgttcaatcatcacgttggcatcaacttcggccaatgcgacaaagaaagagaaagagaactaacagcttcgtccggcggtaactttttcaatgcactctcaaagtgggcttcgacagcccttccggcctgggtgaccgcgtggtcctcaccgttgaacctagcggagttctcccaaacgagtcggaagtctcggatgacctcgtccttcaccatgtactttcccttgtctgcctttcccttcggcttcgggccgctcgccaatagtttgtgctcgattgtcgacaggtccatcgggtgactcacgacgtggtaataagtcggcacgttcaatgcgatcggatccaccggtaacaaaaacgcgtacgcctccttgagcttcttcagcgatcgaacgatcgacaaaaagtgcttcttctgcccgctcgacagcggaagtgagtcgtacgtctgcggcggctggtgggatactggcgtctggaccggagggtacaacggtgtctgtgaataaggtgcatagtactgagccgcaggcgtaaatggcaaattggagaccggaggtggctatcgaggagggaagaaggtcacagttagatgacgcgtacgatctctgatgtacaaaggccacaagaaagtcagcactcaccgaatcgaccttggcacgcttggctacatgctcctgatagctgttatcgataccgttcccgcctgaaccattagggagatagccaccggtaaagtgttcatcccgagtgtctcgttttaacgaagatccagacgcgtcgacggcagcgtaggacgacggcccggatgggatcgatgaaggtgttgcgaacgtgatgtctgtaggagtaggaaaggtggaggaaaaatcgccggaaggtgcagcgggaggagcaggcgagacgtgatggaactggttgcttccgtctgtagggactgcaggagcggtaaagtctgaggagagcccagaggaaataaaaagaacgagattgagcacgggaagcggatcgatgtcgtacgacgcgtcgatacgaagaagacggacatacctctggatgctgaagaaggaatatgagtaggctgttcataaggctggcccagactgtgacttggtgacgcattcggctgaagtggagaaggtgtggggggtatgacaggttgagtgtggaacgatacagcttcagggatggattggacgggagaaagagtcggtggtgctggtgctggtgctgttaccgacgcgccattggagagtccttggacgtggtgtatcgatggaggggcctgttggatgtccatagcagaagtactgctagccggatggaacggttgggaagcagcagcaggtgtagggagttctgtaggagcgaacgacgcgtcggacatgtaaggacggctttgagaagggatggaaaaaaccggtaagagcaagagggatggatgtcagcgagagcaagaagaaagggcgatgtatgctgtggatggatggctagatggatggatgaaacgatctcgaacactttccaagaaggaagaagaagagaaaaccgacacgacacggtatgatataatcaagaaagacgaaaaaggaagagtgaacaaaaaggagactcaccggctggattaggaaggaggtctgtctgagcgcagcaggagaaaaagaaaaaaaaaagaaagaagggaaaaagaattctcgcgtccgtcccgtcgaaaaatgagctgtctgattttaaagaagaatccaacctgctgatggggccccgccttttttcactgtcccttctcggtctcgccacctggatgtaacgccaatgctgtgcgtgtcggcttatgtaagtagtaacgtaacaaggctctccatctccctttgcctatcccacgctctctcgtgtataggcgagagagtatatgcgtgtgtatgtgtgtgtgtgtgtgtgtgtgtgtgtgtgtgtgtgagcgtgtgcgtatgagtatgagtatgagtatgagtatgagagagagtgaaagagagacagtatgtatgtttgtatatatgtatatgcgtggattcagacaagatgaacggacgattcgtcgtctcgtccaatcggttagaaggtgaaagcacaaagaaaaggaggagagagaatgcaagaagaaagctgtcagtgaatcccggtagtcgatggtgattagacggaaccggatcggcatgagactatgcactctctccggtaagcgaccttcgaggctgtttggttctaggagggcgaaaggtttacatagagatgcaaccgattaggatagaacctctagaccctacttgtgataagagagtagagaaacaaaggaagaaatggaactaacagctgaagcatacagtaggagggctgactgcttggacagatccacacccacacgccctcccactcacactcaagcccacactcagaccgacactcgaatcaaatgacccatcagcgagagtgttaggacagaatatgaggcagtgttcatatcctatcagtactatctcaataaaacgagacacgctggcttcctcaaggaagaaaagtgaacagagtatgagtggggttgaaattatcgtacccacttgctctgtccggtcttggggtccaacagtgtgtgcagttgtgtgtaagtgtgttccgtgagccaggaacacaccggttagtgaccgtaaccatggacgttagatagtaccttgttaaaaaataaccctaacatcacccatgtgctcacttctgaacccgccagcgtttcttaaattcaacctgattatgattgctcactaacatcattgaacaacctacacagatctctcccatctacccctcactttcttttattccacctcacttttggctccccttcactcgaatctgattccttcttgtcttagatgagttctccaggtaaggctagaccgggttccttccagtcgtcacatctctatcgcccgtcttcttccgggcccaactcgtggaccaatccgcctcttcggattcctcaggtgcctcctcgattgaactctccagctggaccttccccatcaggctcggcgaaccagtcagcaatctctgtcggcgagcgggtcgccgtatcgtcctctcctgtcgagcaaagcaacttgggtgcctcgctcaacgccggcctacagtcggccacccgtcgattctcgcttgcatccggatctggttctggatccggagttactacgccaacaaccaacgccgctttgtttgcccagtcggcaaacactggcacattcgctccctcacctacaaaggaacttcctgagctctctcttgatgccatccctcacgaggataaagtcaaggtgctcggcaaacaccttgtttccactcaggacagaagacagagtcaatcggtcacacccgaccacggctccgcgttctcaatcacgccgggtgcagccggacggggtagcctgtacggagctcaaccgggagaaagtatggtaggtagtctggcaggtacagaggctggaagcagcattcacggaggggacgagaatgatttctctattccttatgcctcccagggtggtgatgtgacgtaagttttcctcttgtcccacgtttgttatccttccgtcttccttgttcgctgaaaatttctgcgcatccgcacatagcctggttggccaatattgcacatcactgaaccaaattcatacgatttttttactcgttcattccttcttccgttgacacagccacgacttgtacaagtgggcccagacccatcagcagtcgcattcacttcgaaaagcccgttccgcctcgttctctcacccggtccgagacagcgatgggtttaggggggtcgcccaaatcaaggagcccggagggttcagacgagactttattcatgcccgggctagggaacgaggtgaggagaatcctcgagtgctgaggaacgtcatcgactttctattcctgtacggtcacttcgtatgtgcttttcttccttttctatgatacgtcactgtttcctggctcctcccacgcgacagctcttgatccttgtcgagaagtagaaccgacgaaccggtgacatcatgtgacttacaacccctctgtcataacttctgataggccggagaagatctcaacgaagatgatgaggatgacgaggacgacgaagactcgctgcccactacgttgccccgaactcaggcgactgaagaaacccctcttcttagcaactcaaccaactctttgtccaaacgaggcaagcttgccagatcgctttccagacctaggaagccacctggaaacggaatccaagggactgcgagcgcaaccgaggcagtgttcatgcttctgaaaggtttcgtcggaacaggaggttagtcaaattattctatcatcaaacacttgaggtttcaccaagaaaagaagagagacttatcatgtcctctacttgtctctaccgaaatggtttactctcagtcttgttcatgggtaaagcattcctcaacggaggaattctcttctcgaccgttgttatgcttctgcttgggataatatcgctctggtcgttcttgcttcttgtcaagacgaggctcatagtcccgggctcgttcggagatatcggtgggatcctttatggaaagtggatgagaatagtcatcctgagtagtatcgctcttagtcaaatcgggtttgtcgctgcctgtgagttcatcaacactctttctctgttcttgaacctgtccgatatccacagcaatgcggcagtttgttaaccgatacctgattcttgtacttctgttcttcggcaatgctccatcagacaccatctttgtcgctcaaaacttggaggccttcatcctctcggtcagtggtagcaaaccagttgacatcaaatggcttatctttgcccaaatgattgtgttcctcccgttgagcttagtccgaaacttggccaaattgagtggaaccgctttgattgccgatgcgtttattttgatcggactcatctacatcggctcaaacgagatatcgacgatcgccaaacacggaatctctgatgtcgagctcttcaacccggcttcgtactctcttctcatcggaacgtctgtgtttgcgttcgaaggaatcggacttgtcattcccatcacggagtctatgaaggaacccgaaaagttccccagagtattgactggtgtcatgattggaatctctatcttgtttgccggctttggagttctcagctatggcgcgtacggctctcacactgagacggtcgtgctctccaacttgccccaagatcacaagtttgtccaggtcgttcagttcctctactcggtggccatcctactctcgactccgctccagttattcccggccacccgaatcatggagaacgggctgtttgagaagagcggaaagaagaaccccaaggtttgcttctgttccttttggtctactctatgtgctgtctttgaactctttatttatcgtcttctccctccctccgtcatctaggtcaagtggcagaagaacctgtttagagcggcctcagttatgggttgcatgctcatcgcctggctcggctcggctgatttggacaaattcgtatcgttcatcgggtcgttcgcttgcattccgctatgctacatctatccccccttgcttcaccttcgagctgggtcgccgagtcgggtggctcgtattctagattacgctctgattgtgttcggtgcgatcgccatggtgtacacgactttacaaacagttcttatgcttctcgcataagtcaatctctctctctctctctttctctacggggagccctctaccctttcgctcgttcgtataggttgtctaccagagtccctcatttgttttcccacaaaagtatctctttactctttactctctctctctctcatatcaaactcgttcaattcttaagggagacctgtccattatcctcattatctcctaaacaaatccacagtctaaacctagcatatctatatcttgcttctctatcatgaagatactctctttctgtcctctcaagccgacgagtcacacgagacggttacgctgacgtaaccatgacggagacccagctaattgccgagtaggtcggaaagctacgacatcgttgtacttttacccccacctctcgactctcaaccacgatcactctctctctttggcctctttctgtgttctgctatcgtaaagaagaacgttgtttcctcgagaattaagagaagcactatagatcgtccagctctctttttgatcttaccggtttcgtccctctaagccgtgagtactcattagacattgccttttcaaaactcacccgaagaggaaactcttactgagggtacatttgctgatggataccttttttccttgatcgatcgtcggggtcttttctacttggtcatcgttcggacggggaaacacgggtgtcatcttggttaaatgtcgtctcgactccggaatagacagatgcttccctcgcttccggccttgcctcggctattcgcaacttcaaagctatcgttacatcgctccctctctactttcgccgaggttcgtctctcgatgtttatctctttatatcatggtttatggcagcaaggaaggatggacaagaagtagaactaactttcactttctctactgttgcttctgtcttgcttcgtcttcgtgcccttgggaactttccaaccatccaagcctccgactcgaataacaacccttccgaacaagatcaaagtcgcgaccaatgatgtggctgcccatatccaagcggtcggtgttaccgtagctgctggatcgagatatgaaaccgacgagaccagagggttctcttacatgctctctaagctcgctttcaaggtgagcgatctcattgtttccaatttcatacacgtccgagagacgaaatgtcttgtccctttccctcgtttttatcggaggattctcatcccacgttggttatgctgcaagaaacttcttagtcatctagcaatcgatcagtaacggactatgcgcttgacatggaaagatacgtctcgacgttggcatgccacgtcggtcgagagacactactctaccaagcccactttccgtcccaaaatctttcacctgtactctcccttgtatcggacacaatgcttcacccacttatcacccctggcgaagtggaagagtctctactcggcgcatcgtacgagctcatgctctacgacgaaaaggcagacgctttcctcatggaagtccttcagaatgtggctttcggaaagaaggcgctcggccgaccgaacctgcctgacccggttgatgtcgactttacagaacaaggcattccaccgatcggaacgacgatcactcctgaaagacttcaggcctttagaaagctgtggttccgaccggaacgaatcgtcgtctctggaaccgggatggagcatgacgagctcgtcaagctgacggaggctcaattcggccacttgccatatgtagctccaatccagacaggggaggactcggcacgcgcgctgtcgaccggttggttcaaaagtctcgcttcttcgctaacgcccatctcttcgccggaggaatcagtgggaggactgagtgctgctggctcgatggatctaatcgaggtcccgccgataggtcagcccgctgctgtatacaccggaggagtcgatatcgatgtgagaccggggatggagatgtgccatgtgtttgttggattcgaaggtctggatgctaacgatgaggatgttgtaagtcgaacttttttctttctttgggttcttaaatgagatagacgtgtttctaaatgaagcgtgcgctgacttgcttgtgagcaatcgatcttagtacgcgcttgctgtcattcaaatgctacttggagatggtgcttccttctcttcaggtaaagaccaaagctctccttctcctagtatcagctgagccttgcgtaaattatgagactcatcgcttgattttcctttgtaggtggacctggaaagggacttttgtcccggttctacacaggagtgatgattggtagtcatggattggaaaacgtcaactcgatgaacttgccttactctgatggaggtaagatcctttgtttgtcttgcgtactggattctagttctgttgcgaaattaactttctacatgttctttcaatccactgtcgccgatgtatctgtaggcctctttgcggtttccctaacgtgtatgcctggggtgcttcagaaatatttgaatcgactggctgtcgagctagcctcgatcatgaagccccataatctgacataccctgttcagccaatcgaactttcccgagcaaagaaccgattaaagtccgcgatgctttacgctcaagaggatccccgagtcgaggctgaagacctaggggcgcaggtgatgatcaacggaaaacgaatgcctatcaaggagatgttggccaagatcgacgcagtctcgatgggtgatctggcaagggtggccaacagggtgtttgccagagggaacagcgggaagggaaagctgacggtagtggcaagaggtccggaaaccgtctcccaggtagagagcatggtcaacagggcttggagctcaaagggactttacgttgggccgggtacaaaatgggtgtagaataaaaatgaaggcgaatcccaggacatacaacacagaactgtttctttcagacccgaattaagagctaggcagagccagttcgctgatcctttgaagcagcagagacacactgagccgacggttcgtccaacataggtgtatgctcctagcaagatcaatgtgtccatacgatccagatcatctgcttctgacgattcatcccattcagtttatgaaagtaatctatacagtaggtcttgtccttcttctttctctccgtatccccttcatcaaggccctgtcaacaggatgatgtcaacatcatcatgaactccttgtaaaagcatctccgagtcgtatgctacgaccttcttccttttggctgctcgtaacgttccaaccagagcttcgactgcagatgtttgaatacggtagccaagaacgagagacacatgctcagtgacaagacagaaccaggcaagctgttcgataagagaccaaacatacagatattctctacccgttcatctcgaacaagctttccaaacttcacagatgtctttccctcagcgttcggagctccaagccgggtaatctcgacctgagtgcgcggatatggatatgttagtatgagcataagcacacgcgagctatacagctgtcagatgttgagaggcatgactataccttgagatgttcgatctctccttcggtgttcatgatggttgataggatgaagagagttggttatcaacaatgtgatggagagatttccatccggccttttctttcactctccatcagccatcatcagccccgcattcgatttcttctgctcaaccttctgacatggcatccctgatcgataccgacgacgcgatagagactgttctgtttatctgtcggaatgtgaaaggtgcgatgttttgctttctctttgctctttctcctcttgctcatcgttcgactttctgccttgcccatctcgaatctacgactcctcttacccagtgtataagattccgccccgaccaaacttgagcggctggaaagcccaggactggggagaggattccttcatgtgggagggcagacttcggatcttgcagaaaggtggccatgcagtgatcaagctggaggtcagtccgagaccatctgggcgactcctatcatcctatcatccctctttgctgatatatcgatcgcttcccgtttctctctggtatcctcttgaatgcgactcaatcactactcaaggactctaacacaggcgaaatgtttgcaaactgtccctatgatcctccgggaagctcggttgaacctgtcttggatagctctcgatactttgttttgaggattgtagatgagtctggtcggaaagcaagtatcgggatggggtcagtcgtctgttctacttccttcttcatgagctgaacaatgaatttttgctaatatgtacccattctctttgtgattcctggatttgatgttctgtcatgtgtttcggctcacttctaccttcgattgtctcggaacaaacagctttgaggaaagaggcgatgcattcgatttcaacggttcgtagatctcttcaagttttactcgtgaggaactcatgtgcgctatcctgactggctcttccttgcttcgttaccattgaacagtcgctttgcaggaccacttgaagcatctctctagcgcctcgtcgccggcctcttcttcctcttctaccgcctcttcgaccgctaagaccgagcccaagagagacttcagcttgaaggaaggccaaacattttctatcagtatccctggagcttccggaaagcccagaccgaagaaaccggagggaggtggcggtggggggttgttcatgttgcctcctccgccctctggtggcagtcagagataggataaaggcgcgctcgatcaaatcttgactataataccatctttgtagaactgtgaatgtgttcgttcagaacaaacatgaaaggagtttaaatcgagaacttgatggatgagaggattgagacaactccttcttgaacgaatgaaagccaaaagaaagatttccattcggtcttgtgcggacgaagatggattgaactttctcaccttcttccatcaccatcgccatcatcccattgtcgtcctgccgctctcaagtcatgtctcttcttaatccttcaaacaagctacgttctcttcctcgttctaatcgcctggtaagtacctttagacggcaaacccggtcgaaatcagtgtatcttccagatcaatcagacatctatgccgtccctttcgctacgccaaccaagctcgcgctcgaccgactcaaactgttctccatcgcgcccgttctatcgttcacaaacctggtccacgggctgggtgaagcgttcgtcggaccagagtactttaaatcaaaagtggaactcatcgaatggaaggcagtctatgtaccaggttggagtgtgaagacagactgctcgttcagagcactccatgcaatggaggaagctctcagagcatctgatccagactcgttcttcgccaaggtggacgaagaaaagatgcagacggtcgtcaacgtcaagatcggaaacatgttcttcccgggtgagctttcttcttgttcatcttgtccttctacattgtaattccttcctcgaaatcccatccaccggcagagagacgagaagaaatgagagaagagccaaactcattctgaatgttgcttttgccgttctcctataggaacatctttcgatccgctctccaagatatgtctccgaccgtcactcgaacgactaccagactatctcaagcgatataacccagatgaacatttacatcagatgggcatggacgtctcccctctgccgttcgaactttcaccactctcacttccagaactggccaaacacttcgatggctcgcgcagagatagagtttgggactatgtcgacaaggagtctatcaagtttcacaaggtcagtcaacggaatttacacttgcattctccgtctgttgcgtcaaagagtcaaactaaattggtcctggttgaccgaacttgtatgatgaaaaccaatcatgattcatagcttgatgcaactccgatctactttcctttctatgtcgccagtacgtccatttgtgattcaatgcttcttccatgtgctcaaatctgattgggaacggcctatatagactttaagttcgaagagcgaatctttacgttagcgatagaagcttacgagaaagatatcggattaaccgagggtatgtattcttctttatatgatttctctctctccatgtactcgtcaacaggccgccgagatcactgaatgactgatcttatttgacatatatagtatacttcccacctcgtcaagagggcatcgagtgcgtatcttctctagcctatcgtttcatccccttctgctcttttggttcaaggaaaagaaactaattgttcgtcttgaattgctgtatgccttcgtctcaagacgaccttacccatacaaaccactcggtcgagctctgtactctgatcggaacatcaactccaaatacattcaaccaccgtcattcgaacatctcaagcttcaaatcgcccaactccctctaagttcatcctggtccgttccaggaggtcatgtatacactgatcattcgtttcatgataccatcgtctccggaggtggcttgatcgaggttttcgagcgatggatcgataggcaggatgtgagggatagattattggggatctgtcagagggaagaggatgctgtggagcggaagattgagggtaggtttggaaggatcgcagagtggacgccggtagaaaagccggacgaggagcatgacgattagatcaaaacaacaagagggattagggttccttaggagttcttaacatgtataaaacttacaaacacaaagacagacggttctttcggcaagagttgttgtacatgagacatagagatcgtcttgtggaggacattcggcatttctctctttgttcaagctgaatgcgcgcatatctctctctttccaacatgttcataatctttactttattgagcccaagattgacagaacacaaccgagaggacaagtccccatctctctggagaagtattgtatcctccccccttttttaacgcccaactatccttcttttcctcacttcaagttccaaagccactgcttcaactcttgcaatccatcctccccgtcaggttttgtctttttcttctcctccttatcctgctcctcatcttccacgtccacgatgcttgccttttctttctcttttcccactccgacggcgggccgtccgagaccaacgccgacaggctttcctgtccatccccctgcccaactgattcctttccagtcctcccatctccactttgagccgggggcgcccatcctcaacacctcctccactgattccctctgttcgataccaccgtcaccaccggaaccgccggcagaagcagatcccgaggcgtcttggtcggtctcgagcaggtcgatcttgcctgatgtcgagccgagggctgatttcctagcgttgagctcccgggtgagagaggtgtgaagtctgggaacagctaacgatcgggtcgtcgagttgggaacgagatcgagtttcgtagagagaagtaggacgggtgtaggagaaggagggagtgtgtgaggaaggatggggagtaatgcgcttgatttgatgtgcgaatgggtgagaaagtgaaacgaaaagaaggataagtagagcaaggagaagaggaagtgaaggcagtacggaagagagagagagaaaaaaaaaggagaggacgtactcgacaaccgaaccaatctctttctctctgccactctgagcaccatcgacgacaaaaacgacggcgactctcttctttcctctgatctctctggacaacaaatcctgtagaccttgtgcgagtctcggatgacctgggtaatcgattatcttgaatttccgagcttgggccttgttctttgttcccgtagtggacgatgaggaagatgatgtcttgggaggagcgagaataaagtgggacgttgaaggcttgagactagaatgggtagccggtcgagacccatgagcgagctcagcaaagactgatgtcttgccagaaccgggaggaccgacgaggatgatggtccgttctagggcatcgttcgtgctactccagacaaagtagatagctatccgtcacgtaagaaagtccccagcccgatcgtcaatgaaggttatcatggtgcacgagaaaagatgagcatcacgagagagagagagatagaggctaaattgtacgagaaagcaagaaagcagacgaaccggtgatgagaacgaggacgatggtccccaagaaagcaagcaaggtctcttcatcgttcagtgcgtttacgaacgctggtgagctaggaaactggatcaacgttttgcccattgtctctactatatctccttctgtactctatccgtaataccaggcgagtatcctgtcgttgtttgcgtgtatgtatatgctgtcgtcgagcgatagacgcgaggagattgagatggtggacggagagtgatcgagagttgattctccatgttctcttttcttcatccgtcgcgtttcgtttgcgttcagtcccatagaagaagcatcatccacgtctctccatcttcagtgcgcacttccctttccatcttggacaacacaaagacagaacacgtcatgctaaactgaaaggagaataaaatgggagaagatgatgcataaaagagcttatccaccgagacaaagggcagtatgaaatcaagagcaaggtcggaaagaaagaacctagatggtgtatccgattggtgcgaggaccgagaatggaatggtatgagacagaaaaaccaacagacgtcggatgcacttggtttgaatggtgatgataaaagggcaagattgagggaaggcagatagaagaaaagaagaatgtacatggtccgaacgacatacaaatcgagatcaagtaggacaagaatagaaaccgaaaaaaaaggaagaaagaaagagaaagaaaactcgatgctttggatgcctcaaaggaagtagtaaaagttgacgacaagataaacagcaaagctcggccagaatactccgaagcactcccctgtccatctggcaaccaggccctcctctcctccgatcgagttccagaaccgtcttcctaatccgaacgatctgctaaaatctctagcgacctccctccaactcgagagcacaccatcctcactagcggacgcggcggacgcgagctttcttgaatccatccgagtcggccgtcgaggaatacctggcctggcagaaggcgaaggcaacggcgctccaaagatccctagtccgacgttctgcccactaccgccgcccccactactgccggtactgacgagaccaggcaggtactcctcagagttatggtatgaatccgggaaatcataagacaaccggttcggttccgaagggtaccctccgatctccgcgtcgtccagttcgctggagagctgtttcggactgcccaacggcgaaggaggaaccgaccgggacggtcgacggatcgctcctggaggttgcaagccgctagatgaagtaggtaatcgaggggacttcaacgctccaccggcaatacctgcactggacgatactctgctcatcgacggggtcggaggggcagagaagttggatgtctgaagattgattgattttgggtacgctctcatccggatcgatcgacgaatgttgacgaagaggaggaagagtacggtgagaagggcgagaggaaggtagatatgattgtaaattcctagttggtcaggcagattgcaagccatgtcggcgtgcgtcggtaacgagggttcggctggatcggaaggaacgagactgaggatctggaagccaggctgggatacctcgagagccatggtgaacgccttgacggtgacctctcggacaccgttcggatggctatattcacaaatgtcatggtcatctccgctaaagataagagtaggcgctatccgctccattaggaactctgaggtctcccgaccactaagtgaatggtaggcaaagcgattgaagagtgagtgaaaagaaaagagagcagtgatctgaaaccaaatcgataaatgaacaaatagacagatagatagatacaaagacgtacagtaatttttggtagcccagtccggcgccattgacaatatgacctttttctctcaatggtccacaatccacacgctccctcctgtggagaggcacgtgggtgagtaagatccgaggaaagttagttttatctgtggaaagatgaaggatgatcaatatcaggatgatcttggtgtgtctgataggagcacaaagaaggacatactctcagacagcttgaccacaaagtcgatggaaccgccctcagaatcgcctgcatcgccgaatctaatctgatctgcgtaacgtctatagtcttcctcaatgatccctggcgcgctgttgagagaaacgcgaaagacagtttgtcagatcagagcttttaataaaaaataaagataaactcgaccgggacttgctcgaggaggacaaatgtatggtttccgatgtcaacagtatggttgatttctccaaacgcttgcttatatcgttctctcgctcgagtggagaatgctctggacgggccgagtccctagaagtgaaatgaacaagaggaaagggaacaggaaaaggagatgagaagggcatggaacggatggagggctatgtatgtactgactacatcgtgatttcctgggatgtagtaaaccggtacgttcatagttggtttgaagatctgtttaaaccggctggcgtacgaccagtatctggttgttgattgagttcagagagtacggctggtcagtcgagattgaatacaaaaaagaaagggtgatagaatgaaacaagctaggggaagtatgcgttgtgtatacgcatacaagttcatccccatgaatgtagtggggtgactcactctccttccaatgtggccgctcggccggaatgcatcatgtctcccaggaagaagacggcgtctggcttgaagcgctgggcgatagaccaactcttcttaaggaatgtgtcgatgatgaaccggtcgatgagtgaccggaaaggtctttgacgagccgaagaggactcgaagtttatcacttgagggtcagcgataatgagaacgcgtgtggagcgagaggggagattggaactctgagattgtcccgaaaatgaagccaagcaaccgtcagcttcgggaagagagctagtatcaaaggatacaagcggaagaaaagcaaaacgagagactaagaccggacgaactctctgaagtcgtttctctaaactggaccatcgacaagcagacgctgaccagaagaactagaaaagggatacaaggtcagtggaagaaatggaaacgaggacacgaaagagtcaagcagagaattacctctccgatctgttgggagtatatgaatgaaaagaggcaagaacaaacgatacagtggtcactattctataggccacgatagaagtagaggatacactggggctaatcaaaggtaaagaacaaagttacacggagggacgtgtcggaaactaacctcgcaccagatcacgaccactatccacccaaaccgaagaccgatgcttgccgactgggacacggctgaccttctccttctaagtacgtttgaggacatgggagaacgagaacaagaggactgaacgaacgctggatgtagtagttgggggatctaaaggttgctacctgaacggccgaaacttaaaagacacgaaggttaaacaaagcggggaaccgactgcaagtcacgtgaatatgcacagcaaattagtcacgtgacacacatctctcagcttcgcccacttgtaccttgcccactcccactcttgttttaatagggggcagatcggctcggatgagtatgtatgtgtacgcgtgcgtgcgggtgtgtgttggtgtatgagcatgtgcgtgtgtgtatccagagcagatatgtatgtatgtgtctgtgtgtctgtgtg

SEQ ID NO: 1736 - DNA, 7570 bp, Xanthophyllomyces dendrorhous
tgtgtctgtgtgtctgtgtgtctgtgtgtctgtgtgtctgtgtgtctgtgtgtctgtgtgtctgtgtgtctgtgtgtctgtgtgtctgtgtgtcggtaagcgagcacgtacagagcaagtgtgcgctccggttaatgtctgtttacatccagaccgaccggactcttcaatggcatgctggtttctctctcggaccaatccttgctgctccttattcgatagacatccattcgcatcatacccacctgcatgtctgttctgagcttgatgttggtacggaagacccagccgagtgatcttcgggcgccggcacgggagaaggcgcagtgggagccggtgtggccccggtatgaccccggtgatatgttccgagttgagttcgttacctccaaaccttgttcgtctggtcgtctggccaaggacaagtgagggtgaacatcaagtgagacaagatgagagtgttgccatcattccttcaccattatcctccatcatggaggaacacttgctcacccctctcaatcgagaacatgcgtctacagattccttcttggattcagccgacgaccacctgtccctccgaacacgtaggaaacccgttctgactcgccgtcgtcttctcatcttgattgccatcctagttgttctcggaatctccggtggagctgtctaccttgtcttctcagtggccaggtatttctggcgtctggtctttgatcctcatcggggaaccacggtctcctacccttggaatgccgtgactagctactatggcggagatattccccagtttgatgttgtagccagtgtgtttgtcaggcttggaaaagagttgccgggtataagagacggtagatcttttggagggcctgatccagaaacatcgcgctttggagattggcaaccgctttacagccaggttgtcttctctcgaatcagcctcaactctgccgacccggtcttcaagaaaacgatcaatttatctatccctctggatgtcctgtcagtttgatgttctccatctcgtgtcttccttgtcatcccgagttcaactctttgaccgctcctcctctgtatttttgcataaatagatcccagttttatgaacccaacaccttctttcctgagatcgtcaataccttcgtcatcgttccatctgatcccgatcccatcttgaactccctcgaacaatcccaggtgaagatggtggagtatgtggagatgatggagttcgaacagtcctctccatttttctctggcatgaattctacctcacggactaaaagtagtcttcaacagctcgctcgtcctatagatcctctcgccgacgaccccaatggtagttcacatatggagaacgtttcgcgatcgcttaacgcattttatgattctggggctgtcagagagttcgccctgcggcctgtaatcgatgaacgggccacctgggaccagtcggactgggctgaaatatacagtcagccaccttcccgatccaaagagagcgaaaatcttcgaaatcaaagacagttccttccctaccagcggaatgcaagcctcaagattaaatctagaagctggctctctatggctaaggagacaccaatgtatgattatgacagatatactagaaagcgacgtgatgtgaattccgaaggggttcgtctcctttaatatggttcgcgttatggaatctaaagtgtagaatctgtgagcgctaactacctctaaattttattatcctcttgtcggtttggcttgtgatttcatcatgtagtggaagatgatttatcaacaagatcctctcaattgggcggctcatctcacccactttcctttcagtgttgtaggtcactaccgatctttgatcactcagcactttaacgtgaaggatcgtcatgaattcagcggaggaccatggtctcacaggcctgaaaagatttctttttatggcccctatatgactctgcgtatgtattcttttcgacgtgttcttctcatacaaggcgtcgatttggtcgacctcataatgacccttctccgtccgaaacactttctcttccccttctgtgatgtgatcctttttcgtaggtggtcatgcagctgggtctgaggactggatccccttgcctcgtatcgatcagtcctccaacaaccaatctggtaagcagtgggcaaaactggaaaaaggatggctctactttcttggcttctgcgcgctcatcaccctctcttttgttctaccctccaacatttttgtagatccgttcaccgttccctggcatatcacctttgatctcttgtcaaaatcgaagataattggtatcgataaaattaacaaggacgacttcagatggtttgatcgttatagatcatactatccatctttcgacaatggttatatggaggctagtacactgcagacgatggatttcataagttcgatcttcttccttcctctgatgtttgaaagtactattctcagctgtctagtctcgagaattctctgaccaactgtttgtctacctgttatacgttcacattcaccacttcagatgctatctttgggaacagccacacgtacactaaacgacccatccttcgctccgtcttcttcgtcatcggcggcttgatccgataccccctcgggatcatccttcagacgtattatctcttttccagatctttgagcacgggcctaagtcttccatcgaccatcctctacttgtgtttcggtagtctgtatgaagcaatctcttatcacaatgatcgttatgattatgaaaggtctgcatggatgttcgccgcagtactagtgatcaacatcgtttccatctggaggtggacctgtctttggtgtggcatcggcatcacatggcatggctgcggtggctcatttcctataggattcaaaagattcgggcgaacacactcggagaggatgagcaggagatcagatcaaaagtttacgtgggctcagaaaggcgtggtatgttcctttcttctttctgcacggtcgttagcttagcaccaggaaccttattcgagaggaaattcactaatcttgaccttcgctttagttcgtagctatcttgacgatcatcctaacatacctacctgaactccctcatctcatcggcccaacttaccttccggtctctgtcaataaccatcgttattgggggcctcccggtttccgtcagacgctctcaaactggtcagaaacgcttcggctgccaaaatatggaacttctctaaagacgtcattatccatgctggcggtattatcgcaggtgttgttgaattggaggctgggaacgttcgcaggatcgattcctgcttttgcatggactcaagtagtgggcaccattagtacgttgctttcttcttcctttgcttcgctatttctgtctccgattctcattgattctcacaacgctcttgatatgatctatagtctcatggacgccaacagttttccacactatattcggtaaattccacgcaacagatcctctcgagataagcgttgtcgtgaggttctgtatcgatctagtcatactctggcaggctgtcaatttgccgaccgtcaatcaggaggaagaagaggatgagtaaggtctgggttttctgtacatgacagcaaagcgctatgctatctgcatatacaatggcatctatctgtatgatgaagaacaacgtgtttaaagagagatatgtaacttgatagatccagctacagaaggtagcgcacggcgcaagtcacgtggttaccgtgaaggctgtgcttgccccgatactttcttcccctccttcctccttctatctctcaccttcacccaaacatcctccatttctctcgtccatctttcctctccttccacacaaacagactcagaggctagccaggtgcactctaactactcaaatccagctcatgaatcggcaccggtccaacatggatcctgggtttcgtcaaaggatgcacgtcgtgcccgcagcctacaaggaaggttctaaccggttgaaccggagggatagcgttgactgtccgacctcggctcctttgtgcagttgctcagccggatacagctgtgttgctactgccaggtaaggaatgcttctccttaggatttatcctcctccagcttctgttgtctcttccttttccttattccaaagtccttagcgattgtgctatcgactatcattaccggcaccgcctgctttccttggaatgtttttcttattcttctcacattcttgatcagacaagaattgcaaagacattcagttctctcatctcacgcaaattcggaacaaacaccatctcaccgtgcttctaatttcgaacatgtttacttatactcatgctctctacacgaacacaccgttacagaacaaaaactacctgtgcaacagtctcttgtgttaagaactcgaccgacgatgacaacggagggtcaatcaacccagggctaatcgccggtccgatcatcgcgtttcttttgctgtgcagtttaacggtatggtggtatcttcgcaagaagaaggtccgtcagtttcattcgttctggctacacagagagaaccgatgtgctgaccggtactttgatttcttcatcacctcttcaggcccgcgatctggctcggctggccgagctagaagagcgtgcgaaccggctggaggcagcccaacacgaagttctctctctcaacacacgaacgcctgggattactcctaccaacgttcatttcggacggtcttccggcccagatgcaccagaatcctctggtctcttgtcctccttcacaaacgctgacaacagagggatcttatcgaggcctaacaacggtcggctcctcactgtgtattctacagatggcattgacctcgatcccgcgaccaaaaattcttccgaccaccctgggattcctctcgcgctggccaatcaggacccgttcgcggatggagcgtcctttgtctctggtgacgggttctccttgctctcccaagcaacgaacgtgattccgatcgcttacgttcctacctcgggctcctctccagctcaatcagctggacgaaatttcagacccgatcataacctgggtttcgatttggatagagaggacttgatgtctcccgcaaaactcactacagtggtatcgcatccgggagcattgatcagaccatcagctctcccgactccatctgccccgtcagaaagtgacgacagactgtccctcatgagcggagcgggctcatttatgtcgttcaactcaaacatgtttgtgctcgacaccccaaagattgcgacagctcagaggttaaacctgagtcagatggcttcaaagattgtcccctccccgtcgttcccccactcgatcgaccagagtccggtttcacaaaagacaaacaagcctacgcctgtcagaccaacgacggttcccaagatcaacatcggccgatcgcctctttcccaagcccctgttcaaaactacgacccgaattctgcgtcatccgcttctttcccaactcttccttcattaccaccatcaccggcacctcttacccaatccaatcgatctgaaaccgacatggaccctttcactgatgatagcgccgatacgatatcacttccgtcgatccaccaccgatatgatccacggactttgtcgaccagtttcccccaacagcccagattcccctccgacacggaagattttagattctcaatggactccctggcggccacaacgtcctacggaggttccaacttcggtagaccggagagcacagcaagctcccagggaagcgtcatgatcaagagtgcgacgatcgttcaagtcggccaagaattacaagcgggtagcctctttagatcaggtagcttgatacgaggcactcagcttcaagctcatcagcaaccgtcggatcctaattcgatcagcagacaagacttcttagcagagcagccgtcgtcacctacatcaattcttccaccacctgacagaggagaattgtttgcctctacttcaacttcgaatttcaactcaggctcaagccagagggatacacagtattcgcagtattccctaggtgcttttgatttcataccacctgctccagcgacgacccctcctttccctccttactcttgatcaaacatgtagatagagttgaatgtgttgtagttttctttcatacaaataaataaatttggtcattggttcagtatagtatccctcttctctttgtaggtatttcttaaccattcgtttctttttcaaagggatacctaaacttcctgggtaaaatgcggctggttccgccttctcctttctctctttcctgctctgtttgtccaccccatctttcttgtctgtcctttccgttacctcttcttcgttccttgcgcgcgcgcgtgcgtgtaaacataagttatacccacactctcccctctttgtctgctcatctcaattgtctttcttcttcctattagatagctcatcccaggacaagtctctatatcatcatctctctctttcctcttggtcatgatgtcatttacaaataacgatacatcgatcaatcctttgccctcagaatacccactcacacaaacaggccgagacagcgaagtgaatggtttggaaaggaaatcaagagcaagacatgagtgtttgatgatggggtgttacgttttggaactatgtctgggcaacaaaagtagtttacaagttgcaaggagatgaaggaaggtagaggtagaaaatgcgttccagatatgtaggaaaacagcaagggtgaagtgattgcaagagagcaggaaaaggataacaggtgcattaagagtatcgcgctcaacaacattaggagaataaagaagaattgaatcgtccaaacagggacccatggaacatgctctcggatacagccttagatttgatagcgaggcgggccttcctcctcactgaccatactcattgaccgacctgatccatctgacagaattcgcgtcccatcaaccggtctgtaagatcctgtttcttcagctctaggaccggtcgatggtctacttggctgtctgtgtagttgtccgtgtgcctgtggatgcgcatgagcatgtgcctggagcttaggatgagggtgacgagaggatgattgagaagggcctcgatcaagtcgaggagagtcgccaggaagaggtgcatatcggagtgatcgggatctagacatattcgatacctattttccgaatcaatagaaaatcgaaaaccatcaacacccaagtgtttttttaggtttatcacatgtaagaacgattaaaccactatgcgttccatgaacaaagaattgggtggacttgcattgagttgctgagctgtattcgagaggttttcttgatgcctcctattcaaagtgacttgcctatcgcaaccgcagatgacccaaaaccaacctaactgttcgatccaacgagcgtaacaaataagaatgaaaagtaaaataaaacccaccgttggacagccccaccgatcgataaggtatcaatcttctcagatggatcat

SEQ ID NO: 1737 - DNA, 6531 bp, Xanthophyllomyces dendrorhous
atctaatacactatcgtctgttgaccactcattctgtttgctcttcctcagcacggcccaaaatactaagccaactgcgaaaacgaagactcttgaaaagataaatgacgaatcgactgattagcgcaaacgttcatgagcaagaacaaaaacttgaacaagagaaactcacatgccagcaacaatccctgctgcgagtcctctgcgcgcaagcaaggggcaagtacagatcgaccgttatccttatgatcagtaaaggtatttgtatctaggagcatcaaagcttggcttacccaggagagtttactgaactgtcagaactggagtttgaactcgacgatgccgaggtactagcagcgacgatggtgttactactagcgacccctgcgctaacaaaagatgtatacacatagaccgtcgagaactcctgaaaagactaagtgatgaaaaaacaaccgaagcaaacatccgataggaatggttcttcagttaaaactgaaatttgtaaatatcaaccaatttcaagtggaaatcttaccgtagatacactagcttcaccatcagcacctgtgacgaccacttgaactgtctttgtatccattcctacggacgtcgccacagccattactgttgaacctaccgaactgggaccttgtacggacggagtcgcgctactctgtccggtcgatgtgccggatacggcaaggttgctgaccgaagcgtcttgtttatttccaatagtcgaagacccggtacttccggatggacatgaggtaataacagtggttgatacaggataggtggagacagcaccagctccagtttgctcagcaggaacgattacagtcgaagtcatcaccgttggagtctatcaagatgcagaagatacccagatttaattcatctgctttgcgaggtatagtgtacagagaaacacagagggaaaggttaccgacccccgttccgacaaaagtctcagttcgatacccctgacatcctccaggaacccccaggattccctgtccagtgctctcgcatatctatgttccatcgagtcatggtagaaagaaacagtgaagctgcatcagggccctgtgaagttcgagtgagatagaaggaattgcaagggtaatacgacaaaacacgcacagatgaataagaagttgtttcgactccgggaaccgtgtataccgcttgctatagatgaatacaaatgacccattcatcagaaatacgaaagtttgacaggtcaccttcctcattagacatgcactttcgaatatgaaagaatgaacaggcaaacaaactaaatagagaacccacagacgtgacagaaggacctgagactgaattgacggtcgtcgtcccgtataaagtcagggtcgaagtagtacactgagccatgtttaccttgtattaccctcttgagattgggtttgactgatgaggctagtagattgagaagtgtttgttgttcaggaagtcggtagagtcctgagagaagggcgcgcaaaagaggaaatgagtgggtcttgaaggagagtgagtgagtaaacgaaggatgtgggttttagtgaagatccgtgtcgaactcttctttgtgagttaagcaagctcggtaaggaagcaggatggtatgggtgagtcaagaaaacaaaagcagagtggccggtcaacgaacaaggagagccagggctgaagaatgatgaaacgaggaaccgtccgtccgaggttcgatcctgatttctcaattcatgatgttgagtgagttacacaaagataattcatgacaagaggcaagattgacaagcaggttgaagaattggtgagcaaccacatatagtgtcagtagagtcaatatagatatcaattctcaatcaaccaagcagagatgatctaattttccgcagaagaccaagcttagtcgcgggcgcattcgacctaaaacgggacattgaagaggagtcgacagcatgaagagacatacaaagtatttggaacaagaaaagtatacaaacaaaagtgaaattgtaggaaaaggataggattcacaacatgaaaggaggtaagaaaaaaaaagaataaccctgatcaacagttcagacaatgtgaaaggaaaaatgcatgtttgtcagttctggggattaccgtctgtaccattgtacagtggcacgggatcgtcggatcttcctctgcaactggagcatgcctgaagagataaacggagcaaaagaaagaagttaatcatttgaacatgatgaaacgatgaaacaataaactaagagaaagagattaaccaaagagcaatgcttcagctgtgggtgggcacccaggaacgtctgcgaaattcataaggaacataagttcatgtcagttggccggtttgatgagaaaatcgagaaacctggatcggcctacgcacaaatatcgacaggaacaattcgatcacaacctcgaacgacagaatacgactgaggaaaaaaacaacaagcagtttaagcaacagcttcgatgaacagccaacatgaaacgttatgatgacctacgtaatggtagtatcctcccccgttcgcgcaacttcccatcgagatgacccatcctaagagagataaagtatcagtgggtggatctatagcatgagcggtggctgttgagaataaaaagattgactgacgaggctcaggcatttgatcgtaaactgtagttgcacaggccaacaaggaaggctggggtgagcagccaatcaggacatataattgataagccgcccaaatacttaccttttcgcaaagcaggggccattttgttggtcaacgttccggcaacgatcatgacatccgactgacgtggcgacgctcggaacactacacccaatcgatcttgatcgtatcgagcggcagccatgtgcctttagaggcaagatcataagtataaagatgaacgggtgagcttttggaaactctagagaacaaatggagagaaagaacgaacatcatctcgacggcacagcaggccaatccgactgtagacattgatagaacgggatagatcattagatcagatctgacaagtaccaagaaaatagttgaacaagatttcaaaagactcacatgtcatcggccacatactaccttgtcgagcccagttagcgactttgtcggctgtggataagacatactctatagttgcagagaaataaaagaaatttgttcaagattacaatcagatcgaagagatagaaagactagaagtgagcaacacattcatctcgttacaaacggagctaatcggggctatagagtatattgtgcaaaagtgaatgaaacaaaaagactgaaagactaaccgacagagtttttaggagtctgcaggctcaattgattcgtgccctccaaagcggacaccgtagggggaacgatggccgactcttctgcagtcaatccagtgtagccagtcggaatggagatgctggagccagagccagcagtgttagaagagatctggccaggagcggacgaagatgaagacgacgacacggatcgaagggcaaagttgatgtgaggtgttcggagcagtaccgaggaaggcgaagctgagtggatagagaacattccgagtttgatcaagagacaagagcgaaaggcggaagcgaagagaaaggaagaagatcgagatgagtttctttggacgcgttctcccaaggtcatctcggataagaactgccactacagttaaaaaaacaggcatacagttctttaagacagttcgaagcatcgtgtgggtaagcaagtgaatgagtggacgagaaggcgaaagtgtacaaccgatcggaataaaggatgtgtggtgttgcaagtcaaaggatggaggtgtgtggggaagctgagaactagaaatggtccgattggcggttcgtgatcgtaactaccgtgtaaacatgggtaacatccattcgtgtcaggcacggggatcgaagagtaaccaaattacccaaatcacctaacttacatttatggaggtttggaatgttcatggtgcattagcgagttcaaaaggcgtcgctaaggattcgaaatgaccatacttagtcgaaaagacggatatttagacatcatcatcattgatttgggttagattataagctcttctcagatcaattgaagtgaacatatgagcccgactcaatcgatttagaggttcgtcgatcaagggtcagggcgcgcggtttctagtggtgatctcattttgtcgttgaaagtcgacgcacattcgaagactttgattcttcttctcaacgataaaatcagggcgcctgctggcgatttgtattttcgaatgaatcccttctgaagattcttgttgagctactcacgtggtctttcgatctcaggatcggacatagtacagagtgacccaaaaggaggctgggtatcagactaaattgatacaggagggtcatgactaggatgacaaaacgtgaacgtatcattggagtagttcacatcagaatcttgtctacgatgcttagggacgtccaagatgatgtcggcagatgcagatgcagtcgagcgaaggagcacatcctctgcaagacggcccatatcgagttgacacatcatcatagaatcaatctaattagttttcaagaggtatatcatccatgtgcattaccgcgcgcgaacaagagatctgatatgtattagctgatacccggttcgctaggttctggtagacaaatcaaatctgagtaccagaatcgaggaaagcttgaacaaaaatactgtgcaaactggagtgtgaggtagacaagatgaaacgggttgctcaaacacagagtcatgaaagacagaacttgaaatatattcagagatggagacatcaacaagggctgaatgtgggaagctcgctaggtaaggcctcgatcgaggttaagggaatcacataagaaggcagagcatggggatttggtatcagacgagcagaagacaaggcggggccaggtatatcaatgggaggattcttgggagagaagggcataagaatgacactagtggagatagtaggagatgcataatgattgggccgcctgatatcatatatgggatgcgggctcaatagaggtcttcccactgagccgtgtcattttcgaaacttctgtttcattttccgtagcgttgacctcggccattttgaattaacggagatcgcgcgatcgtagaggacaatcaactaggatgtgatctggccggccgcaatgatggcataagttcagttgttgtcggcgctctcgctctcgggaggagattgggtgtcgagacgttcggatcgcttcaacgtccgttgaagtagggttctccatagagactggctgtagggggagacgaggaacagaccgaagtatcgggttgactggtgcagaatgcttcgcacgagtagcgtcttcccgctcgaattgcgagagttggttgtcgatccgaagaaccaaattcttcaattcttcaaacgaatgagtgggtgggtaatgaaggagctccttttggagatgtctcttcaaaccggcatagaactgttccttcaggctgtaatcattcaaggaacaatcgatgataatgatatgaatcgaccataatattcggctgccgttccggtttgcatcagcgcccgaagttcccgggaagcggtctggatttcgtcggggactccaaaagtgtcgttgaggaacttggcgaaaccttcaaaggaacgaattctctcaggcttatcgtcgtcgtcccatctttccagactaggcgttatggtattgagaggtggacctcgaaggtgactgatagcgaaataaagtttcttcttctccgatgaaaaatgctcaagatacatgtcaaaattcatccgacaacatgtcagaaaagtccggcatgctctaggatcctttccatcaaataaggtaggcgccggaatcttaggctccggcgccgcgcaggtagtctggagtgtctggagataccgagcttcagactgctgcaacctaagccggaggctggtcacctccgactgtagtttagcgttttcggcattcatctcaatgagtgccttctgatccccagaagctgtcatgttgtcagacgaagagttgtacctgagtgaaaaaccctaagcagcaagctgaggtcattatgagacccggagattagagagtaattgagttagtaggcttgaaacaagggcggatacttcaacccacgacgaggatcaccagattgtagacagagattggagccgaccaaccttttaacaagatactttagataagaggtttctgcaagaatctcagcttgaagaaaactcttatccaagaaggcgcgagagtgtcctcgttttatatcaggaccccttgcgcatttggtctgccactaacgatatacgtatgacgagcctagagaggatcaagatcacgagaactaaagagaatgaggcatgaaccatgcaaactagagcatgatggaaaatgggtgaagcggcagaagcaggaga

SEQ ID NO: 1738 - DNA, 4187 bp, Xanthophyllomyces dendrorhous
tccttgtccttgtccttgtccttgtccttcgtgattctatctatcctatttcccagtcctgagagcctgaatttctcccttgaaatctaagagtcttgtgtggttacaacttccgtagcctcatcgttaccctccaaacctgaactataacactaatcatgatcttatcgggcaactaactacgagaatcttggatcatcgctcttccatcttaatcgccagattcgcatttatatacaggagctattcaacacggtgtatcattatatgctgaatttgaaaaatctttgaaacaagagggaagtccattgaatggcgtcgccgagaccacgaacctgtcgtcgtcgtcttcttctgatgagtttgccagcctcagtcgagctatgtcaacgtacagatttatttgagtgttcagcttggcaaacactggaccatcaaccgaatccgaatgacaactgctatcgacgagcacttggccataaaatgagagggagatgtaaatcaagaacttacatggaagtcaatggcaacgtctttccacgttaaatcgctccaaagcaccatttcatgaagtctggcaaagttgatgatgtcttgagcatggaatctttctaagtttgccttagatatgtcggccagggaatccgacttgagatgtggagtgtccaatgacggaagtgctctagaacaaccattaatgcacctcgaaggacctttgcaatgagctgtggaacattcagcctcggtccttactgctctgcaactttcacactcttttgtatgccaacagaaatctgaaccacttctaaagtgaaagagtgcctggcgagctaattcagcgtcccggtagacaacggccagcccgaaaacgttgatatggtccatttctgtgaacacccgaaggtacgtcaagatgaagtctcgtataattggcgtgtcgtacttgtccgccatgtctatgatcctgatcgtcgcagttcatgcccacatagatgaaaaggccagctgaggtaagtgcgacgaaggagatggaggcaaagacgacgaggtggcagagtggccaacctgttgcagtcttctatggctaaatatctcgctcgtcgcatcgaggggacgataaagctcaggaagagcttcaagtcggatcccatatcgctcagtttgacaacaggcttccctcctatcagattgccagacaaggcaagttggagcatgtcgacaaagacggctgagttcgcttgtagctgtaccttgcggacgacgagggcgagtccatctgagctttcaaggatgatgtctccctcaggatctagcaggactaagtcctcgttagagttgggagtgttgtcggacatgatggatcttgaaagctattgtctaaaagaaatgagaagggaatgtcgacaaggtaggaaagaaattgacaatagatgaagacttgtaagctcttaaatgagccggaagaccatactattgttcaacgttttgtgtgatcagttcattacggcgcttgacgcacacgcaaagcccaaagtcgttttgtttgtcctccctttcatgataatttttctactttgctcgaaagtctcgtcgcgttttgtgaatgtcgtttctaagtctaaatatgatgcgcaacatagatagagtacagtccagcccttcgaacaaacggattaagtcatggctgtgacaaagggagaatcaagtcatacaaaaattgatacaaaatgcacacatgagccgaagtacctctcttgagcatacattggtccagttgatatatgatacgtactgtacttgggccctccacctccttccggtacagtccaggtaatatcttgtgtgggagtctaaaaattcacaaaaaagagaggcggcagtactcaatgattagtctgacgatacacacagatggggaagagtgtttgtcaagccgagtgtaccttgatggagcaagtcttgcaatgaactgaaacatagatagacacctcaacatcagcgttgtacttggtcaaagtttgagatccaacaaatataggcggacgtactgcagttttgtgagttgatgataaatttcttgccttctgcagcgtcagcatctccaggctcggcatccacatactcatacacagccgctgggcaagctcgtcccaagagtccagcgtaatctaagaaagcatccgaatcacttgctcagctattcaattctgaccaaaatgttgctccagacaatagaggcaaattcacctcgaacgttggtttcggtatgccgaactttcgctccttcttcgttaggcagctgaagatgcaccggctggttttcggcgtgattcgtagccgttaaactgacagatgtcaggatgtcgaacgagagctttccatccggtgccgggtagtcgatcggcttgcattcactacgatcgggtcagcccagtgagagtaagagcatcagcaaccgacaaaccagagaagcgattctgattgaatgaattgtacctggctttgttggtggcgacgtgatcctcaacattgttgtgtaacgtaaatcctccccttcctttgagaataaaagtgtccaatccagaaaagatcatgcctcctaggttaccgagggggttgtggaaactcggtcggacgttcctaacctcccaaagctctttatagatccaagagttcttcaaagcggtctcgtacgactccaggtttacaggaatagactcatcggcagattccgaagtagaagtaagctgttcgtaagctgcttcggccgcgagcattccagacttcatagcattatgagttcctttgattttcgggacctgatgtagcaaaattcgaccaaggaaagaacagatcagcgtgagttgagtcattacctaacttgtgttatttgtaaggtaatcttacattcacaaaacctataagagtagagaagtagatacaaagacagcaaatcattaccacatgatcgttacacaaaataagacggcagaagaaatcactcaccagctgagcacccaatgagcgcaccaccagggaaaaacaacttgggtatcgattgaacaccaccttcattgaggactcgcgctattgaaagaagcttgcagtcagacgattgcgcgaaggatcaactttaggcaacatctacaaggacagcagacacacctccataagctagacgctctccaccctccaaaagttttttgtagtatgggtgatgtttcattctctgcaccgatagggcaaaaacgaagaaaagtatccatcaccgatacgtcagttgcgagttcctcgttcatggcaattaccaacaacagaggaaaataaaacgtacctgaaactctttgtacggattcaaatacggatttgtgtagtcaagtccaatgaccaaaccaagactaaccattccaccctcagtatggtactcccatccaccaccatacgtcttccaatctaagggccaccccatagtatgaataacctttccgggctcatacacttcatcccgaactttccaaacctccttcaagccaattccgtatgtctgaggatcgcagtccgctcgaaggttgaactttttcatggcgatcttcgataaacttccatgagcaccctctccgagtaaagtcaccttggaaatgaaattcattccgggctcgtacgactccttcattcgaccggacttgtctagtccaacgtcatttgtgccgactcctcggacagactttccatcctcggagaacagcagtcgagcgcctgcaaaaccggggtaaatctcaacaccgagttcttcggcttgagcggccaaccaggctgtcacctgagaaagggatacaatgtagtttcccttatttgacatctgaggaggatgggggatcgggtatgagctgttgggaaaaaggaagcgcatagcaccattgctggccggttggttgagctgaaaaaggagaacgttatccagttaaagactcggtcgctgtaagagaaatcaataagtcgtaaagggcgcttaccggtgcccctagttctttccaattcggtaaaagctcgtcaagagccttggtctcgatcaccgcacccgaaaggatatgcgaccctattaaacaaagtatttcagagaaaagaaacagaattacgtcaaattgaggcactaaacacacctgcaagaagaaaggaagagagtacac

SEQ ID NO: 1739 - DNA, 7884 bp, Xanthophyllomyces dendrorhous
agaaaaagaagtatgaaaagaagaaaacataccagcttcagctcctttctcgagcacaacgattcgcttctcctctcctccgtgttcctgctcgagctgtttaagcctaatggcagcgcatagaccagccggaccagcaccaacaatacacacatctacctcttcctcgacccgctcaacatcatgcggtggaaactcagagaaccgaaggagggagcttgaaaaattttgtctacgaatgtggatcgggttacgggagacggctagtgctcgagggcggaaggcagccttggcggcgaaagctgctggcgttgaagctgaaagtattctggaagagagaaagggcatgatgaatgatgctcaccaggatcagataacacttaatccgtgtatgcaccgatccgtgtttgttcttttcagagtttgtgtgaaggtggatagaatgatcgggcaagcgggtgagaaagaaatagaggaagataaagaaaaacgaaacactgaaaatgaccaaaacttgatggaggcgccccggcggttggatcaaaaccggtgttctgattggtcaatcgaccgtcgacctcatgttagccacagcaccaaaaaaagatgactcggatatgatcatttatagaaaggattgaatggacaaatacagctcgacatctacatagctagtctatagaagaaggatttgtttagagcaagatgaggtgaaaagaaaagagaaaaaatgtatatgtctattacgccctggctggaacattcgacgccgaagacccaaggccgatactctcgataactatcaaattgaacacagaagagagacagtcgtgatcaatttctgaattgttttggaccagggaaaaccccgtttaacaccagaacttactattaattgcactatcgaattacaccaaaaagcgaaagggcaacctgtcagcttcttcatgtgccaacctatctatcctgaagacaaagacttacgaagcaacgtcatcttgaaattgagctggccccaagatgttaacaagccctgctttgacaaacaattctttctgtgtaggtcggagatgggtaaagaatatcggcactcctctcgctcgatacgaaatcgcaatctcttcaaagatcgcaagcgctctacaaattgagaagagaacagaccaacgaaagcgtcagtcggaagatcggaggtgaactcaataagttggaggaaaattactcaacgaagcatcgatgtactctacatccgacatgtgaatcacaatcacattcgcctccgtccgccgaggtgcttctgaagggtgggccttactcggcccgtacagttccagtcgtcgaaggcgctctttcagttgtccagtgttggctaggaaattcaaactcaaggttagttgccataagtcctcatccggaatgaaaattttgtggcaaaaagtgactggacgaaccaaagttcaaagattctctgatccgaatgaccagcacaccgggaatgtcctcctcagcctctgggttctcatcaattgccgcccatttgtcgcccgcgcctcggacgtgaccaaggatcttgatccgggtctgggtagagttctgcacgacgaggatcaatgagaatgcaacagatgcgacaagtccaggcttttgtttggagagatggtgaatggaagttagaaaggacgtggataactatcaccagagaaagaaactatgtacctctacgccgacgaaaagagtcagcaggaaagtacctgtgaattgagtgagatcctgccatgctgacaccttgagataaaaccgaatttcatgaggagcctcaattataattccgataatcaccataaacacgaccgccgcctacagacatagataattcgggagagataacggtcagacggacatcgttttgcatgatcaaacaagagttgtcacttacaagcacgcatttggggaggtaaaacaaactaggaagtaggaagctgatagcgacgaagatacagaatgccgaaacaagcccggccatctgcgtccgagctccagtctctccattaagtcgggatcgagtgacggacccttttgaaagcaacaaacccacgcacgtgttagtcattgttgtgtcgttgatgagcctgacttaaacaccaatgaatatgatcaaagttggacgtaccaaaagcaggaactaatccagggaagaaggacgaagcgatattggaagcacctgaacacggacaacaaacactcgtatcagtgtttgcgagagacaacttggagagcaaaatctatgacaggggaaaatcatctcacccaaggcaaccaactctctgttgggagagatagaataaccaaacttgccagactgttctttggcagagacaatgctatctacgaagccgatcacactaatgacagcagatgtgctgaactagaggtacaatgaaatggccaccaaaaagtgtgtgcagtttaggctaggctatttggcatcgaatatcgactagtcaccacatttttgaagaaacagacgtaccgttcggatgaagaatttcagtgtatctctattaacagggaaagcaaccgatcctcctccgacaacggctaaactttcaatcttgcccaacacctggagcccattgagatcccaccggtacattctggcgagtactattgaccgagttacaaatgttgtgcagaactgattaagctgcacccctaaaacgccccaaattgttgcatgaataaaaaaaaataaaaaagaaggccaagagcttacgggtagtgatgacaactcctacaaaaatttctgggacaaacttgagccacctaaatcctcgtcgattcttcatcaacttcttggtcgctttggtaacaaagaggaaagcgaatgtgctgaaagaaatctatttcatagcgtttgcaccacggtggacgatggaacgaggcgttcaggacaggccgagttctaagctcactacgaagcaaagtctgactacgaaactcacaattgcggtcaaacagtgggtttccgaaacatgggtggccaaaaatgcaactttcgacacggtagtgtgaggaagaggcaaagccgcaatcttttgtgacagtcccagcatacctcccagttgctcgatactaatgattacggcaacagcagtaactgttgagacaaataacgaacgtgcgcagatatcaggatatgtatccaactagaaaagaagacgcttcagaacatgacttactgaatccctttagcagggctctggataagactacgtctaggaaccctaatcggaaaatcccgaggccaaatgtgatcaagccaacctgaacgacgatgatacgttaagaagaattatttgtttaagttaacaacaatgaaacgaatcttccaggaggcacgtacctgccatccgatagctgttgcgacatcaacaccaattgcttgtttcgctgcatcggaaagcggattgtgaacgtcacggtccatgtgaccctagaagacatcatgttgataaacaagaggtgtcagcgacgaaaacagcaatttaagacgcagaaacgggccttacgatgatctcctgaatggtatttccgatcaacaagcaaagcgccgcttctggtccgatagatagttgtctgcatgtgcccagaagggcataaataatcgctggcacagccgagcaatagagtccagagattggagagagctttgccaactgggatgcataagagatgccttgtggaattagtagacacgttagggtaatgcctgccacaacatctccagtaaaccttgagataaagtataaaaatgaaaggaacaaatttcagccacggcaatgagacccatgtggccgagcatggcggcaaaaatgcttacagctcgaggttatacgtcggcagccatgataagactggaatgctacattaataagggctcaagctatgagcgttccgactcgtcagattcaggctaggaggaggaatcagaaactggcttactagtactttgatcttgttctgaacgtcatgagacgtctactcttcgagccctcctgtagatcttcttcaaggtcaccggaacctttcgtttggatcccttggaaaaaaggtgtatcctccgccaacatgcctggtgtgaggacctgctgactgaaagattcgtcatcatcaaggccagagattctagatagaccgctcatgctctgttgctttctgggtggaacatatggttgctgacgtgctgaagataaggtcgaggataacaaaggagtggtagaattcggagcggccgttgtaggtgtgagatctgtatcagtggggaaagccggtgtcggagctcgggaagtataagttgattggtagcccatcgagctgctcgagaagctcgacatgattcagctttcgcctgtacagatctgaacgaggggtttgtgaaagatgggaaggtcgagagagaaagggagaagaacaagataggaagaaagaacaagagagttgaagcacaacaaagccaatgggaccttgagtatttccagagttctcgctcatccccgacatttcatggtaacaggttacatcgtcataaattgaaagttcttcgagtacacaagaagcatatagcatagaggaaatctcgagtagcagtgatagtacatcaggacacgatttgccgtcgtcataaactctttcttatcacatgaaccaagctctgcagttcagaattggtgagataaccataaagaaaggaaaacatggtgcttagttaatcaccaagttaccgtcacttccaactagaaacgaagaacgagacgatcaactcacgaattttggaatcctacagtctcattgatcctgtcttgcacctaaagtaagaagacaggcgagtcgagaaagatatataaaggaagattaatcatttaatcattcaagatgaccatacacggaaggcatctgacgtacatccataggcttgaagccctgtatagttggctctcggccttgggagcggtagacctgtgccacagaagaggatgggaagagtaaatgtgtgccgtttatggaagaagtagatatataagctatgggactataccagaggcctagcagcggccgccaaaatatcggcgtagtagcatggagtcacaagacccacgcttaattaaaacccacagatgtcagtgactccatcaagcataaccgccaaaagaaaaaaattgatttacgatcgagtggcccgtccataggtatagcacaaattgtaagtgagcctttggaactctaatccaaccggccatccgaaaacgaatagatcagatcgccacaatttgccggttactatggataatccttcatactgatagaataagattggtgaacagaaagacataccatcggctgtaaacttgttttcgtcgaccaagacgatataatgggttggctacgtagtcaagcgagacacctgtcttgtcagattcgaatccaaagttagaaacatatttgcttgttgcatacccttgcagttcccttcaatcctgtttgagctgttcatgattttccattgtgcagatacgaaacggaagagaaaccttagatcgagtaagttcataatgtcagggaactgataagctacaaaacacttacactgcagatagaaatcattcaagtagggatgcgtaatccctttatcacaaaccgttccagctggcaggttaccggttctatcaatatgggctctgagttgataacccacaaagtgccattagtttgacaggtctagaagatgagaggacagcatgatacttcaaagaaccaatactgactgctgtccaaagagtcggatattgtgccgtttcgctgcgatacagtatgtctatgagggaaaagatgatgttgtgcacgtcgtcgacacaaatcgtagaggataacaaagaaacagattgctgtagcatacttacaatagttggttgatacctatcgcgtaggaaagcagatgcgcaactcagattggcggtacagaattgatgtctgaaagtaacgaattgaagtcacatactttggattgatagttctacaagcatctcggattgctttgacctcagcaaggacgacctcttcgtatgatccctatgaaggtgaacccggctgaatatgttaggatccaaatattcagataaactgatgtggctcgctgacctcatcgactctacacgcatacagacaaataatgagaaaagcattcagctgcgagcgatcagagagatggacgaaaaggcgcacccatctcggtagaagacgatccttgtcgctggctggtttctgttggctttggcgtactctcgaagcatcttttcggttatgctagccatatcttgaatgatttccctttaaagatgacgcagacaaatatcagtattcttcggagatcatagccttgttcatgatgaagaagattccttactgtcggcctaaggaagataattgaagattcagagatatcagcatacatcatttatgccaaagaaggatgcgaagattggaagagagggtgaaaaacttgcctgcttggagtctgacaaataaaacaaagtaacagatgagcattcactagtttgggctgaaggacagagacccttgtttccatgtttctaccaggggctaaccttatctcagaccggtacttcgcattcgtaccatctgtagtggccacgaccgaagcggtagtaggtacatcgtgtgtatcactcccgcgcaaagttgcaggatgagtgcacttgataagtaaagcacaaaaaggtcaactcagccaacatcattacatcaaaatcaaaatcccatgtaacggagggtctcaagtacttacatccgctccaaaaataatggtactattcgtaacacccggctatgaaaatggaagaggaataaaaaaaatgtcctgtatgtgacatgatatggagctcaagactcgatctctggacttacgagatcgttcggagctacagcgtgggtcactcctgaaagcttcatgttgactttcatggcaacctgttgaatccaaggattgtttacatcggtttactggtcactaaaccgtttgtagtgagatcgtattgctcgacttacattagcacaatactgttgaaggcctcgttcattcgggttggtcaacttattggctattaagcattgagtcaccacaggcatcttcatgctccagctacaaagaatcgatgtcggatcgatccaaatgagcgggaagagagaacatctgagcacgaatccagaagtaggacgaaacctttggtgatgagacatacaaggcagcgcttttgatctgatctttgaggatcgtgtccttcttcggcaagataacgacgaccaactgtggctctcgggtgccctgtttcgttccaaaggtaatgagaatagaaacaacccatggttagacttagtttgcaggaaacgtatgtgaagaaatcagtcatgacttgcgttcacgctagcctggtcataaccccatttcagaccatcagagatggactcggggtttcgtgcatgaaaattcaaagtcagaggcggcctcttttggatgacattgatgccttgagatagacgagggtcccaatagagattatatcactaacacaatccttatgatgaagagaaatattgaagtacgtaccaacatcgctcatgatgttgacgaaaaacatgataaacttttgtaagtcaggaagtcgcatgtaagagtccaagcagacaaccgaccacgcaaacagatcagtccctttttggaagaacgtctgatcaagagcggaagtatatgtatcaagttatacgataagtcacgatgaagatctaaatgtatattaaatagtatatgac

SEQ ID NO: 1740 - DNA, 7476 bp, Xanthophyllomyces dendrorhous
atattaaatagtatatgactaaccttgccgttcaagttccatcctccatgagccggatcaattggtcttgggtttctgccaccatagtgaactgcaagctagcatagtcagctactttgtataggcgtaagatgtttgaggaagtcaaagacacatactcctgggtcctctcaagatacgcgcatcaacctccatcataactttagagacttccagcccccaggctttgaattttggctggctatcgtacgccaaaatctctctccatttgatgatgttgcttctcctagctggcggctcaactgccgtatgtttgatcatctctgccgtctgttcgctgttcagattgatcgggggcctgcacgcatagtgacgcttagtttcgatcacttcggatgtttgtgtgaaggccgcacttacaggcagtgattggcgctgatgatcacaagttccataggaacaaagttctttttgtctaaagtagatcaaaacgggtcgataagcttggctctggtatcatagaatctatacgggctcacatgtcacacatggccatcctgggtgtgaaagactgatattataaatattcttgaagtaatcggcaacttgagaaggtggaatatgttggaagaagtatcagtgtatgtgcttcgacagaagaactcggcgacgaatttggtggcttgcctgaagtcttcttgtcattcttggcgaagaacaactggtttgaacccaagggagtgaatccagagatggtggactctttagtgttcctacgatcgaaattgattcggcgaaaaaagaaatgttagaatagtggtacttaaacatgtgacaaagacgcggacctacctatggctgacagtgaaccttgagaatatgaatgtccagaggcaagcggcaacatctcagtggctgattgatgacaaaacaagtagagcagatcacaaagactcacttcgcgcgcctcaagatccgtcgtaatatatcgatctggtccgaggaaagagtagggggcaaggcttctccggagccaccgccgaaccctcctcttccaccaccccttccgcctcttccgcctcgaccacctctacccccagatcctccactacccaaacccagaattcgtgcagcaacttgaggcaagggaccttcttgaacaaaagcactgtacgccgtgtctgagatgtcacataccaaaatgtcaatcaaaacttttcgccgacatatgtgtgaaatttgatatgatcaactcaccaaggttgatagctggatatttagaattggtcggccgaaccgacctgttgtaaagacagaacagatcaaagaacatatacttgggtcaacttgtcggatgcataggcatatagagaattagagataggatggaaccaggaagtctcagtcgtgaactcaactggaaaaaccctttcccaataacagctccatcagcaaggggcactcggtcttccatgccaaagaatttgtttcctcgaccaccgatcggttcaaatcgcttcgagggctcatctcggatcaggatgttaagagctgtcagagccgtcatgaaaacctcaggcatatgcgctgctgcaatatcaccactgcagtatttgaaaagaacggaagtatctgtcatacaaacacatgatgcagatgcatatatgtgtcagtgcggaatatctgatcagcatcagtggtcaatgtgttcgaataccaaagtgcttagggttgaagcgaaccaattttggcagccagcttgaatgtcactttgaatttttggccctcttcgcggggatgagatttgtcagtctccggaaggtcgacttcgaatcgttcgatctcattttgaaaggtaacggctgtaagggcacaatcaaggagttggcacctctcatcagaacgtcgaaacaagaaaagtgagataaataattgtaacaaactggtgaatgcattttgacgctcgtcaaaggctctatcattccaaacaaaacacggtactgagtgcgaagttcgcggtttgaagattctcagtagaagtaagagggaaaagtgcatacaaagtattgaacacctgagcatatgcgccggtagcctgctttgagcagagttcttgaaagacagccctcagtaagccagaaggatacttctgatttgctgttttctcaacctactcaaaagtatcatgagggagagcaccgagacaagacaacgtctgaatatttgagcgacagtccaaacataaaagagatgggagatttgacgaaccactgtgatgacgacatcatagtggtagatgtccctatttgatcaagccgtacgcatgattctatcagcatgaggcttgcatgcatcttcaatatgtcatctcttactttggatttccttcgaaccgaattgggtacaagttcgcctggacctcaataggttgtccagtcgtcccaaagcctatcaccagttatcagagattagaaaagatcagatcagaatagaattgagatagcagtgtagtcaattgcatgtaccgggacgaggcgagaacactgagatatagacgataaggaaggtcgaattagtatacggcgtcctcacaaaggaccagacagaaattactcgactaaattcacgagatgtaggcttcgacaccggatctcctatagagatggaagtctttggtgtgcgcatatacatcgaaaggaagaggttgatcaaggagtcttcttacaaagaaacggtaattatgaccgcaatgacagacggacccttgcttgtttggcaatgttgggaatgttgatcttggtgtcagccatgttgtttcctgtttgaggacttgatggtctaaatcagacttgaaaggatggattttgagaagaacgatgagtatccgaagtttgaggataggtcttcataaaatattgatggctgcttctttcggtctaaagcgaggtaaagacaaaaagtatcataaacacacagcaactggtgtagaggagagtttgatcaatcataagttagggttgttagcatttctccgctctagaaacatgaaacacaacttccgttcatgtggccactttgctctttcaagacccacctgtttcttatcttatggacaaagcactctctcttcctacagctcaagactttcaaccaactccttcacctaggcctcctccgcctctgtattccatcgctctttctctgtcttcggagggatcttcaactgctgatcatcatcatcctccaccgtcaatcgttgcatctcctcgggagctagctcttgcattcaagcataacgagactccgccggctggcttgaccgtcgatgagaatagagaaggcgtggctcagcgatctactgggagagtagctggaccgattacacttgaatgggtagattttccgtccagctctgtagaaggttccattgatgcgtatgtatttctactctttttggtaccataaagagttgccattgtttaatgatcgtgcctgcttacttttggcaagaaagatagttcgtccgctcagcccatcgcttcccagtctggaaccttaaacttgcctctcggagtcgtccatttataccggcattcatcctcaactaagcccggtgatggtcagtctgctgagcgaccaaacttgcccctggcctgctcttcgtccgctcatgtgacggccgaggtgaagtctgcgtcgaaggagcagatagctcagacggcgcacgatacaacacttgtggctatcttagccataccatcctacatgactccctccgactttttggcatacgtaggacaggtcgaagaggagatggagtgtctacggatgatcagggatgtctcaccggcaagaagtttggggctcatcaagtttagaagccagcaagcatcagaagagttcatcgaggaggttagcatagtgttcgagacacagacgttacgattgttacaataagcttacttgaccgttcactttcatctggacagtacaacggaaagcctttcaactctctcgaagtgagtttgcgatctcattagatcgtgtctgtcaagccagctaacttttggcctgtgtctgttatgaattcacaagccggaaacgtgtcatgttgttcctattcttaatgtgctcacacattacgtgcagccgacttcagctgttcaaaccaacagcgcttcgtcagatgcaaactctgcctccgatgacctaaaagccgtgcctacagcggcatttccaatcatgctcgagtctgaacggccgagtatttcattaacagacccgttgctgaaggatacgtatgagctgccaacttgtgcggtttgtctggagcggatggacagcgcagtgacagggttgatcactgttccttgttcacattcatttcattgtgcttgtgtgagtcaagttttgggaaaactcaaccttacaagtctttttgctatcgagaacatctgacttactctctccaaaaatccgctgatggcagctttccaaatgggcagactctcgatgtccggtatgtcgatactctcagacgccgctttacgtaaacgcgtcaaacgcgaatgtgtcttactcgaggacaagatcaagtccccaagcgtcggccatagaaaacggcggatcacctccgtcatcttgctcgtcatgcgagacgagggaaagtctgtggatttgtctgatttgtggttcggttggctgtgggagatattcggatgggaagcatgcccagaagcattacgatcgtacaggacatatgtattctctggagttggagacccagcgggtatggaattatgctgccgttcgttccttcatcctgctgttcctcgcgagaggaagggtttcataatcttttcattcgcttccacaagcttgctgacaagattgaaaagggaacggaaacaggacgaatacgttcatcgattgatccaaaacaagtcaaccggaggcttggtcgagctgccggcatcatcatcatcttcgaatgcccagccgacgacatatcatccatcgagctcgcttccaatagaaaagctggaggcgatctctctcgagtactcccatttgttatcctctcagctgactgcacagagggaatatttccattctcatcaagaatctcttgaagatcgaatttcgcagctcgaggttctcctttcccagtctgaacgtgggaaggaaaaagaaaagatcaaacggctcgaacgggatctccaagcagagaaagaaatgagccgggcgcttcaggagaatctgtatgtcgcaaaaggcaaggcagaattactaaagggagagattgagctttggaaggaaaaagttcaggagggtgaggagcaagtgcgggacttgatgtttttcctcgaggccagggacaagattgctgctgccgagggagaatctgtcggacaatcggcaaccacactgacgacgacaacggaaacagctcagtcggatccacctagccagtcgacgccgtctctgttgggggagatgcgtggaggtacggttgtccttccaccgagtcagccaagctcgagcccgagcccggggaagccgagtggaaaaaagaagagcaagaaatctaaaagatgagggatcggtgacaagagcgcgatgaagatggatttggccgaggcagagagaaagttgatcaccgagtctatgccggaatgaacggaaagcaaagggttcttctcttgtgttctctatccttctgcagagtagtgtaactagttccgaacatagttgattagcctcggttttctacatgcttcttttctttttcgccttcccgggccgggccagattaataaccgatatcgccggaatgtattcccccatcgattcatccggcacgttcacgagtgtgcatgacttgtatctctctgctcttacattttctttccccaacgaacattacggcttggatgatggtttatcacgaggatatagttatctaggcagaccatcatttcctattggttgaatgtcaagctgagaggtgttttaatcgaaagaactatgcaaaaatatcatgatggagcggtcgtgtgagcagtagatgctatgtcaatccggctttagtggagatcggacaatacgcatcagagggctgaggagtgagagatggaactggctgcttatgacgttcatccttcttgaaagtttcgttccccagcgtgtattggctggctgtttcgatcgatcgatcgctccaacgaatagatagtttgatgattaaaaaaagaaccggatgacagagaagaactatggaaaaatgaagaaagtgattaggaagggtagtagaaaaacgatataggaaacgcaactacggaatcgaacagaaagactacaaaggaagactatgaagtttataatatcaaaaaaattacatccacctgcgccaagggtgattccggggagggggcagacgccggaagattgaccctgctgcgcatccccaagggaatttcgttccccagttcggtatataagtcctaggataggaaacattcaactttctctctcgccctgtccaccacccactccgactcatctatccttcatccttcctcccttttcactggtgtatcctttgcttttcccctcgttttcttttcctttgttggtcaaagaaaaaccgagaaacgagatcaccttttcccgactctctctccttatcactccctccgacaaactttccttttccccagccagccctattctcttgtaaagatgtctaacgtctcgagcgaaatgaaacagcgacctcggtcgatgtctccccctctctcacctccgctttcgcctcagtcgaaagcttctaatttgctaggaggtttgtcctcttcttaccgcccatcttccgctccacacttttttatgcgccgaacatggccgagatgtggcgagaacgtgactgacaagcaccgccttgatccccaatttagatatcaaactccctactttggctgagccaaagactccttcggagcctacggatttgtacatccaggacaactatgtccaggctatgttggataagcagaaggtgcgtgaccatcctatactggctttgtccttcatgctgtctgtgtactctcgcttgtttctgaacagacttggtatccttttcttttctttgtagactctttctccgattacctggagaaatctgatccacaacatccagtggatctctttcctggcgatcactgtcaccccatccatcgctatctttggattctttactactgcatggaacaccaagaccgctatctggagtgtaatctactacttcatgactggaatgagtatcactgccggtgagttttgtcatcctggtcacatcagttgaatatcgcttcactgtttcctgtattaacccagactcttcattgtcttgcaggctaccaccgactctatgcacaccgatcgtacaacgctgcacgacctttggaatacgctttc

SEQ ID NO: 1741 - DNA, 21700 bp, Xanthophyllomyces dendrorhous
caggtacactgataccgatctcgatccttacaacgcccacaagggtttcttttattcccatatcggatggatgttgatcaagcctcgaggtcaaatcggaactgccgatatttctgatctttcccgaaaccccgtggtcaagttccagcagaaggttcgtctttagctgtcttatttctcactgccctttcgaatctttatctaacttctggtcgtgtacatattataaactgcagtggtacgtatacctgatcatcggcatgggattcttattccctaccgctgtcgctggtcttctttggggtgattgggctggaggattctactttgccggagctgcccgattgtgtttcgttcatcactcgaccttctgcgtcaactcgttggcccactggctcggagactctcctttcgatgacaagcacactcctaaggatcacttcattactgctcttgtcactaacggagagggataccacaacttccaccaccagttcccgatggattaccgaaacgctatcaagtggttccagtacgaccccaccaagtggttcatctacggaatgtctttgatcggtcaggcttctcacttgaagactttccctgccaacgagatttctaaaggacagtacactatgaagctcaagaagttggaagaggagacccagaacctgaagtggcctgtggagaccaagaagcttcctgttgtttcctgggaggacttcactgaggaatccaaacaccgacctttgatggccatccacggctacattcacgattgctccgccttcgccgacgagcaccccggaggtgctcacctcatcaagcgtgccattggaaccgatgctaccgccgctttcttcggaggagtatacgatcactccaatgctgcgcacaacttgctcgctatgatgcgagtgggtattctcgaggctggtatggaggtcgagcacctgaagaaggactttgcaaactcagagatcaaccctgatcgacacctatacactaccgatggacaacaactccccaacgcagaagagcgactccagcagactcagctcaactctcagggtcctcgacccaaggccccgatgggtcagccccaggctaccatggccgaccgattcactcttaacgtccctccgtcagagcgactccgaatcatccacactgttccctccctccgacctggaagggagagccgtgctggtcagcttcagggttcaatgaaggcggagatgaacggagagatcgacccgctgatcggaaagaactaaatgcagtccaatcgaatattgcatttcctctttcttccgctagcctttcctctgctttttgttgtccttttctgtgtccgggttttctttcatctttgattctctgcattttcatatatgttccttctctgtttgtaattcagccgatgtcgttcgtttgcatctttgacctcttatcaagtcctagcctgttctcatctttcttgccttcctaccgctatgttgtcgtcactccatctcctttacgcatagatgtcgcttggtgctcctatctcccttctcttatgggccgaccaagtctggaaagccttctatcaagtgttcgtaacacaatgagattttctaaagagaaacagaaagacaaaatataacatatccgaagtactgtggcttccttagataccagactgttcattctagaacaaactaatggaagattggtgttgattgagaagaaaaagaaccaaacagaaggatttcaaagttttgcctttgacaagacatcctgcgcattgtccggtccgagataatcaagctcggtaataagatcttgctcgtgcagaaccggacggttcgtgtcaggtctttcgtcttgaccaagtgacacatctcggttggcgaaggaccatctggagctgagtgtaggggacagggtgttgtgatatcgttggagaacgagtttgccaatgacagggaagaacttttttggttcacgatcgcgcattatgcaagacggaaatcaggtcagccctcgttctccaagttcactgtcggaaaagaaaagaaaaacctttgtcgagaactcaccttgaaaccgtgcccacttccaccggtggcaaacatcagaccatcatactttggatgatgatcgactagaaaatctccattttccgtatcagagtaccaacaaagccgggttctttggcgagaacagagagagcgaaggagtaaggattgacactcgagaacgtatggcccggctgtgaattagaaacagctatagaagacgagggaaacagacatacccgataaagtcctttctagagagtttggggtaaaagctttcgaccgcttctcgaagagcggccaccatcttacgggagatgtacccagcctcagctccaggagtgttctgtttcgagaatgcgcgaaagaatgagtacggttagagtatgttcatatttatgataagaggattggcaggtgcatgggagcaaactaacaaccgtcctgggctcggatacgccacctttgtcttctctcgggttgatgtaaccagctgtccaaaatcgagggacagcttcaataccagaaactgtatgacacattccaacttcaaacacctcgacctaccatggtgaatggcgcatttgatgattccttccggatttggcgggaaaacgtatcctccagaggaaaagtcccaaatgacggggaactgattgtgaatttcgacctctgcgggtgtcagctgaaacttagctaccgattggccggtagcggtcaagaggctcgatacgccaaagtcagcggaagggaagattgaaggcgtcctgtttgagtagaagagaaagatgaagaaacctatatgagcatcaaaagccgaaaacgactccgtcgagaaaaggaagaacaatcggatagaaaatcaacttaccacgcgccagtagcgacgatcacttggtccgccagaatctcctccccaccgaccaatctaacacccttacatgttttaccttccaagatcagttccttcaattcttttcctccatcgattcttcctcccagattcttgaccatcttatgaccaacttcaaccgctcgggcggcctcggcccaccctccgcaagggttatggtatccggttcgatcctcgaacgagcttagataagggtgcagatgggatgggaaatggttgacaatcgccgacgagtccttcaggtccttggcaggaatagaaagttcaagaaggttcttgtagctctgttcgataaagtgatccttattgtgggacggacatagaacgaccactcctgaggtatatgagcgaaggcgcatattgcgcacgcgcgtgtatatgacaatcaatgataacagcggttaatatcttgactcggagagaaagcatggaccagaagaaatctgagcgaaccagtctcatggtagcaaccctcccactccggtttcttccactcgtcgatggcctcgacagagagacgagagaattccatgtctgcataatctccagcgcgaatgatctatgtccgataaatgaaaaccaaccaaacgtatgaggtgatgttcgatttacccgcggcacggtgggaagattattaccttgttcaaatcggttgaggctgcatcagttgcaggcaggactttgctctgtgaaacaagggttgaagaaagaggataccgatagtatgatgagtactggctctctttatcgactgtagaccgaatagaaaacacaggggtagaaagaaaaggtaggaatgatcgtgtggggaagaacggccgattatcggacttaccctatcgatgatttggacgtcatatccaccctctttcaagaaggcaagagcggtggagacaccgaagatgcctgagccgacaatgaggattttcttctttgcgtccgacatcacttttcaatagatcgaaagagattgagagtgaacgaatgagatgtccaactggattttgtctacgagtttcgacttttttagaatgagttgcgcgcggctgattattttaggatatgggtaaatgttcaagtaactttcaaaaaaaccttacgtagaggtaagcgctgtaaccatcctccggtcagtccaggaagatcaacaacgaaaacaaagagaatgtgaaagctcgtcttggtcaagtcttgactctttatatccatcatcaggagctctggtcgtatacccacacgtgtttagtaggacagaaaactaagaacatcttttaggttccaaagttcattgtaaagccggtcagaaaatcgacaatcacgagtcgatcagatggacggagcacccccacccgaggaggatttcacaacgatcgcgctccctgaacggagcgttcacaaggtttgtgtctttctcatcagttcttgttgtaattcaagcaagacacacatcagtggtgcttgtaccaaataggagattgaaattccgagcttcatgatcctagaggcccatgtttgtgatgctatccttgatgtattgtcagggatcaccaattgatatcatcataggatccagtctcactgacacaagcattgccttacctgaatggggaactatatagaactggaaagctcgtctgtctgcatataccgatctgacctccaaatttggtctcactacttcggacgaagacccattttttcgaatatacctttcgtgagtattggttcttgagaccttgagggatcctaagcatctcctactaaaaaccatatggtttctttcctttgtccgtgctatctatcagagatcctgatctattgaagaaatgggccacagactccaatgtcgttgctcaggagaaaggtgtcgaagctctgtcaacgttggttcgagagagtggagagaacagcgcaaggttagcatgatgttcgactcataattcacctctatcaattgatcaggttaaataacgcgttgaacaaatgtcgcctagattgagagcagacatatttccatcggtcatagacaaatgcttcgggtcagccagagcaagtatgaagatgaaagctatcgaattggcactcgtttggattgaagttgaaaatacgggagagggtgtggttgtgagtacaagactgacatatagacgacaatctttcatgcgcatgtactcatctcggcgcctcgtcatgctcggtggtcgcccacagatggatgtgttgaaaggtctagaagctaagcaacccaaaatcgttcaaacgagtgtgaattgtctgaaagagattgtgacgtgagtcgccttcattcgttcacgatcttcacatgtttctctttctcagctgacagatcatttttctctagtgcgtacggcatcaaaacgctggggaaccctaaaccacttttgaaatctctgacaaaaatctttggtcatactgataaaattgtcagatcggaggtaggcgccagcttgctccaggttctgctctgtggaatctagctgacagggctattgtttctttctttttctttcatcgcaacttctagggtactctgcttacccagcagctctatctcttccttggcgcaacgctaactcctttcttacaagagcttaaaccaatccaaattcaagaattgaccgactcttttaattctctcgcgcctggtggatctggaataccttcacgtcttactcgaagacagcaacgcgaacagcagaccaaagagatggattctgccaatggcgctggtggagacgacggggaggaggatggcggagatgatctaggccttgtacccgataaacctcctccggttgatgcactcgccaaactaccttcagacttccacgaagcaatagcctcaaccaaatggaaggatcgattggaaacctgtcagacatttctccatgtactcaaaacaaattccacgatcgaggatgggaactttgaatcggtggtggccgcgcttggaaaaagaatggcggacgcaaacatcaatgtagtcatcgccgctgcaaacgtgatcgaggcattggctacaggactggagaaaaactttgcaaagtataaggctgcagtgatgacacctattatggaaaggctcaaagagaggaaagccacggttgcggatgctctaggaaacgctttgtatgccatctctaccactgtatgtttttttttgtttttttcaaatttaactttcttctgatttctttctaccagttctttgatttcatatcgaaggtctgtccttgaacacgaaaagactaaatgaatgatctgcttctgttgtgcaaaactaggtatcccttccggatattaccgaagatgttgtcactgcgttgaaatcaaagaaccctcaggtgaaagaagggacccttaaatttttctgtcgagtgctcaaggaaactcgagaatcaccttcgaaaaatgatatcaaaccactgtgcgattctatcgttccctgtacgggagactcattggagcccgtccgagcggcagcagcggaggcattgggactaatgatgaagatcttaggagagcgagcatttggtccagtgttggaaactctggacgactcgagaaaaacaaaagtcaaagaagcgttcgagaaggcgcagatcaagtttaaagttggtggaatgccggctaaaggcagtggcacaaaaagtggtgggtcaactggtcctgcggctgcaccagcgccgataaaaaaggtacggcacacttatcctgagatgcagcagcgtgcgcaagtccaaacttacatgcggccttgtcaatcaattttagcccgtagcagccagaccaaaacctgcagttgcttcaaaagcgacagccaatccagcagaagatgaatctcggccacctccagctccagtcgatagaagctctggatttggtggtgagttcccggaatcgaatcctaatggatttggatctgaagatccaccaccaccacctcggactgctcccattcggaagccacccgctaggttattggcagttcgttcaatccgtcgtattcctgttcttcatcgcgagagagtagaagaactctgaaatttcgaatgagactacttacgtctctctgtttggtctttttcacccactacaggcaaagaaacctgctgtgggagctgcctcgacatcagcaccttccgccgtcagaaagctacctgcctcaagttcttcaagtacaaaaccaaaaccgggtccagcctccgcgtccgcctcggaaccgcttagatacaagtattcttcagaggaagcagaagcgaagtgggaggtcatgatacctggcgagatgagggaccaattagcagatgccaattggaaagccagactggaaggaacagaaaaaatgacggcatggctagaaaatggcgaagcagaagttgtggaaagtgagattatgtttagattcttctcaaagatacccggttggaacgagaagaatttccaggtgagctctcttggttttcacggcatttctgatcaacttacaagtggtgggtttagcgtttatgagctgatcgaattgaaatcgatatcgatcgcaggtgtcctccaagatatacggaatgatggctttattggccagcaaatcttcttctttctcaaaggcgtgtgttgctatatgtgtgggccacttgaccgacaagcttggagatatcaaactaaaaaaaccagccggagaggctttagtggcttttgcggaaaaactttcattgggattcgttttggaacaaggtcagtgacaacttctgtctagttatacacgttatatttcattctcctttcactgatgagatggatcttgtagcattcgaaccaatgaccaaagccaaatctcccaagacacaggccgatgctatcgcctgggtaaattcgacgctcaccgacttcggaattgccggaatcgctcttcgggacctgattgagtttctcaagaacggtctcaaatcatctaatgctgctgtccgagctgctgctaccaaggccatcgtcactgtcaaaatctttgtcggttccagttagtagcagccttaccagaattgtttacacgaccgtagtcaattcatgggctgaaatccatcacttgtccgatctttctctcctcagctgtctcaactttccttgatgacctgaaccctcagctactaaccacgatcaacaatgaattcgccaaggttgagggtcaaacggctccagaaccgacccgattcagcgctggtcttgtcgaagcttcttccagtcaagggaagggtggaggaggtggaggaggagatccgttggatcagttggttcccagggcggatttggacaagttaatatccggaaccagcatcatcgcggatctcaagaacgccaactggaaatcgcgaaaggaaggggcagagactttattaggcatcttacaggcaaacactagattgaagcctggaatgggtttgtctccacatctatcttttccgaagaccgcaggtcaaatataatatttatcactaatatgcatcattcttcgacgcttcatttcttcaggtgagattgggtctatgctcaaaggtcgtctcaccgacacaaacatcatggtcaagcttctttctctcgactgcatcggacggattgctaaagggatgggaaagccattcgagaagtttgccaagatgtttgtcgtccctgtgtgcgccatcctagccgatcaaaaggtctccacccgaggcgccgctgctaacacactcactgatataagtactgcatccggaggtctcgacggcctcatgtctagtttcgctacctccatggagaaccccaaccctctgctccgaagtaccctgctggcttggcttaccacctggttccaagaacatggtacagcatcctctgatatcactccgttaacttctcctctcattgcctgcttggaagaccgaagtccagacgtccgaaaaacggccgccgcactattaccaattgttatcggcgcggttggatacgaatacgcaatggagcaggtatcttccttaaaacctgctatgcggcagactgtgattcctcttattcaagctgctcgaggatcggcctcggccccggccccaaccacgacgaccgcatcagcaccatcgaaagttgcgactactgccgccaaaccagcatcttctactgcttctgtcgcctcgtctctacctccgtcgcggccgacttcttccacttctacttctaccgctaaacctgctgttgcaacaggcccgagttctcgtccaaaaagtttgatgggagcgatgcccaagacctctaccatccctacaagttctcgtcccgcctcgagagcagtatctgtctcttccaatgatgattatggcacatcaaagataaagcccgggctaggtctaaagagaccaggagtctctagttcaagaactgtttcttcaagcacttcagcttctctgtcatctggaacttcggcttctcctccgttccggacttctgatccaggagcaaaggctaatcgggctaaaaaagatgctgctcgatgggtgtttcatgaaaaagctgaggtgtaccatactgaccttcttgctactcagatggagcctcatgcgtctccaagtctgtacaccctgctgttcagtagagaccataacgcctcggtcgacttcttgagcgggatggcaatcattattgcttgtttccaaagcatggctggtgaggccgagcggatgggaatcgacgaagagtctcttcgaaactcgctcatctgcaatctggatctcatcctcaaatacgccgcgattcgaatgcatgactcaaacactcagtccatcactcgtgcgatcgatttagtcgaacagatgattgacgacttttccagtggcccagacacgtcggtccggcatagcttcgatgagtatgagttgcagcttgtgttgcctactatgatctctaaggtatgcctcttattagtgcggtttcccaaccttttttccctcatgattgacgcaaaaaacttctttgtgtagctgggtgactcgaagttccagtctaagattcaagatctattcaagggcaagatgcgttatgttgttccagcttctagactctaccagattctggtcgctcaaggtcttcctctcaaaaatgcgaaagcgcgagtggaggtactaaaggcgatgacgaacatcatcaagcagatcggtacaggcgacactctcaataaggagtctattgccgctgtggtcaaatgcctatccgattcggatggtaaaattcggaatggcgctctggatgttcttgggtatgtacatatgctctattgtctaccggatctgtgctcatagaagtttcgttatgcttcatcttattgaatatatcaacttctgtagagagacttacaagaccgctggagaagggatctacgatttggtgaaagtcaatcctaaagaacgagacctcatggatgccagattcaagcatgtacaagggcctgtaccagtcgcaagcaaagcactttcagcccgattagctcaggaatcgacagcgcgatcctcgtctcctgctataaatcggatctctcgtttgccacttgcacaagctgaatcaccccgtacagatcttccttctgtactctctcctccgcgaattagtagtccaagacctttagctagccttgccgccactccaggtaaaggaatacccggtccctctcgatttggcgcacgtcctgcctcggcaattcatcccccaccctcccctttgcctgctcttcgccctccttcccgaactactcaacctgcagcccaaatcgacgacgagttctcaccctccagttccagtagctatgctcctccccctcaacctagcttcccgactacttctgtccgtgctccgactcgaatgaagctcaacggactgacctccggccagtctttgcgaccttctgcaccagagacagttcaatcgccatacagtgaagatactagtgatgtcattcgttcgattcttgcaaatgacccccgaaaatctgttgagggtcttaaaaaggtccaaaaattattcgaaagcccttctgaggcattcgtaggttcggttgacgagttgttatctgccatcattaaacagtccaaagtcgtgtttgataccccagatcgacttttggacccggcttggttccgagtgtctaagcatcttatccaagccatcaattttttctgtgatagacctgcgttgcttaaggaattggacaatgacttggctgaggaccttctacatgaactgacggcgcggctgcttcagaccgatgattcaacgggcggtgagtcaatcgaggcatatccttcatgtgtctctgcttaggatactaatcatctatgggttctacagatgttcgggaattatctcgacatcttaacatgatcatcctgcgtattttcaatggtgctagacgggaggtcgttttccagtgagttgacttttactttgatctaattataagcctgtcaaccaatttttcaacctttgtaatctttcgtatttagtgctttgtttgtgttgcttcgcaaagtaaccattcgatttccagaggatcatatctcagctacgtctcgcacggccaaacacgccgagcttatcctaaagtgtatctggaagcgagctcggagtgtggaagaggatctagagaacggcttggtggaccctgtaatcctgcttcgaatcatcgaagagtttttgcagcagatgccaccagcagagtggagaaggcgagcccaggggaacattccgatgggagatatgccacttcgtaccgtgaaggttgtgcttcagcatgtcgtttgtgagtctgggtcgtttgagttagctcaatcatgactcaaagttgaaaatttccggttttcgtattcatcctttctgttagccaaatatggaggcgagcgcgtttatgatcaactaagtgcagcatttgatgaacccgaagagactcacgttagccgcacttcttttctctggttttccgctcttgaaactgatttgatatatatctttccttgagtagtcttacacgtatatctttcgactaggttcgtgatttcttacctcatcgtgcttagaagcgagcttttcaaaactgactatgtatcgcctgctgctagtgaaccaaactactcaacctcctccttcatcatcatctggatccatgtcccagtcagatccaaagtcccggacagagagtcctcgcttatctgtctcggatggtcggcctgaatcggtagcttctacgaacagtagtaccattgatcggtctatagctcctcccacaaaggagcaggtcaagccacctagttcaccagtgaaggattcagatgttgagattagagatgaaattgagcaagagatgaaagatatcgttcaggctgtcgttcgaggtgactctctccagcgagtaagtgtctcgccgtgttgtttgttgatagtttttttttttcgacttggagcatttaccttgagtttggcaatcatttactgctcagcgtatggaagagttgtctcagattctaattcggaagcccgaaaagaagggcaagttcgaagaactgatttcacatattgatgtggcacttcaaatgtttctcaaacgagctgtgagttgttgtctccctccccgacataccgtacttgattcggtatgttacctgaactgatctaacgtacggtcgaggtttataggtcgcgaatcgtatgcgaagtgaatccgaatctccgaccggtgagcgattgtctaactatgactccagacttctataagagactatgcttattgcctatgtacactttatcaaaccgatcagcaatcaaaacctcggatcctaaccctgcaggctcccctactcaagctcgatcgccgccgccgcccacttcacctgtttccggtcaaccacagttcagctcacgacccagtaacactggaatgagccgtccaatctcaactctaggcctgaatggatacccgaggtctgccactattctgagcacagaggaggaccctcagttggctaggtataagcaggtacgtttgctgtcgttttcctttttttattttccaacgttggaagctgacgactctatacatgtggtgtgttcttatcagatgtttgggtactctgttccttcctcctcctctctctcttcggctacgtcttctggtaatcttcctgatgagccttaattcttcaagactttcatcgttattctcgccgaccacccataccccaattgttctatactctgatttctaaccctaattttgtggttttcattcgagattcttgctcgtttttcctctgctataaattctatgatatctttgcttttgcataaaacacgtcagattgcgtcgatttcgattttcattaacaatatggataatcgacattgttcacccagtaaacacctatcgtgttctttccacgctgatgccaacaccgggaggtagatgacatcatgtcgatatgagaaagcaagccatcatctttgatataaaaacagttatccttatctcaatgtcggggaatctagccgccctgagaattatcatctgtttgttcacgtcattcagaatatggcatgaaatgcctgaggatcacgaattgtttcatcaacatcatctgagcagtacccgttgcctggttaggcgttcaagaaatttccaaaccaggttgatcaacaaattgtccttcttctaggcttgtcaagaagttttcaactaacatcccttgggtttgttcatcacattcgtatcaaacaaaacgggttttgagtcgatgaaggattggacctgggccgtatgtggtcagtctgattgattaccaaagcgctttgacattctggacggctactgttacgaagtattgcctaaaacgttccaggagtcaagaagcgcaagagtctcgaaggaagggttgattagatcagattattgatccgtgttgctttcatccaggccgtaaccaagtttctgttcacgttcagtcttcttggtcaacaaggagatgtcaaaatcagctctttgaccaggaatcaattgtcgaatacttgattctttgtgtgcttcgtaagagagatcgtcgactttgccatctgggctgatatattgattgtgatatacccagacagctaattcagaggtctcgtgatgatcaaattgattgaacactgatctctactcaatatgtaagagaacgaaaactctataggtaaaaccagagctttggatgttctttgtgcatacagcgccggtgtatgggcgatcaatgccatcccatggttgctacttgaaacttaccaacctggctgttaactctactggaacagactgcctcactgtcaaactcaatcgagtctaatacaacttcagactcgccaggaggttgacacagacgttcatctatctagtcacttttttcttgctgggcgattgtctgaaaacatgtgggacggtgatagcgacgctattgaatatgaacatgccgtatcagacgcagaccctgaattacttctgagtcaaagtgcatgtgtgcgagtttctgtaatgcagatgtaaggaccgataaagtcaaccacaagcatgaaatgaaagcaaaatcaaacaaattgtcgattttttcttaaggggcaacatattattcgagattgactacgagattgaagaaatataataacgacagctaggaagagaatgaatcagaattcaaagcaatacctgatcccgatctggagtcacagaccgatctagacccatttttctttgggaccatacccgctgatgagaccagctttgaaagcaccagagaatcttatctctcttggtgtgagctctctctcctcttctggcggaacgggaacagcggttccattgagaacttgttgagcgcgctcggctgccttttgacgaacggctgcccgttgagcttttaagcgggataactcggattccattccttccttggtattgggaatgttctgtagttgagagcaggtatcccgagtcggtaagacaaatcagaggaacagatcggaagacgagaacgttattctcacagaaagatgggccggatcgggccagaacgcttgtcgatactgtgtaattgggaagatcatgaagaagagttaaggaaacagtcagaattcttgtttttgctcgcttgtctttgcgcaaagcttgtgtatttgaggactcaccggagcgacgtgctcttcataccattgcgggtcacctaaactcatgcgaaaaaaaagctaagcctttggaggtgtcaagaaaattaccacatatgaacaaaacgtaccgaaatgggtcctaaagacgagacggaacggaacgggcaagaaggagttggaaggatgagaaggaggaaagaagaaacggtgcacacaagcaggctcactcacatgaccgcgattggactaggaacatgtagacagatacaatgatgagaaaacaaaactatccgaatgagaatgatgagaataaagagcaaggatatacgtacaagaataggtagaacccaaacttgaatacctcgactgcaataggaccagggatggagttcttgtgagtgatcaatcgatcgacgcggaccaatcacaaacatgaaaagaaagaagcgtacgatttgctcctcccattattgaactatatgtgactgcttatgtcttggcttctggtctccacaccttctatgatgtggttgatgggtgcagagtgtgagtatggatgtgtgggtgagggagaaaggtagttgccacagcttctgacttgccacaatcacgtgtgtcttccttcatactcagctgtttaccccgaagtatcaaacactctttctcaccttctcaccttcaacccttgatcctccaaccatcgaccctcgagctcacatacgctctctttcttcggctttctctcatcatgagactcacactcgttgccataggcagacagccaggcctgtttgccttgcttgttcttttactcgcactctcttcctctacagcagacgcacacgcaactcacgacgggttcctttttcaggcaagaaccgatcacgcaaagatggcaaggagaaggtccctgatgaatatccaggcaaagcagctcgcatcggatacccagatagctgctgtttcgtctaccgctcaggcagtggttacaactccagctgcgtctgctatcgtaacccctactacatctaccgccgcgaccgcgtccgtttccagcccgtccaccacagcctcagttgactcggtgtgttttatctcttttcttcttgcttgctttgatctctttgtatctcataactaaacaaagctgtacattcatgttcaattctctttcagacaaccaccacagccgtacccgtcgtcgttccggccacgtcctctacttcgtcgcagcttagccaagctgcttcggctactcctgtttcctcgtcttcgtcctcggtcgtctcgagtagttcatctgctacatcatcctcatcctcgtcttcatcctcgtcttcatcctcgtcatcttcgtcttcatcttcgtcttcctcatcctccagcctcactaccagttcgtcttctaccaccacggctgctccggtttcaacctcatcatctgcttctctcgtcgcgttcgtccatatctcctttgctcaatcataacctgaacgttgactgatatcatggcgcgtccgcttcactgtcctcttgctttcaatcaaacatgcagctcgacgtccaccggagctggcggaaaggttgtcacaatcaccatgtccgctacagatgatgatgattcaagtacatcagcgaccgtttcgtcgtcttcttccgctgccgcttccggctcgtcttccggtctttccaccggagcaatcatcggactgagtgtcgttggtggtatagtcgccttgggtggcggtctattcttgatctatacgctcaccaagaaacggttcagtagctttgacgatgatgatccgaatgccatcaggtggcctgagctgaacaagcacgggatggatgacgacatgggcggtgtcgccctgcctgcccgaccgacgggtggtgccggtctccgaacgaatgcgctggacggcgaagattctgacgacggaatggatggtctgacggacgaacggggagagcatccctcgaacagatccgaaatctcggatgtgtatggctaccctgcccagattccgccagacggaacgaccggggcccacactgggtactatgacgttgatccctacgaacagatcgattcaagaggctaccccacttccaatacagatattcctctctacaggaccgatcaatcatccggcgcgccagacatgtacagcaccgggacccaccagcatgagatctatgggtcggctggtggtcagcaggagtcctaccatgcaggggactcgagagtcggagatggaggtgaggaagagattccgatgagtcaagtctctagttccgggccaagaaatccgtatccgtcgttgatgggcgtacacgatccgtatggcttgggtggtagatcggacaatccgtacggggcggcgggagtgtccagcagtcggatggatgataggtactgatcgtagggtgtgtgtgctctatgagttgaagctggccttcatgaggtttcctctcttattgttttccttcttttcaacgggaccctcgttttcttcctgctttctatacatctttcatagtttgttagctctgcttctatcctcctgtgctcaaggtgtctgttctttttcttattcgttcggttgatcgtattgtatacccctttctttctagttgattcggttttcatatggggtatctcttcttttttttttggcctccttcatccgctgtctgagaatgaaactcattctgttcacatagctcttctctccagaccttctctgtacgtttgtgtgcatgctgtcgacgctcaagaagagcacgcgatggccgatatatgtctgaaacacatgaacctgaatagttggatgacgaacagaacatggacaaggggaagcaagacaatgttgaatgaacccaaccttgtcggctgaccggcagatgaagttcggtatgttttcttgtttgtcttctcggttgatcccgcagggaatcgcgtcgagcatgtttaccaaggaaacgttgatcttctcgcccttgttggttgaaggagtactggattcgtcttcggtggttgactccgtctgttggttgttgttgctgttgctgttattgaggcttggctatcgctactgctgctagtgctgattatgccaatgctgttgctgctcttggctgtgggctgacggacccgttgatataaaaagcggtcgaattttggagtttaagttctttcttgttccttcacaaccgtcttcagacctgcttcctctctctctcgctcttcatcgtacatcacccagatatgcctaccgataagccatctctcctaccagtaacaaaccaaactaatgagaaacattcgtctggaccgacctatcacttatcggtgaagacctgtgacgtaatcgatcccgactatggtcgtgctggtccttccacccgacacgcaaagtctcacttgaagggattgctttctcttggtgctgtcacatcggttgctctagtcgtactagcctcaagctccgatacggcctgtctgtcgtctgctatctctcggctgccttcgacgtcctctgtgtcttcggtcgttcgatgggctaccgggtatgactcatcggtgcacgagcttcgataccaagatgaggcttgcagacatcgacctcaggagacgagtttagagattgatgattggatcgatgaggagagggacatctcccatcgggctatactggacaacatgttcgtccttttcccctctgtttgctttccgcattaatcgttatcgatactgacggggctgagaataaacatacatacacttacagtggcccccgagcgggtgctattccagggctcgttatcgcctctccttcaaagtcccacccagattatttctactcttggacgagagacagtgcccttactttctccactatctttgaccgattcctgcccggaccaaactcgacagcttatgcccatggagacccgtcgttagaaccgcttatcagagaatacatccatgcccaaggtaacttgcagcttttgagtaacccgagtggaactttcctagatggcggattgggtgagccaaagttcgaggtcgatggaacagccttccacaactcctggggtcgtcctcaacgggtaagtgtatcgtcttctccctttcttctgcttcttggcaatgactggataagccgtgctgacgacccttggcatacgtgaactaatttcttccaggacggccctcctttaagagcaatggtcgtctcccaatatgccgaataccttctcgatcgaaaagaaccattcgactcgacatatatcaacgaaaacatatacaacccaaagactgttatggccaaagggtcgattttgaagtccgacctggagtacactgctcataactggcatcgaaattcgtttgatctttggtagggcctatctctttcttgtcttatcaaacgtctgcatagtcttcccttattcaagccctcatccctcttccggttcggttttgaatttctcagggaggaaatcaacggtcttcacttctttactcttttggcctccagagttgctctcgagcgaggagctgctttggccacccggttgtctgatcctggagcagcttgtatgttgtctcattctccttttttctccctgatcatgactattaatctcatccctcttttcattcattctttaagcattctatactcaggaagctaatgccatcacggaccgactcgagctgttttggtctcctgaccgaaactttatctctgccactatcgatgcccctcggttcggtcgttcaggtcttgactctgctcttatcctcgctttccttcacgcgggtgaacaaggtgatggcgtctggggaatcgcgggggagagagcgttgtcgacgttaatttcctacgtggattcgttcaagaacgggctctacaagatcaatgacgtcccaggtgacggttggaacggagccattgccgttggccgatatagcggtgcgtctcatcgcctttctcgtttgtctctgatgaatatgaacggaataagtcaactgatgttttcttgttatttctttccattcacacagaggacgtttacaacggagacggcatgtcccttgccaacccctggtacctgtgcacctttggagtagccgagatgatcttccgtatcgccatccactttgagaaggttgatcaaatccctatcacaccaatctctcttcatttctggcaaaacgtctatccttccgccaaatctggagacgtctaccaaaggggagacggagtgtatgaacacgtccttgagaagcttgcaggttgggctgatgggttcctgttgatcggaaagtcgttcgaaggtcctgaagggtcctttaccgagcagttctcccggttcgttcatctcgacctttcatcatcatttcttaaacgcgcgatctgactgacatcttctcgaatgtacatcacagcctggacggtacacccaccggagcgaagaaactcacttggtcgtacgcatccttcatcgaagcgaccaacggtcgcaatgaatacagacatatttccgccctcaaacgcgattgaaaggtatattgtttgatgtagtttcctcaattagatcgatccaatggatcgactaatcaatttgaactgtgaacgttcattctccgtccctctcataaattcttggatactccaatccccacccatcattatttttctctttattattactgtatttcgtacattctgttggtttgctcacgggcaacacgatgcatttcttcttcatttctttcttgttcttttccttgtgtttctgaatagttgtataaatatcgagtgacctcctttcttctcatattctccttctctctccaccctttcctctgtttcccttttgctcttccgtttcgattggttcggatttgttcacttgtagaccgtatgtgtcacagctcacgactttacgatcctcattttaaccccctttgccctcgggttttgtcttgtcttgtcttgtttaatgtatcgaaacgacttgtacgacctggtgatgaccagcccgtttttcttcctatattgctactatactctatttttattctaatgcacgcgatgaatacccttggttctgttttgcaactaagaaggaaagttttcagatggtgtttgacaaacagacttatcttggaagtccagcgctttttacaagaatatataccataagtcaagtggtttcttttatggaaagacgggcaaacagaagaacatccaacggacaagggggatacgaactctagtcggaaaaagagggaaaagaaatcggatatgtagtaattaagatgtttgtggttttagatcgaaacttgattcagtatcacgtataaaaagagtatgtaaagagagagattgacaagcggtgaatatgaaatgaagaaggtgttgatatatctgatctatctataacgaaccgagaataaacaaaaggatatatgtctatatatatatatatg

SEQ ID NO: 1742 - DNA, 19631 bp, Xanthophyllomyces dendrorhous
atatatatgtgtgtgtacgtgtgtgaggacagagaggtgagcagggaggaggtagacggttaacgattgcttcgatcgttcgaaccgccaacttcgcgcttctgagctgatcttcccactttactctctacactctcacttcttcttccagcctcaccagaacgttgtgtcggcctgatatccatcagacccatcgagatcattagaggagacgaagcagccgatgtgtttgccgaaggtaccgctgacgaagtcgtcgattttgatcctagtccacttggtgtagtcggaagaagtgaaggtgaactcgaaccggacgtagaagacgaaccgaagccaaaggtctctcctaactttctaggtctcgcaggtgatggttccctgaatgctgccagggccaaactaagttcatcctcgatcatgagttctctgattcggataccttctttgaagaactggccccctcctggtcgagcaagctcttgacgtcgaagtgcgtcccaattctctcgacacatgcacacatcactcatgtcgcccgggtgattgatttctccttcttcagcatagtcaggtagagacacgtacgctcgcatgcatgagcatgaggccaacatgacttgttccttatagagcgtggcgatcttgacggttgatggatcggtcttttcggtgaaaacaatctcgaacacgagttcgcatgtgaatcggagagaggtctttgtaccaggcagagtggtcgaacgtatgatatcgtcatgaggcttttgtttgtcgatagcggagtatgaggcagatggagagaagaaggtagagtgaagaaggtcgatggtttatcaacagatctgaacgaaggatgatacagaggaaggaatgtcgaagcaagaaccactcacgattctaccgactctgccccacgtccaaaccttccctgcatgcttgtctccatctaaaacgacatctccggcctccctcgccttctcggcgaagccatcaagctcgtacccactctttgcgccttcctggtacacaaatcgtctgggtcctcgtatgatttcatgccgtcggccaggtcgggtagaagtgatcgaggtggtttggaccatgtagcaattgatcgcatacacggtgactggctggacatgtgaaaatgtcaatgagagaaggagaggcgcgctgatgatgaattcctgttgaataggttaaaagtcatgctcgtaaggtcatttaggtgaggcagatgtgaatgaaagagttggcgaatatcttcagaggactaacgctagatgtcatactcaatttgaatggtccacaactggaagagtatgcttcttgtcgaaactcgaacgcgggcactggaaaaatccaagtaaacaagacagaacgttccatcaacgtgtatgttaattcgatgattcccatacatacacataataagggattggaagcccagagttacgtaccatgtccagaaacgtgcgggttcgcgatcacaaatactgttttctggtctgttaatttcgatttgaacaagttgccacttccttggaccgagcctcgaataagatgaagaacctttccaaaagcgcatcgatcccaaacagaactatcactaggaatgcaaaaggagaattcgaaactaaggaaaattcaaggatagatctgaaagtcagcaaaggaaacgagaggtctccagtcaagatatgctttgttcatgagtgttgcagaactgtgtttgattatggtccatacctgttgactcctttctctagccagaccccagatgaaccatgtccgcctagaatgacttctctccttgcaatttcatcatcctcccatgaggtctcgcctggaaagaggattctctgttgaccgataaattcaaccttgatacccttggccagcttccgtttatcggatacgacgttgaagaagccgttgatcttgccgtcagcaccgtccctgtctgcttccatgagcaagggagttccttcctgagaagagagtcctggtggccggacgaatgtaagaatctcgcttagctcgagtgtcgctttagatttcgtcggattcaaactgagggccgacgtgatcagatggttgattcctggtggtgcggccagaagggattcatcaagagagatcctggcgatactgtcttctgggaaggtttttgtagtctgaacgccatcgtctgttataacaccaggaggaaagtagtcggtcggattgagggtcgagggagaatattcgggtagggaagatggtgtagcattagaagttgtcgaaggtgaggatgacctggacctagacgtagacaagcctcgctgggaccgttggaacattgagctggtgaacgtatggagttgtcttcgtttcttgtattgtaaactctgtttcctccttccgccctatctcagaaggtctgtgttctctctcagtgcgcttgaacgttggggatgactttcaaaaatcggagggtccacgatggttgcagtggaaactttggagataaccaaatgttcggccgactctcaggccgcggctagacttgatgactatcatccttctcagccatttggactcttgctcgtcatcatcatcagcagcggcagcagcaacagcagaagcagcaacagcattagcaaaccatcgagaaggactataaggagggaccagagacatggatcaacccctgaagccgctcatgccggcccaaccacagtggattttcccatcttgtgctctgttgcatacaccttcacaggcaaacaacaagcaggtcaccctacaggtcgagctcgctcaacggtcccaggcaagcaattgggcataccggatcgtgtccaccttgttccagtctcaacgggaaaaagaggagcatctggtacttgtttgggcgacggcctgcatgttcattcataggttctatatgcgagccgatttgggtgaatattctttcaaagacttggcgaccacggccgtttacctggcattcaaggatacagaacacatgttcaagatcaagtatatcgttagaattgtattggccaagcagaatagggaactcaagataaatcagcctgttttagatgactcgccggtgaatcctttcttttcatcaggagttgagaagagaacttccagctcacattctgtcgaactgattgtcctcgtaacgatcgatcaggaatttaaaacacttcaatccaagatcctagcgttggaggagatattgatccacacgctctgcttcgagctgatcccacctcttccttaccaaccgttctcaagaggtctccggagattacatagcgttgacacaaacatcaagatctataaatcatgggagatgaccggctggagtctcatcaactacaggtttgaccttttcatgagaccttggtgtgcgtggatgctatttgctaaacttgttttgtttctttgtttcggatgcatcatcacagtttcaacacgccgctctgcgtgctgcagtctccagaaacaatagcggtggcagcatatgtatgcgtacgatgtctgatgtgcgatattccgctctccgagctggaacatacatttgacacgtataagactcagtttggtatcgtcgatcaggaggatttggaggtgaagcactatgtttcacgaggatgggctcaagttgaaggtatgtctgtcgttctttgtggctctcttaccgttccaaaggactcaagtttttctcgtctgtaccaaatgtttggtctggttgacggattagaatgtatcgcttggatgcggtatcccgagagatcgttttcggtggagtgtcttggtcctggatgggctgatgtgagttctgttctacatttggtcgaggctatcattctttcactgactgtgagggcatctgttggacccatacagcgtcggccattgcctcttcctgtttcgaagggacgaccgactgactcatcactcctttcaagcgctgtcgaccgaaagttatcggcttcaccctctcttttaccgagtatggctaacagtccgatgaactctcccacggacgactcattcttaccctctcaaccactcaaggcttcttcggccttgtcaaattcttcattgataaaccccaacaacatacgcgaggtacataagatcacttctgccgctctaccacctccaaagccttttaatactactactttatctcttcttcctcctgcgccatcatcacctccaccgctgccaccgtcagcatcgcccataccgtcttccgcttctctcctgagatcgaacaccatgaacgaccgaccaactgaatcaccggacacgccggcagctacagctccaacagcgctcgcgacctgtctgaacacgcctgcacccatcctggtggtcgacgaaaagacagatccgaacatggaagaaagagaagagggcgaagtcgatgagtgagagtacgaaagagatacctatagagatgtcccgatacccgatgaatgccccactagactgtagccaactgtaaccataatcgtaaccataacgtaaccaagcccacttagtgcctaccacctccttgtgtttctcttctggtcgtcttctttgttttatcatcgtcagtcgccttctcttttgctcgctctcacgtacatacacgaacgcacacacagttcagagcttgcaaaataggaaggaaagaaggagataaaggacaaggacagactgtattcgttataaacacagcaggtcaatatcattcaaaacgttctctgccgtttcctacgtcgtccgtcctgggtcccctaaaagaaaaacaagaggacaagggtgaatccaggccagcaagattcgacgaccaacaacaagtcctttcagtgattgttctctcgctttgcatactgtgatctgctctccacaagggaagccgttccttggaaatgtacgggactcaccaacgcgatattgcctattacccatctccatcccgacctccacttccggttctacccccggagccgcccgtgtccctctcgacccattctgttctgcagtcggccatgggctcctctaccagtcctcgttctgctgctcgtctcaatgcccatgttgaacttgctagacagtcgagcgattgctcgcaaatcatcactggatcgatgggaccctccgagtctaatggccgtcaagaatcctcgaaagggagtacctcatggtcggaacagagtgactatgccaatcaagttcccgtcgtcgttcatgttcgtctgtctcagttctttctatcctggattttttctgtcatgcttgcattgttgtcttttggttcgtttcaccaaggaaactgacgtcgtccgaaacatcttttctgttgcttgtcttgctcacctgactcaacttttagggtccatcggtgccgttcggtttcaaagcgccttttccagccccagaggcggccagctcaacaaatcaagtcatcgatccatggttctactcacccgtctctccagctccatctgtttatcctatttactctggatcaagagttctggacgatgttgctcccctagcggacgacgcggacgagtggactgtgtggtcaagaagtgaggcagccgtgtacgtttctcctttttctattcactttctcccatctagctcgcccgtatacatggtccgtgtaccgtagtcatgtattaacgcggctcttgctttgatatttgatctccttgacttacgtgaatggcctatgtgtactgctgggatcaaattattgggcatgtttctacggctcagaactatcgtccctccctcgtaagtaacgctttgactgtcaacactcgactcattctaagtgagacactctgagcaccattcttctcttttcgaactcgtcaatgcaacacaggcctttgagaacggtgtgcaaacgatgctatgatcatcgagtcgaatgtagctggtgagatctactcatccgtcaccaagaatgtcgatgcacggttttaaaataacatttattaatcattcggtgatcaactaggccgggtgaagatggcgctggcgcttgctcgaattgtttcttctcgtattctctcgtcagttggtttcattccgtgctttctatcactttctcaaatcaaactgaacatgccttgcaacaatcgttacaaattctcgatttctcagtgttcgatcgttcagcccgcttctttggatcattccatccgacccactctggaatcaattccgtcaaccgactctctagacgcgttcaaactcgagccgacttatcctacagacggaccgataccttcatctgtccatgactacgccgctatcccctcgagttctgctgatccggagactcctcgtatccgatctgcctcactccctgttccacccttatctcaaccttcgacgacgacgacgacgacgtcatcaacatcatcatcgaggttatctcacacaccagaaattgatagacccacatcacagaccacctaccctacacaacgtcctacggccatctctccgtcgaacccttcgttcgtgaccaacctgctagatcaaagacagccggtgaattttcttccttcttacaactcgtcttccaatcaaaccatcgttcacaatacccgccgaccaatcttaccaacgccacaagcctcatcatccagtagttcatctgtatctcaagctgtctctccaaaaccatcatccatcgacccagaccactttgtccttttccgagaatctggaggaaatctactatcaaacatatctctcatacctccgtcatcacggactgactcgctcatgtcgtctgccacgtcatcgagaccatgttcaacgacagatctgtcgaatcagttccagtccaacaatggaccgaacacacagatgatcgagttattcgacagagtcgtcagacttcagtcggatgcgacggcaggcctggtccaagtccgaacggtcttgcaggagaccgagacgtcaacgtcggtggcgatagataaaagttctagaaagaaagaaaagaagagaaggaagagagagctgcagaaagagaggcgtaaggaaaaggagacccaaaagaagatagaaggtccgaaggagaatggagaggacgagtcgatggaacaagtcatcgaggaggataactccaaccaatcatcgcaaggctaatagctgggactgacattctgtagaagactcaatagaataggctgagagcaggcaggagggggaaaagagagtggaaaacagatgacctttgatgaggcttatcggtcgtttgtctatctgttctgttggtcggttgttcccgtacctggacgagtggacacaaggggtttgcggtgtgcctgcatccgtccatatactcgtgcttgggtgtttgtaaatctagagtgatttctggctcgaatctcgattttcgtgaacctttcagagcgcgtttttgcgtttggtttctatctctttctgactttgctttaaattatcgttcacttgcatttgcctttctttgtcttcacctcacatctatttgctcgattatacaattcattcgtactgattctacatagtttcttcgtcctttctttttcatcatttcgtccaatcactttcttcatacagaaccaacagaagagaaacgaggaagggagtctgggacactttgttcccgctcctttcttttttctctgtctttgatctctcctcagttaacccctcactcttcttctgcgctcatcccttctattcttcttcttctcccccacctactttatctaaatccctaataaactattcctggtgttcgtcgttcgacgtctgacgttctccggtctacgtttacctctaaccagttgtatttagtataatcatatttcgatgagatttttgtaaatgaagggggaaaccccttccatgcctcttcctcctgatctatcagtcattttgatttcctcctgtcccacatcgtttcacaaaagatgaatcaaagtataggaagaaagaagtgaatgaatgagaacgaaattgattgaataagacaggaaacggacgaaagcaaaagatggccgacaaacaaagaagaagaggagagcaaaagaaaagagagatgaagatcccgaggaatgatccctctcgagtagaatgaggaaaaaaaatggagataggaaacgaaaaggaaaacaagaaaactttttgaaaaacactttgtttctctactctggccctcctcatccatacaacccctttgtcttcgcccacgctttgactcgtcgcacctatctcgatatccaactcagcctaacgatcgatcgagcgagagaataacaaggtcaatctatagtccaaactgggtcgtcaactgcttgacgatctttgacgcatcagctttcattgattcgactaaatcgcgccgtttatccatcaaacaaaaagataaagagattcgcaaagaagaaagaagcgaaggaatcccgttgtggtaagcatcatttgagtgaaaggtcaaataggtaagaaaaaaggtcggaccttgttgttcgagctgtctgatcttcgacctggcctctttgaggtcttcggtcaactgctggttctcgtttcgcaactgttggtcaaccttcaacaatacgacacaataaacaaatcgaacaggaagaaaatgattaaaaacgtattctatatcatgccattcttggttctatcatgtaaaaacttggatgagacaaagaaacatgaacgtacgatggaggtatcctccccatcggcagcggggacgatcggcggggtagacgcagccgtggtgaactcagcccttacaggcgatggctgctcgtcctcgttctcactgtcttcttcctcttgcttgatatccaaatcctggactgcaggcaagtcctcttcgacagccactgcaggaggggtaggcgtgagagtaggttccggggaagccaccttaggaggttcttccgtcttggcgggttgaggagcaggagaggacaaagcagcaggagcagtctttgaagtcgatggaacggctcgcatcgtagacgatgtagagacagggtcggacgtcacgggggtggcgccatcttcgagagacacaagcttgggctgggctgtcttgccggcgaaccagtcgtcggcggagagagcgggatcgctcgagagtgcaggagggaaaatatcactgaaggcagaatacacatcgtgatctatcagtcacaagccctgtataacaagtcaccaaaaagggggtgagactcacgcctggaagctgtcagcctttctgggaacgacgaaacccaaaggctcgatcaggttgcccgtaatcttgaatcctcgagcgacctcgttctccgaaacgtccagcgctcgtcgaggcaagaatgtcattcctcgctggggtgactgagatccatattcggacaagtagaacaagttgtcggcttcatactcgtagtatcggatgttaccatttccttttccagcaaggaacagaaggttgttggcttcggagaagaagggcatgagaacacccgaactctgatcaatgttaattcccttgatctcagacaatcctccggtctcccaaatcttgacctgtcgatctgaagattttgagaatcccgtagtagcgattctatcgtgaacacccaaccagaccaatcgggaccctttcacaccggcatgcccatcagtaattcggacaggagccgaaccagctcgaggatcaaacattcggagtttcttgtctcgagaagtggtagcaaggatagtgcccgtcatgttccaggtcaagccctgaatggaatcaccatgggcttccaacgaaatttttggcgctcctccgttttcgacatcaaatagtcttacgacatggtcgccagatgtagcggccaacacgttcgatgcagtcggatggaacaggacctgtccgatctttctgtttacccgtatgcaagataggcaaggagtgaggatatgatgcaatcgtcagcgagaaaatctacgccaaaaatcagattctatcaaattggcagaaacacatgacagaggagcaggagacgaaccggccaccagcgttgatcttgacatcaggctgaaaatcctcagcaacccatccatcttctccccaaccctcaaacttggaagggtcaatcttgtaaatgttgacttttccgtcctccgctccggacgcgacgatggaatcatcgaatggagaccaggcggtactgtatgaaaaatataacagatgagattttgttggcaccgcttgagacgattgtagctgatatcatgagtgaatacctactctaggctatgtcccgttcgattaaagtgagagatgagcaaagaacaaaggacaatagtatatcagcttaaaccctgaacacggatcgcactatgatacatcggatcaaaccgagaacagagactctggaaacaagaaacgaagaatacatacacagcacctgaatgacctctggccaaaggtaagatgtcaggcaacttgcctttaattgttctgggcttggctgagttgaatggagagatggtggggagaacagcgaacgctcctccaccagagacgttccagttaacagagatataggcctgttcacgacatggttggattcaaaattcggctcagtgttagctttttgatctctatttccataaagattgaatgaggtacgcagataggaggaagcttacccctccggcggcgacgaggtcggtatcccaagcgctattcgaaacctgatcacacatgccgatccatcgtgtatgagacaaggacatgtccgttagagaatactgaattgattttctttttcttttctttccaataaattcaaccggagctacttgacccgagggtgaggtagaatatcaagctgaataggaagggaaagagcgtactttgacgttctcgtacgaatgctccttcttgggcttatccgcgaagacgtgtctagacacgaggaacagataccagcatcacgggaggtgcgataaatcaaacagcatctaatcaatcatgctgaatactgagagatctgacgaatataaatcaacagacaacttaccgatatttacttgatctgggttgattcgatgtgcattcaaattcaagaagcgagagtaaaggatggcgggatggcgaatgaaagcaagagttcaaccagaatgatctctgctatttgcatctcacccttcttcttttattgactttgatatagaacaagcattgaactacgaacctcatgaagcgagacatggctggaaaatacgtaaagacaggggagaatagtcgttggtcgttgatcgttggttcaacgtgagattgggactcagagagatggggggatatccatctgggttccgtatccatcaaggctgtgtcacggatccgacgccacatcggcttttagaacatggcaaacgatagcggtatcgagcgtacacacattggcactcttgtcaagattcgtgttgagacaataccgaggtagaggaaagtgttaagcaggatatgttgtacattctacattgaatctgatgcatgtgagattgaaaagggcaatcttcttctgtccacaatttctcacgatctttaacatagccgctagcactgtcatcgcccccactaccctcgtgtttccatctcgttcttcatgaattgatccaataatcactcgtccgtcaagatattatgcgcagtaagcccaaattcttgttgtggtccgagaagtacgtttactcatctgcttgagaggaacgacgggtgcatcgatgagttcaaattagtcaagaagatctagtctagatggccgaatgctgaaagatctttcggacttaccggcaatgagagccaagatcattcggtagaggtagtagaagctgtatggaccaccaaatcagtatgtgtttgtcaatagaatggaaagaaccataaagtgacacgtacaagcaaagaaggtagaaccctagcttgatgaaagcctccttcttgtgaccaggaagctgaagagtgaatgtagacaaggataagagctcatcagcgagttgcttccgacaaggaatcaatgagataacttactgtacggaagatctcggtagcgtcgtacgattgttgtcccttgaagatcctgtgaagatgataaagagagtatcagaagatgatcggagaaacaattatgaatattaggaatctaaggacaaacttgttagcgttgtaggcgacgagaggcgcgttgaagaggaacgcgagccactgtccggacaggagaaagagtgtggtgagaccggcatgggcgatcatctcgggaaggacgaactagaaaagaagaagtatgatacacgtcagcaggagaacagagcagagagtttgattgggcgtaagaaaagacggatactcacagcattcagcttgttgcagagatcgatagggttgatgtaatcgcactcgagatctaatggttcgcgtgaccggtgagactgaagatcagccggccgttttactgagcagaggggagagaataaagtaaaagtacataccagagaacatgatgatcttttgagcgttcgtgatcgcgatgagaggagaggagaagagatgaaacgagataagaggagacgaagacaagatataagtctgagatatgcttctaaagacacgagcaaggtcttgattgtgttccaatttaaaacagggagacaaaagaggctgccatctctaaaagactggccatctgatgaggtaggaacgtacaaagaacaccatggtgaagaggagtccggcagcgagtagcacgccgagtaagaaaagccagcctgttgatagaagagaggacgatcaagagaaagtgcagatggcagggaaaaaaagcagagaaaagagaaacacgtcagtttctatgattggagtgatcttttgttgaagggcaaaagagaacaagtcccgtccccggagcagaattgaaagaaacaggagcaaaacaaagaagaacaaccaccttctccaatcatttttcagtatatagttctggatgtaggttgagcaaaggcaaaggaagctgagtgggatgagcaaaggaggtcgttcgaggtaacaagtctttaggggtgtctggagtgtggaaggagagacgatcagggttattcatgtatatttttgaatgttaggcaagagtttgcaagcgctacctaaggtatgatgctttgtcagccagtctagcccatagtacataccctcacacgagcagcacaagagacatccagctcgatcattcgcaacagaacgatgcatcgatagagagagaaagagagatcgacggaaacgaccgtcgagcgagccatgatgtgcgcgcatgtgtgtgtgttcgtggttctccatgactacatatgtgtacatccatagaggctattcagatatgagccatcggaggaagccgtaaaaccgaaagcggccacgttagaaaatatcggctacaaaaagaagatggtcgccttcgctttccttcttttcttttcttcttcatcttatcgtgcaagtcaagtagcacatccagacccagacacacttattattagcttactatgggactgccagcttatgcttcaaatagaccggcctcagaagccacggccttgcctagatgggttcattaccttcccctcctcttgctcgctccgctcatctccgacaaggttacatcgaccctttttcctcctgctcagcctagtttcatccaggtcggtctagacaaatgtgcggccattaaagccgctccattgctcacacaccataccaggaaggtctcggaccgattcgttccgggaactcagccggtgttgctcaccaatgctaccatctggaccggaaacaaagatggacaagaagtcattctcgccgggtccgtccttctcgagggcggtttaatcaaagcgatctctaaatccaaggatgacatcaaagatctcttgaaacgatcctgtcatgttcatgagatcgatgtcggcggtaaatggatcaccccaggaattgtcgacatgcactcccatcttggagtctcttcatctcctgatctcaaaggttcatccgatacgaattcgctcaaggcacccattttgccttaccttcgatcaatcgatggaatcaacactcatgatgccgcttacaatctcagtattgctggtggtatcactaccgcgttgattcttcctggatcggccaataatgtgagccttttttctatctctttgtggtcacacaatacattccatcaagccaacactgaacatgcatacaccacgtcaaaccttagattggagggcaggcgttcgtcattaagcctcgacaaacagctgagaataccccttcaagcatggtcctcgagaatccttgggtcatcgacgacgtgaacggaggtctcaagcgaactgggtttgatcgacacatgaaacatgcctgtggagaggtaggcctttccagttcatttccttctcgcgtcttctttcttagatactgagctcatgaaagtctttgttgccaatagaatatccaccgagtctataacgacaaccggtttgatcaaggatggaacttccgaaaggcttataacaaggcaactcagatccgagctaagcaagacgcgtggtgtgccaagggaaaactcaacaccgaagagttccccgatgaactggagtgggaagctctggtagacgtcttgagaggtaaagtcaaggttaacgtccatgtgcgttatgtctattcctgtcttttctattcttatgatctttttatgaaggagaataccctgttgacaacatccgttttggattgtaatagtgctacgaaacgtaagtcatttcactcattcttcttttcgcttgccatcgtatccgagccatacctgactgccgcaaaactatagcgttgatttcgatcaattgatccgactcaccaacgagttcaaattcgagcttgctgccgttcatcacgctcatgaagtgagtgtcattaaattgtctcagccgtctaatgcgaacaatagtctgattcatctgtcatctgtaatctccgccgagcaaataggcctggctcgtcactgatcttatcaaaaagtcatacggaatcaccccgactgccgctatcttcgccaccaacgctcggtacaaaagagaatctgttagtccaccctctcctctatcagacgactgatcccaaatatgtcctcattttattcttttgatcgcgcatcagttccggggatctgagtttgctcccaagttcctggccgagaatggaattaacgttgctatgaaggttcatctttcactgctgtgcatgctctttcatgaatcgcactgacacaagcattgctgtttctactataatcatagtcggatcaccctgttctcgacagtcgatacctcgtatttgaggccgcccaggcgcaccattatggattgaatgcctcgttggctttgtcctccgttaccaccagtgtgtatattcttttctgagtgcaagcgagtagcgccattgttgtctaaactatcatcttttctcttttgatgtgtcatatcatagcccctgcccgggctattggtaaggatcatcgaatcgggtacctgcgagacggatacgacgccggtcagtatctcttgtttggttacgtctgatcatactttaaaaaagctgaccacttcctccattattctattacagacgttgttgtttggtatgtcagaccataacgatttcgggatcacttatccttccacaatacgcgtcgctaatgtagctattgtctcatcttgtctcgcgtttccctgaaaccataagggattcgcaccctctcactttaggcgcgaccccgcttcagacgtacatcgatggaattccccaactggaacaccctcactttgccccttccaagcccgccaagctccaggctgttccttccacacctgactgggacgatgaaccagagctccaccgacaggctcgaggagaccccgactacgctgctatcctcaagaaacgattggctaagaacgtagtgttcaagaacgtccgaaacgtattcctcaagaatgaattgaacgatctagtagcttctagtgaacgagaaggagaaaacaaaatggtcattgtcgagggaggaaagatagtccaggtctgtgatgaggagtgctctcagactcttcagaaggactgggaagttatcgatctgaagaacggaagcgtccttcctgggtaagcctctaaacgtatgcagatcaattcttttatccctttaatttgactgatgtatcgtcttctcttgttggatgacacatttacgttcgtgttcagactggtctcgtttggttctcctcttggattagaagagattgctggcgagaaatctaccaaggacggcagcgcgcctgatggttctaacccggcatcgtctttgggagttgatgaggttttgtacgctgttgacggagcatcctttgccaccaagaatgcattgtacgttcttgtggttctttccctcttgaacaatatctcaagcagagctgatactgccgcgtcgtcttatatatcgtcatataggatcgccgctctttctggagtttctgttggtgttgtcgcccctgactcatcttctctcgtctctggtgtttcctttgcattcgacactgctgccgacggacctttatctcctagggctatccggtccgaagctgttgctttgcacgttaatgtcggccatggattctcttcttccatttccaagtatgtctcttctctctcttctctttcgtcgacccgctttcaacgagtctgatgatctcctccctcgtctgaaattacaagccaaattggacagcttcgcaaactccttctgggcaagacccctgatgcggatggttggtggaaaaaggcgactcaaggagagattccgttggtcgtcgccgtagacaaggccgacatcattgctcggctcatccaactcaagaagagcattcaagaggagactggagattcgatcaaccttgtgattcatggtggttctgaggctcatctggttcgtttctatcttcagttcaggtatcctttgatgcaaagcatcatgtgatcgaacaggcttgctgattgagaaacaaaccgaatgattgtcacgacttcggacgatacagctcgcgaaagaactggcggaagccaatgtaggtgtgctcctcgcgcccgccagatcgttccccaccggatgggaccaacgacgaatcttggctggaccacctatcaccgcctccactcctgttgacgtcctggtcaatgcaggtgtcgtacgttccttgctgctgtgtctgatcactccgacttgtgcttactgaaccctatacacatctctcatcatactatcagacggttggattggcgatcgtcgaaagctggcaagcgaggaacacaagattcgaagcagcctgggcgctccttgcttcctcctcgctcactaccaagtctgctcttgagcttgtcaccaccaatgttgagaaactccttgggctcgatacctcctccacggatggagagggagactggttcgctgtcgtatgtctctttatgtcttcatctcttttgattctctggccgtggctttgcttcaccaaggtgttaaagcgccaagatctgacctccatatttatgtttgggacgataccgaaaacgcgaacaggagggagatttcttcggtttcgagggcaaagtcgtagctagaggaggaggaagctcttgagaaaatcgacaaaccacttctgttctttcatacataactacaacgccttcttctacatagttatggttttctgtggttccgttcctcgtgtttaaacatttcacttttgtctttgcgttaatgagcgtcagtttcgcgtgtccatcatctggcgtcgtatggggttgtgttatatctgtatcgatatcgatgatgggatgaatacatacgcaaagtgcaatcctcgggaaatgcgtacagacttataaggaaatttggcgggaagtacaaatgtctctcacatcgactcaaacaaaagcacgtagggttaagatccttcaaacgatccctcgtcgatcataacgatgagagaaacgaggaggaaaggttgaagaaaagacaaagaaatcccatcgacatctatctttaaacaatactctctaactctctagcatagcccagcgcctcatcaatcagatccttaacgccctcgccctgcccatgtgcgtcagaagtagcagctgggaagtaaatcgtcgagcttgaaggagagagcgtccatcctcgtcgttgagcaaacgcggtgacctcggagggtgagttgaagaagagtagctgctgagcagaagagatgggaagggatttataagatgaaaggaaagacaacgagatctcgttcctgtttgaaagaagatccaaggaatatagcattgtggtttttacagagatggattatatcagttttgagcatatggtcgaagactcagatatcaataaaagaaagccggttcagtccatacctgatagaacccactaggccatccgccagaacggccaatcctccgccatccttactgtcaacagcgattccagccaaggccttttccttctcgatcagacttgcagccattctccacaccttgttgtagctaccctccataagccctcgctcgagctcaatcacctctttcacgtccggttcggcttgaagtgccggagggatagtttcgaggagaatgtggaatgcggaggttcgggatgatgagagaagagcgagaagctggagggctagaagagaggcacggtgtggcgacggagggaggcttctatttaacggtacagagtaagacgagcagttgttaggatagtaaaagagaagaggtatagatgatgagataacgatgaaaatgttccttctcgctaacggcatatgaagcaactcacgaaaaatagaacgcatccaactgagcaaggtatcgctcgaatgccggaagcttccctgttcggattgagtgaaacgctccgatctccaaaaccgagcctttgagggaagatgaaaacacaagggcaccggtcagtgattgttagaaacgatgagatctgcatagcgggactcacgagcagtaatcagatcctcttcagagtgatttgatccagaaggaaaaagtagttgatgttgaacaagttggatctaaatcaaaccaaggtgtgaatgaccctgttcgctcaaagtaagagtaatgacagaagaaagagaagacgaaggcgaacctttaacggagcaagctgctgtccgacagacgcgagatcatttgcatcgaacgaggccttgagtgcgttgaaagatgactgaagagacatgatagattgtgtaatgtatgagaagagagatgagatggccagaggatgatggattggatggacaagtttggatggaagaaggtgagaatgagccaaagttccacgacatcagccaaacctccaccaagacggccatcaacctcaaacgaccatcaacctaccatctcttcccttttctcttcatactaccatcacacacacacacacaca

SEQ ID NO: 1743 - DNA, 1662 bp, Xanthophyllomyces dendrorhous
cacacacacacacacacacctctacatccctaatctaatcaaacaatcatggagatcggacgtgcaggcatcgataggcttaagaagggagagatcaacctcggtgttcgtttaatgctttccctgctcttccagttaatatctctgctcctagagaccataagactcacattcaaaccgttgttccacagacttccatcatggccgttcagttcaatggaggagtcgtcatcggagctgactccaggacaacctctgggtgggttattgggtttttctctatctctgaatatattcatactttgaagagaacaaagatcaaccttcaatcctcacgtcgtcaccaaagctgatgcatctggtcttgtttgccaaacagatcttatattgctaaccgagtgacggacaagttgacacatattcatgaccgagtctactgctgtcggtcaggatcagccgctgacactcaggtgtgtttcgctgctctgacatactgtcccttcgcaagagagatctgatgatctgactacccatctcgacctacgcgacataggccgtagcagatattgttcactatcagcttcagatgttctctgctatgactggcgctcctccatctgttcacaccaccgcttctatcttccaaaaactctgttacgagaacaaggacaacttgagtgcaggtatcatcgtggctgggtacgtcttgtttgcatcaattattcatatgtgtacatggtcctttgaagtcgacctcaaaacctggctacaacaactgatatatttcttatgctatcgactccatgcactcttgtttatctagatgggatgcggagaatggaccgtcggtatacaacatccctcttggtggaggtctcttccgacagccgtgggccatcggaggatccggttcgacctacatctacggatactgtgatgcaaccttccaagagggctggggagaggaggagactgtgcagtttgttcgaaatggtttgttcttatttgcccgagtgtttcaagcacgacgtctagatgcttacagcggtcatctgtctggttcgtgtttgtaatcgtactctaaaacagcactttcgttggcaatgtcccgggatggatcttctggaggagtgatccgtatggctgtcatcacgcctggtggtgtcgagaggaaattctatgctggcgatgatatccctcggtacgcacggctcttctttctcatgtcctcttgccatgtctacacagaaccaactgattttggatcccctttgcttttctgtagtttctgggaaggcaaggaaatcttaaaggataccgtgccaggaaaggatgttgcctcagtgagatcgtagatagaatcaggtcgggactagccttgcttcttccgtaacaagaccacatgctttggtattgccagggagatgaaatcgctttcgatataatgacatgtactagctcagtaatcgtgaacctcaaagcgagcaagacatcagatgtgatttacaggaacacggacatgagacaactgtattgtacacagaggtcatcgcatatgttcataaacggtttgacaacaatattcaagcaaaacgagcacacggatagatcgaagtcgttcatatattttgaaatgatatttacattgaaacaagaaagaga

SEQ ID NO: 1744 - DNA, 54228 bp, Xanthophyllomyces dendrorhous
cattaggtgatcctgttatcctgggcagcagctccatgtctggaaataggcctccttcaagattgttttacatgcaggtgaaatacccttccccccgaaaggaaccaatcccacccgacaaatggtcaaggctcctccgatcaaaagacccgcacatcgctcggttaaaagacggaggcagttcgatcgaaaagaaaaccctagtccactcaggtgggtgcccttccgggggggttagaggctattcgtctagtctggatgtctggacctccctctatcttggaccctggagggcaaggagggaaggaatttagtccgaccatgagaaagagaaaagaagagggaagagaaaattcagtcttgtgagatttatatagggtagagattgaaactgaatcacgtgatcaacttgatatccagtcacgattcaccgctgttgttgtcagggtccgggttcagagggtaacgggaaggttacaagaatgtaaccaggcagggaatagggctggcaagaaggaagttcaggctctctagcttggtgactgtgacgagagcgcaaggcagggaaatagtatgaacaaggttgatacaataatggaacaagattactcgggaacaaaggaatgacaaaggattcaggcttggtagactaagctatggttggcggaataattcccgtcttatataacatcctcagactccaacggttatgcataagaagatagatcacagaaggtgctagaagcccctgcgctggaaggtcatatacctgcatgttcatgtaatgagagagcataaggaataccgaggtaggagaagcggcagaagcaggagaaggttgccggggtgtaacactcaggtcacatccctaacagctgtgctgttgatacccacgtgacattctcaacatccatcatcctaggccgttttgaaactatccggtattttcctattcatctcgctccgaccacaacactttctcatcaatacatatcagctatgagtcgtcaaccgataggagaagttattcaggaggtgagccttccctatctcgtttttttttggccttatgtatatctttgttgtgggaaaaaaatcacttgttctctcgactgatgcatacctttggcttttcattcttctttctttctttgatggcttcatgacgttgacatacgcccgtctattcctctcggtgtccctcgtgactttggctataccatgacttcatgcataaaagttcgctgatggaggaaactacatcaagaacaaactcgactcagccgctagggagctcctgaacgcagaatacgcgaaacaagagtcggccaagaaggaaaaggcagctggatcagcagtggcggtagacgagaaggatgttgcattcatcgttcgttttcttctacttctttcaatgccatccggtatacaggattgaggtgttgaatttgagagcactttgttatcccatcatgatctcttcaggtcagcgagtttgagatcacccgatctcaggctgaggagagcctgcgtagctcaaacggagacctcacaaaggcattagagaacttggtggccttgccttcgaaatagggaacgaacactgcttgccatgccctgtttcttctcttctctcttctgttttctacaatcttccaaaagcaaaatctagacgaatacaccctagaagataatacatataaccaatgcaatcctttcactccgaaatacacctcaagtactttctttttccttctcccttgacaacgtttcaaggcattatgttttacaccatttgtcataaatcaccatcctgagagaaagactattgaagagctgatttttcatcatatcatcgacccctcggataaacccattcgaccaacggaccctcctgcgctccactaccaccatttctcgctcttctgtccttctccttcaaactgagtgaaccagccaagacctctctctgtttaaccaccctaccgtacttagcaatcaatctatcgagagatttctcatcaggtgatagatcccggatgaacggtttgagatcggctaaccgccattgagatcgagtagaaaagagttcctggaaccgctcgacagggaccgaaggaagcgaggtgtaggcgaacggaagtagcgtaggttgaggactgagcaccgtaggtgggttgatcaggtagtttccctttgaatatcacatcagtatgtgttcaggaaacgcaacaggacggagtatagggtcagtacgagcgactagacaatatgaggataatgagagtagcaaaaggaattacctcgagagaggttaggactgtatgcgcgctgaaggcgtctcctacgctctcagcccaattggacatgaagtcttctaatgggattccgacgtttgtctgtcaaatgaagcttctattagtattggactcttttgtagagaaagatacatcagaagaaagaattcgaaaggatcttatcgactcacttcgagtcccagaagcagtcccctgccaacttctctaacgatccccttaacatcatctaacacccagtccatgtctgtgtcgacctttccgaacaggttcatcacagcctcacccagctctggcccaacccctcgcttccttaagtcaggagcgatgagcgcgaaaggggcagagagcggaggttcggtgggggagtgaatcacgaggagggagagaaggaggcaaagaaggtgacacagtcgagtaggtggtagagggaggagttttcctgagagagacaatcaaaaccgcagagagatcaatgggtgaatatgttttatatatttgtttggttcaatttcaatcttgtacaaaggcaaagaaacgacgaaccgtccagctcgattacattccgatccttgaggccttggtcgagctcagcgtctgatgcttggatgatcgaccggagatgcgccaatgtgtatcttgtccgtttcctcttttgattgagaataaaccgataatagatactgaagtttcagaattgatcaggtcgttctataattctcgagagctcaggactgaccggtctctctccatcttcctcatcttcatcgtcttccgtgtcgttctcgctggcctctcctttgatgtttgaccgcgtctgacggtctttcagcccgctccattcctgacctctcagcacatcctcgatccgacccaaccggggcacacagctcgtcaattccatcaactcatgcagcgtctctgtatacatcaacttctcctcggtttctccagtttcatctgatactgaacctgttcctccgtccacttctttcggggatactgaaacttttccgaaaacatcttctcctgtccctgatgatgctatgcgatctccctctattggagtagaggacgaagaggaggaggagggtaaggagagaaggacaagctcgttggagatctgaacggtccgaatggaatatgtagagtttggtgtacatagaactgcttcatcagatggtcttcctttgatcgtcaacctgttttgtttctcgaattttaatatgtccgtccgagaaagaggataaggaagagagttcgcgggcggaaacgacaggatgaataatgttaaatcaatttttcaaaaaaaaaaaaaaggaagaacgagaaagaaaacgaagagaacatcccaacaggtaagggcaagaaaagatgcgattcgaatacaaggagaacgaacgaaagtgggttggactctgatccttgttcaatcaacttcacgatctctggcggaagttccatcaatatatgatctgaacttgaacttgttcctcctcctactcctaccccggtctgacccaatctggttgatcgaccgtttgataattgtggtgggaaaaatatcgggactgtgttgggtgccataatcttggaagagtcggtcgagtgttgagacagataggtcgggtcaaccaaagcttggttgtgtgatttagatgtatgttctgcaaagggaatcaacttgatagggcgcgtctctctcatttaggtatccaacgcgacgcgtctggtaacgcgtcatcgctctgtgtagaagtttctctctcaagcaatatacgacaactgattttgttccatacatactaacacgcacaccgctacaactagcaaaactacaagagctaaagtgacaacatcataacaagagaagtagcagaaagagaattttgaacgatttatggcattctaagcatcgtcatcttcgacgtcactctcagaagctagatgtttccgtccgaaacagccaaaatcagtttttgtagttggtatatttataaaaatcacaggagctagatgaacgaacctatctttggatccaaccgtttctcaggtcggactcgttctttacctttgttcatcgaagcccgtcgggcagggttagtcggaaagaggacttgatcagacagactggcttgcggtttagcaccctgtcgaagatgtatcaagaaccctgcaaatgattaatggatgaatcgaaagagaggaaagatcactttcaggcttggagagggacacggacgattttaaagcctccctcagcgcctagagcggattgggaccagtaggtcaacgcttgaagcaccgaaggatcttctgccgacgcagagattacaggactgataaagaagtatggatacacgtcaacactctatgtactagctcagagcaaggaaagaaacttacgacacagcggcgaatgtatgatcctcattaaagactccgaagacccagttctgagtggtgtcggaatatagtttcgatctcaatcagaaaagagatgttgcgcagagccttctgaatggggacgtacgttgtaatttgtaaggacaaagtgcttgatcccaagtcgcttcgtaccaaggctctgtctggaccaaagccaagatgcctttgactttgggttatatcggtctaatgagaggcgcgacaggggtcagagcttctttacaacgaagataacggcggcatacatatgatcatgtcttcttacaagttccctagggtaatcaggggcgaacaagatattagcaggagtaagggcccgagtgccttagtctataaaggagagatgggtggctttgacttacagtgacactgaattcatcgaaatcttcctgctcaaacggaattgtcaatgctcggacgacaagcgcaggaacgtctgctcggctgtcaactaggatgaattcctactcgggggggtccaagacaagaaggctcaattgtcaaggacaagagagcatatatgtagaacaattatagacgaacagtttctcccatcggagactttccgtacttccaggcgacgctgtccttgagcccagagaccgtgccgacctcagcaccgtcgatcttgacctcaccgagttcctctagcgggtgggcatccgcctcgagactagatgatactttggccgacgtctctggatcgttcgacagattccacgcagagattgcggctacaacggcgtcgaggggaagcgtttttagcgccttcaacaggcttgcgtccggggacagggacatggttcgtgacaacgactgaagatgaggaaacaaatgaccaggatgggtgggcagcgagttcgttggaacctgctctttgaaatctgaagatggatggatggatgagattctgctgtcagatcagatcgattatgatgcttgcagacaagcataaaataagacgagatagcaagagactgagcgggtcatacatttgtctaccatctctttgaagtctttgatcttgactaaagactggagcaagccatccggccagtccggccgaggagacttcccacctacgagccagatagaagggaagaagatgagtataaataggcaagaagattaacaatggaaatctacaaggaaagactgaccaactccaagaggaggagatccttgaagagtaggaaggggactggctaagcagggcagaacgacataaagagatggaccgggttaaccgccgagataaccatgaaagaaaagaagaaagaagccgggacaagtggcactcggaaggaactcgcctaggtaagatgagaggacaaagtttggctgaggcatgatgtgtctatcggacgagcgataatggtggcaatggtggttgaagaacagatgaagaacccggaacgatccagcatctttataaagcagaagaaagccgtgttctacgttcgttctctattcgatgctgctgttgcgctcgcttcttcaaacaatgggcagtataggagtttggcccggaaacccgcgtgacgtttgagacttcgggtcaactcggctatctcggaggaacgtttttcaacgtgccacactgtgttatttgtgtttcctcatgttcttcactggatatgttcggtggatgcagagcggaaggagcatgtatgagattgtctttgtgtttttttctttttcttttttttttccttatcggttggatagattatcttgttgtcgagaagaagtgtgttgcctggtagatggtcatcatcatcattatcaccatcatagtagtaaagaccatctgatggctctgcgttcgctggactatcgactgagaacgtttctttaataaacgatctggcatctgtccaactcacaatctaccagcatcatccttgaacatcctgccttcaaacaacaacaccctgcctcatttccacagcatggactgtctaatgtaaagggcacagacaccaacgggcatagaatcagttagggttctgatcatagtttcaccgacgatgacgtattgatccgacaggtgacacgtgacacgtgacacgacgcgacgcgacacgctcaaacgcgtccgatcgcgtgctgaccaagtcgtaatgaaaccaatccccgatccttcttttgagcactcactaggatcactttcacctctcgtactttctttctttcgctctactttctgctctgtctgctcgcttacttcttctcggatagctgtttccttgcatttactcacatctctaggctgcttggtacatccatggagcatcatccgtctctggattcggtcgacgcgtctcttcaagtcgatcgggtcatttcttttggttcctctccttccggtagtctccctgatctcctcatggacatagactctcctgcactcacagaaggagaccgagagatatcagaccatcagttgattaaaaagccatctgcatcgttggatcctggaaacataaacgatcctccttctgaaactgcagccatcgccgccgccaccactactgagaatactctttcgtccagtctgtcgtcatcggcaccgtatccactatccacccaattcatttctctcgttcccagaggattcactgctatcactcctacctcccagtcgaacaattcctcaccatcctcctcccaggcaccatctctcacccaagtctctaccgtgctcaactcagacaccccaccaaggcatctcgaacagacaccatcttctgctcccctttccccattagctccaaaggcagatacggatgggggcctttctacggcaagctcgatactgaaagtccagactagcacaggagacaggaattcatcaaccgtctctcctcgttcacgtccaaaattgttttttgaagattccgattcggatcacggatccaactctcctcggtcccgtccgaacggtacttcagagggcgacggctccgtctcaacgcaacctactcagacgagcgaggacttccagctagataattctcttcttacattcactgttcatcctcctgttgatccttcagatggaccctcgacctcattccaatctgccacatcacactcggctgcctcaggagccagacgaccttcccggacgccttcggcgcctccgtccaactcgaaactcgccggttccatcaccaagggactctctggcagactcggctccctcggagtcggccaaacttcagataggaataagcaatcggcatcgagtgactcggactcagagatcgagtacatgtctggtttgacgcctgtgaagaatgaaccatctacagcagcgcgtacaaagtccatagaggttaaacaggagagggaggctccaggaagtatcaagaggaagctgagtttcgtaggaaacgaccagtcggattccagtacgtttcattttttgtgtgacatatgatcaaaccttggacacaaaattgaccgaacttgcttttcgtttatcgcgaacatttttagttggtccacaaccgacagtgctacctgaagaaggaggttatcttggagagtttgtcgtagaaggatatactatggtcaaaggtttggctcctccgcttgttgcctttatatctgccctcgcgctcgtaaattgactatgtatttgtataaacttcgatccttgcatgattaaatctaggcaaagggtattgccagccaggttcagctgtatttctctcgagaatagagccacaggccggaaaagccagaccaaacccttcaaacgtttcatccacaggagctcaacggtccctcaaggatatgatgaaggcatgtccctgttctcgtacatgcctgactttcaattgtttgttcatcattatgctccatgtctgtgcgcgtatcaacagccgaaggtggaaaccaaagataattctaaagctccaaaagtcaagcctaacaccattattcggttaaaaaacgatcgaggcttcggttagttcacaactattatccattgccgttctgttggggctttaatcatgctcgcatacaatcataattgatcgcctccaaatttcttgcaatctatccgtcacaagaaatcggtaaacttcctatcaagacaacctcttggcttgctcctctactggatcttcacttacttactatcaagggaactatcgtccattgtgacgttcctatttcccgagttggagataccatcgtcctaagccttgacgtctggctcaaaccagaagcattcgtagagattgatatcaagagaccgttagcaactgaaaagacggcgatactggctgattcgagtaaaccggcttttggggtcgaaggactggctacagaggaggaaatcagattaggaaaaagaaaagacggactaaaagtcatgtttcgtacgttttttctccttccgtttcttgcgctacttgctccattttttgacgaattctctgaccgtgcttatccgaccgaaacagaaaagattggcttgcgacctcgaagatcatccagtatatctaataaaaagctcaagtctacaggtatcaccaagcctttttctttggagaaaggcaagaccggagagctcgctcagaatcaacctgaagtgggatcaacaggggacgaagatgaggcaggagatgagatagatgaggatcaactagatagtatctacgcaaagtttgtaccttttcattcatcattccgtcttctggagcaaatgtctgatgccttttggggtttgtccatccggaatgggatcagagctcaaaaggatgatagagaacttgacgagatggaaccagccaagacatttacacttacacttcgtacgtcttcacactctcagatattctccttatctatccaattcgcttgctccaactttcttattcacacaccgagatactatgggcgaaacgatcgaatgcaatgtttgacaggtccttaccagaagcaagcgttgaagtggatggccgatctagaacgaggattaaaatcaagtagagattctgcgcttcacccactctggcaggagtatgtattctttcttgcttgcatcccctctctatactgtctctggtagcagttctgttcgagtcttacgcttcgtttgtctgttgatatctttgcgtgtgtgtaggtatgcgtttgctccggaaaaacaagatttcgattcaggtgaaatcgtcgatcttgaacattgggtcgaacgtgaggcttctgttttgtacatctccctctctagtccctttggcctgactttaccacttccactctcgttgatgaacgaattggcggatgtgcctagccaacatgttctactataacccgtattctggtgaattaagcttgaagttcccaagggtcgatcaagtctgtcggggtggaattctggccgactcaatgggaatgggaaaggtgtggtatttatcttgttatttatatccgaggttgttctattcggctgatcttcccggggtttgatatttgattgattgtcttctgcagactttgtgagtttaagatttacagaacacaccattcgaatcttgtttgaatctccctcttacgcttgtggtgaaaccgcttttctttttgaatgacagaatgatggcctccctgatacataccaaccgattcagcaatgccatcctcccagcatcaaaagacgaaactcctccttcaccaaccgctcctccgtccactgctgcccgtcggtcccgtcgacgactcatatttgattcttccttccgtgttaagaaagaggtagaatccatcgatgaggacgaggacgattcgccttctggtcagatggacgaaagcgctgatgatatggctgaacagcaagaacgggcagagggaggaccgtatgtgaccttggtggtctgtccggtttcattgatgaatcagtggcaggatgagctgaagaggagtgcgaggaagaagacattaaacacgatgggtctgtctctctccttcgcttgaattcacatagctttcatatcctgatactttccttccaatttttttggcctcgtagtttaccatgggaacgccaggggcgtgggactggatgaggcgctcgatccagataatcccaacagagtggatgtcgttattacctcctatgggtaggccaaagcccttgagcttcacttcgccaaagcgctctgttctgactcggcttgttgttgcatttttgctctattttggtccctcagagtactcactagcgagcatgcaaagtggagcgagaatcagacgaagaagaaagtcaagtcgttcgagacagtcagcttatttacatgtaagttggattctttttgattacaccaatgcgttgtagagtctgacataatgcatatttgttctgtctcaatttgttgggagtacagacgacttccttcggattatccttggtatatatctagtttcgattcgatttgttggcgtttggcattgagataatactgaactggatcgcgctgcttttgcaactcacgtctcagacgaagcacatcatatcaagtctcgttcaacacacgccgccaaggcatgctacgcggttgaagccgagagacgatggtgtaagttctaattggcgttcacgcacgtattctgagatatttcttccgtaagactaatcgttgttggagcgctatttttacattaggtgtgaccggtaccccaatccaaaatcgactggaggatcttcactcgttactatgtttcttgcgcttagagccttggggaacatattccttcttccgctcgtaggtgtccttctcccttgctctcttgttcgatcctctgtctcttttacagtaagactaacataggcgacgaaacgatatagatttatcactgtcccgttccagaataaggtatgccgacttttacttctaaatgattacccacatccgcattgcatctaactgcttaccatttatctgttctttgatttggatgactatcacaaaggattcctctgccatagatgttgtccagttcatccttcaatcttgtcttcttcgccgagagaaagacatgcgggataaggatgggaggtttatcgttgagctacccgagaagacggtttgtgctcatgctccaatcatgttgcggaaaaccgagatatccctgcttaactggatcaatgctctgtcttttccattcaggtggagcttgcggagctcgagtttagtaacgtagagcgcaagctttatgatgagctgtatttgaagacaaagtccaagttcaacgaatacagccgtgctggtgctgttgggaagaactacggccgaatcttgtaagtttacgcttttcaattcttgaaacctttgttcatcgtaatctgactaaggatcaaaccttgttgctctcttctcaagctcgatgttgatgaaactccgtcaggcagctcttcatcctcttctagttaaaactgacggtaccgatgacgatccagaggataacgacgatgaagatgtggataaatcctcacaactcaatattaaagagatgagggctcagttcgcttccggaggaagcgactttaagagtcaagcattccagacattcatagccagcctgaaagctgggcagcatgcggagtgtccagtctgctttgatgaggttcgtttgtgtttttcatcgtttctccttcctttacatttaaagatcttatatatcatcgaagttccccgcattactaacgagcttggtatgggttgtacagatggaagagccggctttattgccctgcgggcattcgggttgcaagacttgtctgcttgattgtatacagttgcattcggatcaaggagaggatgggctctgtccggtttgtcaggaacctgtcaaagaagaggatatcatggaagtgtgagtcttcatcctttgcttgacgtttttacttggttttgcacgtaacttgccaagtcgcttgatcgcttactcttgtctgctcgcctttgatttgggggtaatttgaatggtcatagtcaacgcagacctcgtaccaagttggatatgaagaccaacggggacgcagattggaagctcgtcaagaacgatttcaagtcctccactaagatggacgccttgatcaaacgactcaaacagatcaaagagaaagacccaaagttcaaggctttggtattctcccacttcacagtgcgtgtctagctaatttggctacgtgttatgagcgaccgactgatcatcattggataaaccgattgcttcaataccttcagtcgttcttggatctgatcgaggctatccttgagcggtacggtttccgatttcttcgattggatggttcgatgaatgtcgccgctcgacaagtggctgtcaaagaattctctcaaccctcgaacgaacccgtcatcttccgttcgttattcttttcatttgatcgcttacttctatgagttatgagtaaccttaatgttgatcgtctttttgtctgtttggattcctatatcgaccaatcacatagtgctgagcgttaaagcaggaggagttggaatcaacctgacttcagccaactatgtctttagtaagctttcatctgatcttctttctgtctatcctctctgcactgcaactgacattgtctttcctgggatttcatgaattaaacagtgatggatttatggtggaactcatcggtagaatcacaagcgatcgataggtgtcatcgaataggtcaaacccgtccggttcatgtcgtcaagtttatcatctcacatacgatcgaaaacaggtttgtccatcttttccttgcctcttcacttttttggctctcgtcaaattcttccacgccatctgtccatccagctcagccggactcatcttgtgcgttcgtctttttacgaaatgtcaaacagaattatcaagatacaagatcgaaaaaccgcaattgtaaactcgagtttaggaggaggcagtcaagaaggaactgcgaatttggaacttatgttttccgattaatctttgcttgcttagtctcgctatattcattccgatcatagataggtatctttgtatttttgtttcgttctttttctattgccaatttatgtatctatatcagatctgaatttctgttggacaagacaaatacaaaaaaaagctcattggatccgaaagtttccgttttcatctttcgttaaccgttcatcgcgtcctcttcgctgacttgttctgcttccacctcggctaccactgcgtcagacccggaagcagacgccgaaccagaaggaatctcgacagaaggcgaaccggatttggctcgttcggccgattggatggctagacctttagcccgagcggcttggtgaaactcttttcgagcctgttttaattctctgttcttgatctctacttctgcttttctctgctgggcaacggacgagagagggttccgcgaaaggcaaggggcaagacacaccgtcatttcatgtctctatacacctcaagaggggagggaaaaaaattgaagagagaagagggaacgcaccttctggtttttgtcacctctggcctccccctcttcgacctttgaattcctggctttaccagcaggaccccagttgggtctagggttagactggaacctgactagtctagcttgggagatgtgttttgtgagatcagggtgccttgtaaagttgatggtcgcactgtgaacagccggtgtaaaagacatccgaggtagaagagagagggttcaacaaacttgcgcaagagaaaacaaggagaaagggaagaagaacgaacgtaggctcgatagccaacaacttagcagccggtgaattcggctttatgttctccatctttacaggagccttttctttgatgaacactctgtagagatctaagatgaagctcatcggggcctgcgaattcatgggagtttgagcaaaggtatggttagtgaaaggaaggaaggaagagtgataagctggaaatgagaaccctgaaagaaggatgtacgttggttttgagtgctccggaagaagcgtgcgttcgagaaacatcgtagcccgcatggaggatggccgaactgatagttcgagtcgtcgtgataaagagagaatcattgagcaatgtttctcttgtggcagaatatacggattacaaagcgagccaaaacagagagaggcacatacccaatgtcactggtagaaggcgaagtacaatggaacattcccgagaggtaagcaggatccaagtagaacggggtttccaattcctaaaaattcccccagagttcatgttgtacaagattcaatcgatcagccttgacgttctgttggatcgaggtattcagctgaaagctagtgaaacatcttacctcctttgccattgtgaccattcctttcatcctggcgaccgtaccgaacttgtcctcgttcgcgtacacatgatctagaactttctgacagaacgtcttgtcatgaatcggtccgatccaaagtggtcctgcgagctaattttccaaaaatcgagttggaagcaaaagagaagaagagaaacaaagcgttcaagttttgtccgatttgtggtttgattgtagagaagaaagccaggggtaagaagaaagggagggaacaaacgtggtggaccgctccgcactcgctacaccgaggccccgtcggtggaccttggtggttcttgaacgcgtaattcattcctctacctttatcagtctcgacaaccctaccgaaaggttggatcgtgtaggcctgacatccggcgcacacgtagacagttccagtcttgctgttttgtaagacgatgagagatcgaacttcagaaaacaagaaaagtggctcgataggaagattgcagaggaaaaatggagaaagagagtcgtaaataacacaaacctgaagactcgcttgacctcgaacggagaggaatacactcggaagaagacacgcatgtaaaagtcgatagagagcgaaagttggggaacaatgtatcgaccgtatcgagcggcgatgcctgaacatgtgttaaggagcaaccggacggcctgtagagatggagaggacagaggcgtcgacaggaaaaagattccaacattcagcaacttgttcttgatgtagtcatcagaagggtcatacgatttcgtgcgagtaaacagccttggcagaaactcctccataattggcaaagctgatagtgaaagagacgggtgtagtaaggttggcatgaagtcaagtgagaactcttgcttgacaaaggaaaagagaagagggacattcttaccacttttcagggtagtttgacccggcagtgacagccatatccgtgcacgtcacacagagtagccctatttgaatggaaataggagagaaccaatgaaagagacggttaggtgagctagaagatgcgttttaaacagacaggtcttgcaaacacgcttacctccgtcggcagttgcctgaatggcgccgtcgaggaaaggagcagcggttccgtacggatccagatcgacacaatcaactttagactttcggtgattgtacatcaacgcgctatcgtgagagagttgaggatgaagagtgtttcgggacgatcagcttgtgcgcactcagataaacagaaggaacaagaaaaactcacatggcatcaccctcgttcactctaactttacccttccagttgttcttctccttagcctcaatctctgtttgagtacccggagtgggtcctttgtcggacggatcgagatcgttgtacgagacattacgcttcatggcctcaacagccgttggcgagaaatcgttagcgatgacgtaccttgcagtgagaaggatagacagaaataaaggagcaaacagaggaaagagaggaatgtcagtcgaccgctgtaactcttgagagaaagaaaaggaaagtaggaccgacttgacgccaggaatctctttagcgtatcgaatcgcacggagaccggtggccgagagagcctcgagaatgacaaattctcggtcctggtgtcaagagcagatggtattaaagaaaagagttgcattagttagattgatgcgcgtactagacgagcgcatacatagaaacatacgttatgctgtcgctgtggagaaaaggcgtcgacaagtacaagaacgagaaagttagagtctgagatccgtgcgctgaatatagatagtgtttaggctgaacttgagacacaccttggaaggctcctcgacggtagcggtagtagtggtagcaacaggcgtctcggacgtctcagtcccggcttcgacctcgatggcagcagcggcagcaggctttcccctcttctttccctttcccttgcccttcgcttcgagctctgccctgacctcttccttccagatctttccccaggtagaaatacaagcgatggagagatctctgttgaactgctggactgggttaaggaaagccgagttatcgtccgggagaaggatggtggtcgactgctcggtataaggagtcaagccggctggaacaggcttggccggaatgatctctggcggaggcaaaactggctgagcgggagaagtatcgtccgacatggttctcttctggatgaggtgtctgtagagagcgagaggatgggtatgcttgacgaatgagctgcaacaacggacggacaatcgaggtagaaagccagacggtcgcatgtctctatcaaaaagaagatcaagaatgaattcgttgggcggcggatatttgaatttcagtgaattttgagagaatttgagccgagcccaaatcacgtgatctccttcagtcgacagtcagtccatctttcgagggagcagcttggaaaggaagagagcaggcagggaagcaaagaaggaagcacgagacattcagagcagttcatgtagagttgcagagtcgcacaaacagaaacagccgctgaatcaccctccagacggttgactggcgactggacgatgtatactgccgagaacctgctcctaaacatcatctcgatcacagcgtctccttcttcttcttctcttcttctatactgccacggagataacactgaacaaactcatagaagaacgagtactaggaagtaagagaacaacagaacacaacatggttctacccctcaacttgtctttgcgctctcactctctaccttttctctgctctaccttgtcgtaaccatgggctagccgtaaccacagttccttatctttcgtagccagatcgcacgcgacctgagcatcacgtgattctcgctcggacctcgccgagaaaagcgacacgctgctcttcttattttttcctcacaagcttcttctgcttttcttctctctcccatcaacacatctctcggatcgatcaggtttctgttttgattgctttctgttctttggatttgcttcttcgccttcctcagtagctccttccgatggacaaccttggtttcgagaagaactgggttcaatccgtcttgttcttctccccgaatccacataatgcttcgatcaactcggccgttgatatcctctcccagccgtacgtctgtgcttcttctttctctttgctctgtgtttcctatgtcgtccacctagcatcagaagtgatctggctgtgccacagccaagacgcagcgggtcttttgctctcgaaagaggaaagatggtggacatcaagatgccgatagagctgttcttcatcaaagaaagactcatttgtcacacgcgtacaaaccacttatctgctcgttcttcgattattaatatctccgtctcttccttacccagtcctcttcaatcacatcgtttctgggccgacgctcggacaattcttgctctcttaggagccctctccgttatctccctcggccttcagtttgtcgtctacccagcagtcgttcgtctctaccgacgacgacgttctggtgattatcacccggtctcttctgcctcttctgatacgatcgctgctgatcaagatgagactaccgagacggatgggacaaccaagctcagacttgatcatgggttcatcgcccggaacggagggtcgatggttcttgcctggggaatcgtcaggttcgccggcctcattctcctcgccgttctctctgtcattgccggagcggcagccgaccgaaggagggagagcgccgtcgaatttaccctcgctgggttctttgtgagtatccttgtgctctacccacatcatacacacaccctttctttcttcttctcttctccttctttcttcgatttctgttttcccatctgagttactgataatctgttgatgctctttggcgacacagacttacgtagctgtattgagtgctggatctatagtgtatagaccttcaatcttctccaccttaacccatactttgaaagctcatatcacctgcttgctcatagtaggcaagtcaaagcacatcattcttcacaatttgatcaacattttaacctatccgtttcttctcctttgaatagcgttcggagtctttgccgttcgggacatctggcctatgctcaccttcacagtcgactcaaaggataacctcagtgcgctcatgtggattcgactggctgtgagttctcctcaaatgttatgcatctatacacatccacatattgataatctctttctttcgatagaccatcgctcttctggctatctttgctccaattttcacccccagaactttcatcccgctatccccatcgaacccgactccgcccactcccgaacagacgtcatccatcttttctgtcctgttctttgtcttcctcgatccgatcatcttcaagacctggaaagtaagcgctctcaaattttctcatgacttgcgtgcgtctatatttacaccacttctatttctgatccaattttattactcctagcttccttctttaccttacgaagatctgcccaggttggccgatattgaccaagcccagcatctacgagatcaaatgatgcatctgctcgatcctaaatccaagcatccccgagccaccaaaggttacagacatctcggctggcgaattctgcgcgcctggtggaaggaggccatctattgcgtcttgcttgccatcgcatttacagtgcttgaattcgccagtcctctgggtgtgaacaggttattacactatctcgagacaggaggcaaaaaagccgtcgtcaagccttgggtctggatcgcttggattggactgggtccttggttccaagggtgagtggtctgttgcccattgggcattgtggttctgtttctcctgaacagaagaattctaaaacccgcttgttcttccgtcttctctacattctctagatttgctttcaacatctttatctatatctcgaccagattcatggttcgatgtgaatctattcttactcaagtcttgtttgaacactgtatgtgtcttgattgcctctctcgcatccaatatctatcattctttccttctctaccctcagtttcttggttctcatctgacgcgcatactggttcttagctctccgaattcagcctcgagacgaaagcgccggaaaagctaatgatggcgagtcttctgaaaatggagaacctactgcagacgccaacaagggagcaaacattgttggaaagatcaacaatttgatgtctaatgatctcgactcgctcatcaatgcccgaatgattttccttgacatcatctctgctcccctgggggtgataatctctgcttggggattgtacagtatccttggttggagttcattcgtcggcattggtttccttggtgtgttcattctcgtatttgttctgagccaagttcatctacagatcaactgactcatcggagagtttactctttatggacgtataaagtcttgaccatgcctgtcccggccaagcttgcgatgctccagcatggaactcagaaacagtacactgatgcctcggataaccgggtccaacgagtaaccgaagccatcaacaggtgcgaacccatcttttctctttttcttcgtttctcactctatcgatcgcaatctcacacttcgatcgatgtggaatagcttgcgaatcaccaaaatgtttggaatcgaagaaaatgtcaaggctcagatccaggaacttcgatcaaaggagctcaaattaaaccggaaacgaaagctattgagtatgggcatgtctgtctcaaactacactgttcgttctatcatttttcttcctcaaaaaattctagaatctttctatcaacaccttcctgaatgtccttctctattcatgtagctccccttgctcgtcatggtcgtcacgttcgcagtgttcaccgtgttccagcatggagacctcagttcttccactgtgttctctgctatttctgtgtttgctattttcagttcgagtttgacgaccttcttccaggtaatgtctcttcctttccttactctcgcgtctcatccactttatctttcttagaaaccatctgtctctgaccattgacaaaccaacgattttctagatttctcgatacatcgagtcttatgttgctcttcaaaggatgaacaagttccttcacgagaccgagcttatcgatagatatgcggaggctgacgagtccgaggaggaggttgagaacccagactacatcggtttccacaatgcttctttcgcttggtatgtctgttcttcttgtttccttctttccttccgagactcaacctgttttttcgtcatttctcttttcttctccgatggcaaccaaacacatgatataggttgaaaaacgtcaaggaaggagataacgtcaggaacttcaagttacacatcgacgatctcaagtttaagaaaggaaaaatcaatctagtcgctggagctgtcagtcttcttatcctatatccctagctttatacatcctgaaaatactaatttttgccatcccttcttgataattttactgaatcaagactggaagcggaaaaacctcgctactgatggctttgcttggagaaatgcatttcgaagccaaacctggatctagtttctcacttcctagagcgggaggagttgcctatgctgatcaacaatcatggtatgtcattctttacctctttatcggttgcatcaatgaagggcagtgcttgttctgtgtttccttggctgatagtggaatcataatgatatgtaaaaataggcttcagaaccagaccttgagggaaaacatcttgtttggatcggaatacgatgaagaacggtacaacaaggtcgtctaccagtgtgctcttgagagagactttggattgtttgatgccggtgatcagactgaggttcgttggtcttccttctttcacgttctgccttgcttgtttgttgattcgattcgatctgtctgtatatgatgaattaggtcggagagaaagggttgaccttatcgggaggacagaaagcgcgtatcactcttgcccgagccgtttacgcccgtgccgagatcctacttctgtttgttcatttctcttcattcaaacgactcataagaccgactcgcttcctttactcatcctagtataaacttgaatacatccccaaaagtgatgatattttgagtgcgctcgatgtgcatacgtcgaagtggatcattgacaaatgtttggctggcgatgtgattgccggaaggactgtgatccttgtaagtcctttctctatccaccagacattctctcgatattgacattcttcatacattacacatcaattaggtcactcatcatattggaatggctagaggtgtcgctgattacctggtgtccctgtacgatggaagggtcaaggcccaaggatcaatcacagaaactctgaaagaggaccccaaacttttcattgaggagaaggaggatgaaggttcgtgtatttttggtcttgtgtcctctctgacgtgatcacttgggtttgagtattctttctcactttgtatcctgtcatataaaggcaaggaggatattgcggaggagatcaccgttgtcgagggcgatatcgatgaaaagcctgctaagtccgatggaaaattggttttagccgaagaaaaggtgagcttacccgtaccgtagccttccattaaacggctgttatgtcattaattcgctgacctcctccttctcatatttaggctgaaggacatgtctccatcagggctgttcggttgttgatcgattctcttggcggacctctgttctgggtgagccttctttcatagaatttgaccttctacttttgtagtttttgatcctcattcaagcctacgtttgttcttctcttctttttctgactttgtcttgaatgttggatgtgtaggttggtgttttgagcagtttcacccttgatcaggtcctcacgcttggccagacctggtggcttggacaatggtctgagcaatatgatatcaaggctcctgatgatgtatccatctcatagtgggtctattaccaccatttctcatacattgtcaagttgtggaagtcaaccggttaactgttggattattcctttgaacagctacctcggtctctactgtcttctggtattgtttggaaccctcgccatgacctctggttacactatctggcagtttggtgccgtccgatcgggcatgcgcatccaccatcagcttctcaacagtgtcttctctgcttctctccgatggttagattcaacccctcaaggtcgaatcgtctctcgattcgtccgagatactcgaacaattgatggagaatttacagagctcacgagtagtgtgattgacatgggactctctctgttgatcaagttggttgctatcgctatcattgtcccgtggttttcgctctctgcgttggttgttgctctgctaggtggtttcatcgccgagttatgtaggtttcgttctcaacgtgtaactctacattatcaaaagacaagtatttttctgaaactcacccatgttctctttgagggtcaactacacagatatccactgtcagatgtctgtcaagcgagatgtttcgaacaacaagagtcctctattctctcactgttagtactttccgctggattatatctgtatgctttgatcaactgatatcttattggtcggtcgtcatctatagttggtgatgccctgtcgggattgatcagtgttcgagcttatggtgcagagagcaaagttagagcggaagctcttcgacgggttgacaagtattccagagccaccgtgactttctacaacttggtacgatctgtttatgttagaatggcctcaagacaggtctttgcagcggccaagctaacattatactctttgtgtgattttagaaccggtggtgcaactgtcggtttgatgtcctcgctgcggtcttttcttgctgccttgctgcctaccttgtttacggacctggtgaccggaccccctccaccgtcggtttcaccctggctgtctctgttcaatttagttcgatgatcctttggttcgtcaggatcttcaacatgtttgaggtgtctggaaactcgctcgagcgagtccaggattacctcatcatcgagcatgagaaggcaggcacgccccagggagttcctcctgcctactggccgtcttctggttctatctcgatcaacaaccttaccgctcgatactctgccgacggacctgtcgttttggatgacatcaaccttgagatcaagtccggagagagaatcggagtatgtgtcatcgttttttccgatccagatgttgacactcgaaaactcacactcgtcttgttttgttattgtacgatataggtcgttggtcggacaggaagtggaaaatcgactttagctctagcgctgttgaggttgattccaaccaccggagatgtcttgattgacgaccgaagctgcgcggccacgaatctggatgcacttcgatcaaagattaccatcattcctcaggatcctacacttttctctggaacgcttcggctcaacttggatccttacgccgagcatgaggttcgtcttcttaaccgctcttctgatggttctcttctctcttgtcgatttgttattgatagatgtttgatgttttgagtttaggactctgtcttgttgcaagctatgaagtcctcaggattggcaggcatgccgggacaaccctcgacgaacggaactagtacccctggaggacatgctatcacgcttgataccgagattgctgtgagtgttcagtctctagtctatatgatgaacattctggtcacgttagtgtttctgatgtttgattcttttctgtccctccccctctcgtgtatgtaggctggtggagacaacttgtcgcaaggtcaaaaacaactcgttgcgcttgcagtaaggcttttttccttcaaaatccatgcttacgatttaaccttcgatctgtttcctgatcatacgaacacacttgtcttgattttcgtagcgaggtttggtcagacgatccaagatctttttgttggatgaagcgacggcctctgtcgattttgagactggtgcgttcactttctctccttgcctttcgctccgccacttatcatatgtatgttttcttctcaaatcactcgtgttcattacagacacgatgatccaaacatctatccgaacggaacttgatggagtgacattgatcacgatcgctcatcgattgagatccatcatggactacgacaagattctcgtgctcgctgctggaaaagtcgtacgtcgagttttgctatcctgtcttttccgtcacgttttctattttccatgtgctgatggtttgacgtgtggtcttgatgtgcaataaagctcgagttcgattcgcccaagaagctcttggagaacccgaccggacatctctcccagttggttgactcttcagccgatgcagaggaactccgatccatggctcagtagatcaactcccaaaattgtcttctcttcctttcccttcctgttaatattttggtctatcattgctatatgaaaggagactgtttcttcttactgttaaaatttttgtttctacctttcttcctctcttctcttttttttttcttcatcgttctatctctttttttgtcgttctttcctctgccttttctcagggccaaattccgatcaatgcagacgttcgtgccaattcgttcacttgtcgtgattatcatatcactcttctctcaaccggtatccagaaggaaggggttgtcgcatgctcaatggagatcgatcaagaggaaaaagcgagagacgttcgaggatgcggcatgcattgaaaagaataaaaagatatcaagaaagagtatagatacaaacaaaggaggcttcttcagcagactactacaacaactactacaacagacgcagaaaggaagaaagagggaaaggaaaacggatccactggacgctaggccccatggcaaaaagacatgagtttatccctgccaggcgtgcttggcctgtatcatcccgttcatcaaaccaaaaatcgcgccgaacgagaagaagagagagagagaagataggaggaaagaagaggaaaaagagaagacgggtttcagtatgtgaaggaaagtcctttgggtgtgacggatagagatgtccagcgattcaaatgcagagaggtggggacgaaggtttcacacaagaatgttcccgagagagttgaccaagatcgataatgcgagtaggaagagaaggaaaaggacgaaaaaacgatcgtgttcaacagatcaagaaaggacgtacgtcgttctttgatccgtcgagcccgtactgagcgtatcgggtgttccgattgttgtgtcctggataaaagtagtatgcaaccataccgctgtttgaaggaagtcgaagtaccgtatcaatgtcaaatcacaattaggtcaaacccgtgagtgactcattcgagtgagaaccaaggaacgaacaagcatgctccaagagcgaggtaagtcgtcatgtcttttgtacagtggtatcatgattaatttggtgcatgggcgagataggatcatcagctcattacacgggagggttctagagaaacaagaaaacagagtgacggacggttcttcctaggtttatttcccattctcattccgccttgctgcaaaggcatcgttgccatcggacgcttaggaaacgttcctaccactcggttgatcccggtctgaactcagaaagatcaagagaagggatgaacagaaaaaataacggtgcagtcagctgatcgtatgcacacatgctgaatgctcaatacgccttggacccttcaacaggtcaacaacgcttacggagcggaggatgatcttggaggattgcatgctgagaagccttgtttgagtgttggtaagagggagcagagtgtttgtgtatgtgatagatcaagatagagatagagatagaagaagggaagaagaagggttgagtgagcttgctcccgttcataaaggatttggctccatccaaggacgtaggccagatttgatcacctggccgatcgagtgatgatctcatgtacacgggacctgagaagataagataacgatctcttgtgcctgtgcgcggttacgaaattcaggatagatagaagaaacagtcattggagaatgatagcattacggatacagtccttggggaaaatggagattcttgtacaactccttcaggaaacaaaggcaaagaaaacgaaaactagacagcgttcacaccgctcagtgacccaatccaacggcagccttgaccttctcagcgagggaagccttgtgggcagcgtcatgctctcccgtggcgacaccagcgtgctcatcagcgtgagtagcatcggtcacagagccagcctcagtagttccggtggccttaggagcagtagaatgggtggcatcgaagggatgaccctccttgtcccggatccatcggacaccgtgctcgtcaaactgggtgtgagcgtcgtgctcgccgacctgagctccagtctcagtaccggagtgagcagcggccctgttttccaacttatcctcggctcgggcgagcttgctatcgtgagcaccctcggctccatggtggccagccccagcaataccagcggcgccagctgcagcagcggcggatccagtaccaacaccggtcaaaccagaaccagtggcagatccagtgtgctgagaacctcggtgaagagcttcgtccttgaggctagaaccggtgctggtctccgaaataccgtgtgctccagagacaccctgggctccaggaagaccccgggtatcataagcgccgtgagttccggaaacaccatgagagtgaacggctgtggcaaacatataatagtgattagtaagatgatcaaatattgagattcataagcagtgtatgtctcttactgtcagcagcaactccggctccgactccagcaccgatggcaccatctctcaaattgtgggaagtgttggaagtgtgagacgtgtgggaggtatggctgtgacccagcccggatgagacaccgctgacctctacgatgggaggtccaagaggcaacccagtctcaagaggaagggcagaaccagtgtgctgatgggggtgatcaccaacggagccgaccaagccggtctgcccgggaacctgggagcgttggtgagtgtgatcaccagtggatccaaccaagccggtctgcccggggacgtgagagtgctcgtgactgtggtggccggtggctccgggaacaactccggcagcggtggaagatgcagtgtgggaagagtgtcccgtctgagacgaaagagggttggcggaagagctggtggctgtataaagcatcgagtggtcagatatctgcgtaaaaactccacagtaaatattgatcaatgaatgtgcgacttactggaaggcaaatgcgaaccagtctgcgttccagtacgagagtcgaacgcgccggtggagtgagatccctggatgccggcagcagtgtgggggttgtcgagtcggttggcagcatcggtaccgattcgcttgttgtcagtagtgtcgctggagtggagggctgattgagagagaataaactgttgtgtgagaaacttctgcatgatctgcgtgttcatgagattgtggagatagaaaatattgaactcaccaccctgctcggtcaatctaggaatgggctcagaggtccttgaagtatggacaccagagttcacgtcagatccagctagagttgaaagaggccgagggaaaaaagaaagaataaggtcagctgttcaggctcaatgtggaactacgagatgtgcgcgcgaactcgagcaacagaaggacttactcgttccagtggcaccagactgggagacgttggcattaccagacttcccggtaaaagcttcttcgatgttgtgcacagcgttcttgagaggagcagacattatagatatgtgatgtgatgtgatgtgatgtgatgttgtaagatgaggaagttggacaaagacaagatgagatgagatgaggaaaaggaagaagaggaaaaagatcccgaattctaaaccaagtctttataccacaaggcaagaaggaaaaccctgtcagtccatctatgctgtcagctcggtcctcccccctttttttcttctccccctgggatgcggcaggtccgtgcgctcgccgctcatctctgtcatctctttcatcttccgcccgcccgcacgtcatcgcttctaaaaatgtgtgggcgggttgaccggatgagcttttctgacgtcatcgttttgttctcgttcgttcgttcgctcggtcgattcgttcggtgggggactgtgctgaggaacgggttagtaccgttatgctaccatcgaagcgcaaggggttagtcgctgatcgtttgatcatcacgtgccttgcaacttgcataggtgcctgatcggcgagcagactgctgcgcatttccgccgctccggagatagaccaaaacacacctcgttcgcacgcggcaaggattcttattcactccgatacacaaggcttctccttcttctccttcttcctctcttccatttgttcctttccgttgctatctccgttgctatctagtactctcattcacttacacagtgacataatcttacgcttccatcgatgctgcaattacttcttcctctgcttcttgcagtaccatcaacggtcattgcgcagaccagtccccaagcacttatcacccagtacgcgctctccgagacgtatacctacgcccagccgacaaaagagctcgattcgaaccaaacggtgaaatacctcaaggagaattggtccatcaacaggaaccgtatccagacaggttcggaatacatatcctttgtcgatgatccgttcgacagctcggataaccagaccgtcctccaagtcaactacatggcaggcagctacggaggatccggcgacggaggtgcccagttctatgtatgtcgagtcttcgtactggtcagagttatacacagccatgtctgattgaattctctcttttacattcccctcttcccgatatttttctccattcgatcgtcaatgccaattaatcaatcaatctctcagtctcaacctctgaactcgacaaactccaccggcctgacatccatgcttctctcgtacgacgtcgcgttcgactcagacttcatcttcaatgaaggaggcaagcttcccggtctacggggtggatccgatatatacggttgctccggaggctcagaggcaaacggcacaacttgcttctccgccaggctcatgtggagatcagtcgggcaaggtgaaggtatgtcaagtcgtctctaaatttgattcaaactttgttgccaaggctcctattgttagctctctcctcacgtcaatgtacctcccttctattcctctctttatttgcgtatcttcatcatctcgtttgtctttgtcaaacttcatagtgtatgcatacatccccacatcggggtacgatctgtgcacctctaccaatgtaatctgcaacagtgactacggcacgtctcttagccgtggatccttcacctttagccgaggcggatggaacaatattcaactctttgttcaatacaacaacccagtccacaccgcaaacggaaaaattatcatgtttgttaatgtgcgtagaaaatgctgtcgcctatcgtcccttctcagcattcatgattgccatcgcaggaatcatctgcaatcgatccttctcttaattcttggctgtatctgggcaatcccattgattcctttcccttgctttgccttcttttttgccgaccttgttcattcaggatacccttgtgctttctcacacagatctattgatccgatcgtcgaccaatttagcttccatcggtggcctctttttcagcacattcttcggaggatctgactcttcctatgcgtccacgcagaatcaaacgacatactatcgaaactttgcgctgaagggatcaaccttgttgagtgatggcgctggctcgaccgtgaagtctggtgctcagtcaaagaatgcagtcttagccaacggctggatcgctttcatgttcgcgacggtcgctctcgtttgctcctttgtttactagaattaagaaatagataaagggagaagatacatctaaggactctctgtcgtttcaatgtttgtttttctgctttcgttttcgtctctcttcttcccacctgcctagtttaccatttgtgcttcgccttctgcctatcgcgtacctttcttttcatatttttggaacttatgtcttgttttgaatctttacatgtggtaatgtatcttgacagcgccgatgaggttttgcgccctacaatgttcttctctttggtgtctttttttagctaacctatatatatctgtctcttcagaggtggctctttcggtttgtatctgcgttctgcgttcctattgttgctatacttgggatcttgtaagatatttatctttcctgcccttcctttttcaccagaataggaattatttattcagtcaatagtactttgttgtgttgtccagaagatccattgtatctatcctcaagtgaaaatagacaagtaacataaacgatcgaaaaagagtccatttggtctccattcgttcactcatcaaaatctattcgctctcctagccttcctggccgccgcctcgagatcgaccgccggatcctcgttttgactgtatccgtccaaaagatcatcgtaacctggtccgtcaccagccacggaaccttcatcatctgcatccgtcgtgttgctcacgatcgaggtcggtctcgtttgtttcaccttcacagccggagattgtctcaagctcgaagtcgaattcacgccgccgctgccaccgatggtgacgctgctggtcgatacctttcgagggcccctaggtccgccaacagggctcgacccattcgaggacgtcgaccggactcgatagtgctggaaaggcagtgattgattcaccgaaggcgaggatgacggggtcttcaaacttggagaagccacagtagatacagatgcgccaaaggtacctacaggggtgtgttgggttcgaacatcggccgaaggaaggttggtagtgatgatggtcggtttgacggctggcgctcctacagaggacgtcgactctccttccgacccaacggtaggcttggtcggggacggacctgccatccgttcaacgcgcacgtccgagacagaggtgacctcagcagaatttaaggtgaggggccgtcccagctcggagggcatgacgttctcagaaggaccgtcaatgtggtcagtctctgaagaaggttctcgagaacgctcaaacgtaggatcctcgacctgagtcgcattcgaaggcgattgaacagagtcaccatcgaccaaggtccagcctcgctgagatccttctccggaacttagtgtactcaacctcgatgccgagcgtggcggtgctatcattgagtctgagtcgcttcctgcatagctagaagcggaggatcgagtccgactacccagcgctcgactcctgggtgatcgggttggcggccgggtaaagtgatcgtctgacgacccattcgtaccaattccagatccaggtcccgctcccgccactgcactaggtttctctcgaaacttgatgccagacatctgagactttgccgacgtcttgaggaaagatgtctttggctgagaataatcgcttccgacggacccactgaacgagcgtctcgatccgatcggtaccctcgacgatccgctttcagactcggacccgcaaggcgagaccggttgtcgagaagcaaacgaaggtggaggagaggacgagcctgaggtcgatagcggcgagagcacagatgacgaggattccgaatgagattgtcgggacataccaacaggactgtacccatgtggcgagcttgacacgggcggtctggccgaagaggagagcaaaagtggtttctgagcggaatgggaaacagacggtgaagaaacaggcgtccgttccggggtaacgatggcaggcgttgagagcttggcggccaatcgatcttgcaggctcttatttggggtgagaacaactttagtgggcgtcgcaacaagatgggctgatagttcactggagtaagaactcgatggagtgatcgatccgttagaggttcttgggggcttttcaacggagtccattgaaagaggggcctgtgaagaactagcactaaagttgtttgaaacaggagagctcggaggttgagagcttctccaaagtttggcggtccacgaagaccggttcgaaggttttggaggaggaggcggtgggcgatctgttgtgtgttcatcctccggtactgactccaaacgttgaggcttattataatcctcccatttcgataaggcagcagccgtcaaattggatgatctcttcgataaagcagcggccgtgtcactctctttaaaagcttcgacctttttgagcatcagactgtatcgagatgattgagacgaggtcgaagcatccaacccgttatctgaagcatcacccattggcccttcttcgggaacagatgatatcgataacgagggctggtgggaaggacggaacaatctggtagcaaaagaagatactgaaggcaacgatgtagatccaagcgcgccgagagtctcatcatccggtccatctccgttcaagtcggctaggagtcttcgttgacgagactcttgagctagttcaataattttgtccaaaccaatccgagatagagggtacctttgaagaagcgccatgccttcaacgaatccctgaaccacagaaaagaaccttttagtacacctgataatatccgcaaagtgccacgaaacgaacctctccaaaatctccattctgctcatcgacatctccccataatccgacactttgaccagaacgccgccttccggcttggataagaggctttctggtcaatagtaacatggctgtacacacatcaagcagtagatcgatcttgggggtctccgtacgcgtcgtagaaggctcggaaagaacgaaatcccaaatacgaagaaggctctccatctattcatacatttgtcaggtcgattgagaagtacatgtgcgtcaacttgtctgaccgctcttgcggcttcaataagtaacgaagaagcttacgggaacatcttgagcaagcaaggtagaaatccacttgaaagagtaatacggaagggctggatctaacgatttgtggttctgtgatcaggttgagtgatgagtacgagagattattacgaaacgcaaggccagaaagatgtgatcttcggtattagtagaaaagcaacgtacaagttcctcccacaactgagtgcagcgcgtccgacgagatattagccatatgctttatgttcatctgctcaaacaatcagtaattgagactcatacttaccgctagatctgcccattttaccctgtctgacagccttttaagagcccatttgacgtccctttctaccacgcctccgataacgattaagtcttggctccagatacccgctccgggtcctttaaccacgttccccacttctgccatcaaaccaacgaacgcccaaaatgtatctccctctactgcggcctgctcgtactcttcgatagatgcctttgccttggcctcggctacggaagcggacgcgtagacgaaatatagcggagcgagtatctcggcaaacccttgagtgtaagccagatggggatgaatgagagtaaatatatacaaaatacgcgttaaggcatcggagtgaagctctacagtcgatagaagtgagactgtaggtgcaacgttcgaaatggatgtaggagtcgtagaactatcctcttttgtcggttgcccatttgacgtgatacgcaagtcggaaaagtccaacggggggagttctgggagagctagtgagctgatcgatgttgaaggatcgatagacggagttggaacagtctggtctcggctgttggtacggataaggttatctgaaccgatggaattactattaatagggacctccgagctaccttgtctgacggaccctgcatcagactttgtagttaggatagctgctgagtctgatttctcgcttccagtctgaatggaactacctgcacttggccagaccgccgattgaatagcgtcgtttcggttggcgagtgctctacgatgcttgattgagtaagattgagaagaagtttgtgcagaatcacgtctgggatatgtgataggctgagaaaagaagttcaagtgggtctgagttcgattgacatctttagatatcgagtctagaagcttgtcatttgcggaaagcggatgcgatggagcctatatcgtgatcacaagatggaacgatgatgccagagtcgtatgtcagacaaaattgaagaatgatatgattagtgatggagaccaaaggatgatcagacacttaccgaggcatcttcaacctctttgagaaaattttctgcaaattgacagtatttatctcttccagtacttcgttccttttcccagcttgatttctgctttccgagaaccccaagtagcaaagagtacgtgataggtcggagatgaggcggttccgacgggatacctatttttgggatttcagatgattgatgtcaggatagttttagaaccagattagttgtcttgacaaagttgacatggcacattactgacctctagctgccagtcttctgagagcagaaagctcaacagtttgttccttggttgaaggagaagaatctaggagagactggaaggcaactaggctgaaagtgcgtgtgctccgaaagaagccagttaggaggcgctctgctctaaatgacatgatgttcggtcaaagttttcattataaggtctcacgattggtcgtcctgcttcatgacaagcggcagaacgtctgatgatgatatatgcaaggccgacttgaaagagatgatagaagaatgctgatgatggagatgatggagtatctagattgtttataatagacaaagaagttgttcaacaagaacaaacgcggtggttacatgccagtaaccccgctgaggagactccttttgagaaaacgctgaaacggaaggcattttgatatggtacaaagacataaacataaggcaaagaaaggaggggggtcgtccagagtatcgtatatatgataagatatctaagatagtggtatttctatcgatgcacctactggttacttctttgctttagaagcagctttcgatttggcagccgccttacccttagtcgctttcggctgcttgataagcttgtcctttgaaaagtcgtctgcatccccagtatcctcgcgctcagactcctcgtctcccaaatcgtcgtcgacctgaatgagatgcaaaaaattgccaagtcagcctgatggactatcgagcgacaacatggtaaggagaataaattgcgcacgtcttgaacatcttcgtgatctgcctttggaccagcagcaagcttcttggctacagggacgttagtagccttgtgaacggcgataggatgatcctttttgttataactatgataccggaagagaaaaatctgatgagttacggaactctttagattattcgattagttcagaatacagagaatagagaaagtatacgcactttctagtaaacgtgcttttaacagatgtcggtatcttctttagaatagtttcatccttcctctcgcctactcctagctcaactatcgaatcccaatcttccttgctcaggtagtattcatccataacgtcgatcacatcgtcaacggagttctgaacacagatggaaaccccacaacaggtatgaagcgttgaagcagcaaaagattagcaagcaacttttttccaagtgaaattagattcattacgtaccgccccctctttggagcataaaggctcgaccatttgagaatataaagtaggaatatagtgctctcgaacttggttcatattagccgagactttaagccgcatatgtatatgaatgtcgttcaactgtcggtaattctttgtttgtcgagaattctggcctagccacctagattcgtttcaacagcacaccaggcatcaagtatatccgttcagcaatcttcattcttgaccagctgaacgctgtttgatcgaaaggagcccactcactctgggaacttcataccgtacccgccgccccaacctccactgcctccgtaacaaaagtaagccggtcggacagtcgacatgattgcatggttcgggagtaaagaccactgttggtccgaactataagcagacaggggatcatgaaagaatttctttgtcaacagagctcacatgagtcaaatgttttacaggaaaggatgaacgaacctgtgaatcattctatccatcaaatctccttgagagatcgagtcagcagcctgatccaaaagagtaagttgcttgagtgtcctctcggggcctgacaacccatttaacctggcaaagttttgcttggagtaattgtcctaacggatccagaatgaagacttcaacggacggatcttctccacgaagcagttatatataaagagagggtggacctacttgaacgaacaacggaacgaaactgaaatcatgaaagtacaattccattttctcaccgagcgattgcttgttggtgtgagagaacatatacgggctaaagagtttatcacagattgtgaaaggagtcattatcgcgttcttctcgttagccctcgcgctagattaatgtccgcgcagacgaaatcagtgttatatcacgttagcgctgaaacacgagtaagtctataaggaaagagtaagagacgagacgaacagttccttgccttcatcgaaggtcatcgagtcgctagagagtttccatgttgacatcatatttagtacctgtcggatatcagagttcgaaccagcgattaactgatctaccacattgactgggattttcatcttttccctggtaacgtgataatagagacagtttttattagttgagattgcaggtcggatatttcgtatcgcgcaagacaaacctgaaggcgatagacatgatgcgcgatcgaatctcctgaacagttgctctaagatcaaaaagaggtaaaccaaaagcatagagtcaggttcacggtgatcttttgccggtagtagctaacagtgacactataccttcggaagggcatattgaagcaagtagactgaagaggcttcatctttggatgatttctatcattacagatgagaatcatagggatctagagttgaaaatgaatcgcatgaccacgtaaggcttttgacctctcaagagattatcaaactgagaagtgatggacatgccttggtcttcttgatcaaagcattcatagcgcctactcctccacgatcaccagaagacataccatccacctcatcgaaaatcaaacaggtcttatgtgtgatctcaactcctgcggcagtggtcttttcctacagacgattataaaataggtaagcgggaaactcagctgcgcaacctatcatcacgtcgacaacttcagaaaatacttacacctccttgtttgagccagccatccatgctcgtgttgtcgatgttagttcccgactgataaatgaatgatacaaagatgatcagaagatacttgaaactttgaagaagttggaactcgacaagtgaaaacgacggacttcgatcagcttcttactccttgcgtcactagcgttgtattccagcggttcatatccgcaaaccttggcaacaagatgagcggcggtagtctttccaattccaggagggccagagatcaggacagctcggaaagtccccatagcgtctttgccgggcttcttgaatgcagacttataagaggtactcctgaaaacaaagaagagaatggaattcgacagagtgtgatttgttaccgtactgtgcgtttcaacacatcactgagtataagtcagaaccgttgagacttaccaagcatgaagccaagtttgaagcttttcaacattggacttattaccacaaatctgagataattgtgaaggagcatatttagtcgtccagagttgggacttgggatccggaggaatgattctagcacaacgataataacgaacaagataaacgatccgtctctttagcgtgagatcaagaagacaaagacacagagagaattatactcacttgggagcgctgttgctagctgcaggcttctgagcctctttgattaattgagccctctttttttgctcctctttctctgcggcttccatctcttgagccacctgcttgattttcttctcttcatcagccattttcttcttagtcttctcatctaattcaccagcgccacggctaccgatcagtcctatgaatccgtcctcatccagggtcttgacgttgagcttcttgattttttccaacttagaaggtccagcattttctccaagaacaacgtatgaggttttgccagaaggcgccgtagtgactttgctatattaaccgatcacacatgcagatcaaagacaaaacattcttcagcctcttgctctctcaagtaggaatataccttcaaacggaagctcacccgccatatcgtttggccaattcaaccgcctcttctcttgccaaactggataattcccctgtgaagacaaaagtcaaacctgccaggcagttgggttttccatcaggaatttcttttgacccaggtgcagccggcccggttgagctcgccatctttctagccatgaaagctttatagcttcgagttaggtatgcaaattaagactattagtgtaactgttctgctcaatagaggtgtgtcagttatttgtgacgtcaaaagctattctcacttatttgcctttgtgtctgacttctcgtctttctccttgagttcctccttgggttcgtctttagatgtaaccttcttcactgggggtttcttctcgacaacaggcgccttcttagccgatgatttctgggccggtttgatgtcttcttctgatgatttagagtcctttcgtaaagaagataagaatgacatcagctctacgccacgtggtatgtacctacttgctgttagacttaccttatcatcttcgacccttctcttgttactctttacggcagttgaggctgaaatcttagatccgttcggtttagtagcagaagcaacagcaggctttttttggactttaatctcgtcctcagagtcactagaaacaatctttctctttattggagtctttcgcgctgtcgtcttggttggctttggcgcttcctcgacttctgaatcagacgacaaagccttccgcaccgccctaggacgagcaactggcttagaagtcctggatatggctgctagcactggagggatcttttgggagctgttaagatgttttcaggttatatagcaagaaggactcagatcagctcacgttcaggagcgatctacgtatacaacgcaaaacgagcaaggagctatttagtacctatttggttgcttagaaggtttttcatcatccgagtcacctataggtcagacagcagtcaggcagttagacatacgaggctctgtattaattaatccagctgtagagatttgtgatagagttaaatcaatgaggaaagaagggctaaccgagttcaatgacaccgtcatcgtcgaccacggtggacgaggttttggctgccttgctgaatggattacccttagaggaagaggccatcttgatcactgagctggtatttgagctcgattgttcacttccaccctaccatcaaatatgcatgatgagcgacaaggaaggatgtcaatcatcgacatacatttttgaagagaggatgaggagaaagataatatgtgaaggcttacgaagaacgatcgaatatcagctcctgatttatcagttggcttcggtgttacctccttctttcgtgggacagaagttctcctagatctctcaatctccacatactcttcttccgagtctgacatgacaacgaaggacctatttcaaaagaaaaagaggataaagatgaggtataaatgagggtggttgatcgatgggagtacaaatcggacgatgacgcgtaatcaggcgtgttcgaagacgcgtgtccacgaacgcgtttgagtcatgtgataaagcggtgcgcgcgcgtcgccacaccgtgaccgcccagccgagcactcactcttcctcttcctctctcttgcctctctccatctttcttcatcttcttacagcacacacacacacaagcgttttaagctagctcgctctctctagatcaatcagaactatgtctgcccctccatcagaagcgtcagttttgttctttattgctctgtgtttctaaaattgctcatctacttacctgccctcgaatcatctcgctttttcctgactatccgatcttggttcatatgtttctttttctctctttcttttttcccctaaatagtcgacttcgagctgaagcacgtaaggccaagatccaagctagaggaggtgccggtttggcccgactggcaagcaccgcgagaggcgaagaaggagccaagttgtacgaaacgcgtaagctgaaagcttttcctaagaagcatcctcttatgttttcctattttcgcctcatgaaatggagagactgattaagccgcatgcccacctttttgcattaaccgacttaataatatctatggacctaacatcacgtcttcagctcctcctcctattcgacgaacgacctctgaaaaccaagtgtcctctctacctccatcatcctctcagcccagtactttctctcccactccctctcagtcccaacaagagtttttgtctcagatgttcggaggctttcctcccgcctttgatggatcctcgccctcctcgccctctcccgatgccgatccacttcaagcaatgctccagtctttgcagagtttttcatcaggctcaggatctccttttccaaatcctatgggcgactctgctggaggtctcttcccacccggattcgatccgagcgcagggactgaggggcagcaggatctgatgtactcaggggtcaaatcacgaatggatagggtgttcacgatcgctcacttcttgggtgtactggggctcgtagtgtttgtgctgggatggtgggaaccgacggttagagaaaggagagcgcgtactggattcgttggagaatgggatcgaggaaatttggcctggaacgacaagggcgcaggggttgagctggtcagtgattctctattttgactttgttttctgtttcgtcctcgctgcgtgttggaacggagaagaaagacagtctttggacatgtgaaagatcgatactgttcattgacacggcaatcaaacaccccacagccggtcttctgggctttcgcaactctgtccttgattctgcagacgacacgcgtcatgcttttccgagtaagtttctttcttgtcgtccttccttaattgcatcttacattgtccaaactcgcgctgacttgctgttctctcttcacaaccgactcgatatgatcttgctagtctcggccacctccttcaaagctcctctcgcttgcttctcctttcctcccgttcctcccagctcaactcaagggatatctttttactgcttcaagatacatctcgatggtcactcaatttggacaggatctatgcctgcttctgttctgtgtcgcgctcggaagatggatccgatccggacaagatctgactggaggaaacgaactcgttgtcgaatgattcggaacgagctagagcttgaagaagatgaaactatattttaatcttgtatttgaaagagaagccaagaagatggcaggatggttatgctgtaaattcttggaagttgcttttttttgcttttttttctcttgttcctttttccttctttctcaatattcgtccaacctcgacccgatctatatgaatgagggggaagcaggagatgggacgaaatataccactagagcagcagacaaatcttatactggtacttgacataatatttgagatttaatacctaatcgtcattccacttttagcttcactatgtcgtctcgaccgctcttcacgcggcaaaatatgcaccatccaacccagacagctcccaaccaaacagcgatcgctgtactgatctcgatagacgataaatgtgatgaacttccgacaggaagaaccatcggagccgtcaacggtctgtctgttttcgatgataagatcgaggaggaagttcgaaaagagtacaaggtctgattcattgatgaaaacaggtccggaggaaacgggcttggtagaccagaaactactgttaaggaaggatcaaggttgatgacaagagtagcatgaagattaggtattgccggtagaggaaagcgccatgatacttagtagaacaagaggagaagtgaacaagaagaacgaacctgctgatgacgaagatggagatagagggcattttaggcctacccatggccattcgatatcaaccgtccgctccgagcgctcttcttctaccctcttcggttctagatatctcccgtgtaacggcactcctacctgtatgttcctttctttgtttccctctgcaattttctccttctgctgaatcagattgatctctaagatgagccctgatccgtctctcgctcggtcggatagtctcgaaaggggtagttccagctcgatatctccaaagaattgaactgagtcgcccaggacgccatcggtatgaagctgatcgatttggtatggatcaatgatgacggacggtgggacatgatatataagtagaacggtacattcaaggaatgattggggtatgtcggcgttcgaatgaacggtgggaagtgaaaacgtggtgagtagagttgaatgaaaggactgttcaggaagaagagcgctcgtgtacactgggagatcaaacggcggagggacgtccgaattcagatccaaaggcaaggattgtcgaaactgatggatcggaaatctgttcttcctggccgacctctgccgttcaaggcgttccgattcaagctcttcccgagtgaggccttctccatccggactggccgtcagatcggccactataggtgaggatcctagacctcctcttgctcctccttctctctcaagctgtccgtgaggcctatgaatgggcaagctcatgttgctgatgagtagataggtactctaatgaaagctgagaacaaaagatcgttcgttgttgggaggatgattcaatcgcagggagtgttctcaatcacttgtttttttcccaaatactctcaatctccgcaaaactcaaaaaagctgtgtgatcgtatacgtccgaggcttatctcatcaatcgcagctgatttcaaacacccaaagccggaataacggcgttaactctcagtctgaagaggcgtgtaggacaaagacatggtttgcatgggatgaaatcaagagaggatagaagggaatagactgaacagaacaaaccaaagccaggaccggaagcgaatgcaagaatgattactcaaaatatagaagaggaaattaattaacaggaatagatgatataattaggaaaagaatgtatggaaaagacagtaaacaacgaatgactggaatgggaaaaaaagaatggaatatgcggagggacatgactacacccaagaaagcgttcaggagagaagaagagaaacaagaaaagacagaaggaaagtgaaagacatgttatcctggcggtatggtgtgatggtgcatgcaaagacctgtggatggatgtataatgagaggaaggttgagtgaacgtacaaataattagaacagaaacagagttatagacagatgaagttgatatgtggagcataatgtaaagtgcaggcatgggtgatctaatcaaagaagagatgagggagaagagggaaagacgagatagcatgctccgtgattgaccagaggagagagtggacagacattgaggtccgaggtcgaaggtcatctttcctgtcgagaggatcctggtgtcggccgaaggtttgctcgactggatctagatcccatatgaggctgaggctgaatgtgaatcggttgttggtacgctgcctgatgcggttgaatatattggggtgtcattaggggagaaaatccttggtgttggttaggaaatccaaactgagtgtagtgagtcgagaacggataaccctgaaccgaatacgccggttgagggtaatattgaggctggggcacatgatgaaggtggtgaggatggtagtaggttgttgggggagaagtcaagaccggtgagtaagctggttgatgagtgtagtgcgtgttgccggcaagcgaaggggttgaatacgaatgaaccatcattggggatgaagcgtaaggcggagggatctgtagggatagactagagtgatggccagacgatggacgactcggtgcggaggtcgacaaggcgacaggcggctgagctccaggtgagctgagagccgatttttgctgactacctcgaaccggctgattctctatcgaggacgaaagcggtgaaggtgtgatggcagcggtcgaatgccgtttgcttatcccgccactgttggttgagacaggagagggacgggcggaggaaagaattgatgaccgaggggacgacgacggtggggaacctgattggggtgaatgggacggcgtcgtcgaatttgatgtcgacggagatatctccaacgcgttttgtctggatctatccggatggatcgacagctcgaccggggcgaacaccctggaagatctgtctcctcgcctggctgccggctggttggtatccatagggctagcgctattctcacccaacgtccgtaagctctcgctcctggttgtccgagaggatgttgcgaccctggcactgagcgcgccccattcttcgtagttgccgttgttgcccttcttgctcccgagcttggcgagatctcttcgctctcgagcagcagcgacctcggctcggtacctttcctgtcgtctccgctcttcctcatcagcccgaagacgatctcgctcgagtgcctcccactctgcgtcttctctcgccctgatctctgcctggctgtccatccagggagcctcgccttgtctatctaaatcttttccgagatcctccttacatgatctatcgtcttccatcacgtcaacctgggcaaacctaactcgatcccgcgctctcgtcgattgtgagggcaccggcgtgagggcgatcgtggagtgtctccgttggatctcgctcagcggggtctcgtcctccttgtcatcgtcttccaatgcagactcggcgaattgagaacctactggtggcggaaacgatcgcctagtgaccaagttcattgagctcatcgaccgtctcggtttcgaaagcgccgatcgagggatagcaagctgctgctgctgctgctgcttttgtaaccccaaggacgacgatgataacgacgacttgagctttgaagcgtgcgggacgttgttcatcgtcggagagagaaactcgttgacaggctccgacgaggcgtttgccttgattggagacgacggcgtgctacttgatcttctaagcttgatccctggtaggaccgtttctctgactgttggaactcgatcaatgaccaccttgagcccatctgccggactaggatctgtcggagaccgtctgcctaccagtgagttgacgagcgagggtaacgtcgttccggatgtcgaatgtctcgtcccaggaacattaacttcgaacgaggccgaagactttttgataacctctcgagcgtaggcctccatgccctctgaaaactcgagctccatcacggcgagacctctggcaggaaggattggttcgacaatgatcctgtccggatcattagctgccgggacaagaacgatgcttctgacctcaagagtcggtcgagaaataaatgcaagaatgccagagccggcgagaggaagattagcccgggggacggccgaggtagctgcaaattcggctgttgagaccgaagcatccgatgtgggtgagattgaggcgatcagccgaccagacttgtcgcgctgcagggagaccggacgagcttgggacagtctgaaaatgggtttttaaaaaaggtaggaggtctacggtgaacaagctgactggctgaccgagagaataatgtcctttggaagcaagaaggaaaagaggagaaaggacgaaccgaatcaacgcctccatctcatccgcactgagacgcgcgtcagtctctaatcgatgcatcagtcctcttacaccaacctctgcggtaagcccgacgactctacgtctcggtgtggactgtgcagtgaccgggttggtactggcaggatatcttcttgtctcgccatccttgccagaggccgggttgagtcttgacatgaaaaacggatggggcgatggcggtcggagaagaagactgagtttttgggaagataatagatgaagcgactgaagaggcgttagcgtaggaggttgctgttgctgctgttgaatcgaagattgggacgatccaaaatcctgacggaccgggcaagattgggaaggagacgaagaaggaatgttgggaatcgaaggaagagagattggcggaaaggacggagagcctgtcggagagccaccgggggacggtgaatcagaaaggaaccgtcgaccggcttgacccatgaatgccggagaaggaaaaacaagctcgggaaggaccgaggacgaagacggcggcgggaactcagaggactgagaagcaccagtggcgcccgaggtttgcatgacgagacatccttcctgcaaagatgtctttccgccggatggtttacctttctcctttaccttctttgggccggcgctcgagccggagaaccaacctttaaacataccgaaccctgaggacgatctcctcagtgtctttagatctttgtccttccctgaaggcgacagaggctcttgcccgtttgtcaggtttggcgagatcgtcgttttgagctggacgatcgaagaagccggactagccaacgatggcgcggttgacgttgtcgaagtgatcgacgtgtccgacgagttggatgatcctgttgtactcgagagctttatagaacggaaccaatagaagaaaccgaaacgacgatagtcagtatggcggagatataaattgacgacggatacaccaacagacaatcccgagtgttagcacgagaagggtttagagttttgtcgcacgctatgcacgcaatcctctctgtgcacgcatgtgtacgagtgtttgcacacactcatacacgcacactttctttctctctttctttctctctctctatctcctcctccctctctctgtctctcctttttctcttagatttatctctcaacctatgtggaaccaagctgatatgaaacacagaagaatcggatgacgccgagaattagacaaacctctgttcgaccgctgtcgcatgatccgctcctctccgacgccggattggccaggccggatgcgttttgtttgagagtgaatcggccgtatctctcgccgtcttctaactgatggtcagtcgtccacctgatgtgtcctgtatccgttctgtccgtaggggacgttgatggactggtggactgaaggggaggataaagagtggccgagttggaaagcgaggtatgcgaatgaaactttgttgttgccgaagaggtctgaagatcaggcatgtgtaccgggatatacgagagagttgctgtcgagggcattcttgccagattatctctagaggaggagagtggacgccaaaggaaataggataggtggcgaaagtcaaataaggatgaccgatcggggtgtggtcagatcggttgagaggaacaggtggacgtaatgagttcgcttcttggcagacagaataggactcacaaacaaactccgaggtttgcgcgattcacccggcgtgttgtctctgctcgagaccagaagttgaacgagaagaggacagggaaagggggagaaatcaaggtctaacactagatctgtactaatgccggacgtcatgccagatgaaaatagacgatagggtagtggtggtggtggacgataagacggaaaaagaaagaatgatcaatggcttcattctgaagatttctgacagggccgccaagaacgtgttaaggttgagaggctcaagttgtgacgtacgatagccaaaaagaaagacagagacagagagcgagcgtcgggaatgacggagacgaaggaaagacgagaggcgcaacaggtgacaagacgggcaagggaccacaagagagagaaggaaagaggaagacaccctaatcggtcggcgttgaggagagaacgaagggaaaggctataggaatacacgcaaaccagagatcgcgatcggtttacgcgaacccgaggcaagaaagtggatagacaaaccggttagaaccccgaacgaactgacaagctaacggactgacggacgaacagatgaatgaatcgaacacgagcgaacgccaaagataaggacttacagccaaacggggacaacaagggtagcggaggtgatgatcggagagacacctagccgggtttgtcaccaagagtgtgggagtaatgcggcgtcgggcagacaggaggtcggaattcaagagtcggtgtctgggtcagggtcaggatacgagaagagaacgaggtgtctgttctatccaacacgaaagatgtatgtttttgatgttttttaaaaaacaaagaatccaggtcaaacttgtttggggtgtgtgtgtgtatgtgtgtgtgtgtgtgtgtgcaaacaggacggaacgatggtcgctcaggcacgaaacaactcacctgatttagctggtcgaataaagatgtaaagagaagaagaagaagaaacgaagattctctcgagacgagagcaggatcagatgggcccggtctttcttccttaactctggaccaccgataggtgtgtgtgagggcgaagggaaggtatgaaggagatgaaggacggggtgtgtgatgtcgcgaaattgtgcaggcacagagtttatgcgtgtgtacatctatcgatgcaagaaaccatccagattctagagtacacacacacacacacacacacacacacatatatatttacacatctcatgtctgctgatgatttgccttctcatccatacatgtcttcattcgttctctctctttactttgtctgtcgttgagattttcacatgtcgtgtttcagtacaggtcggtcaggtcagacccgcatcgatacctcgagcgcaagaagagtgtttgaactaaactacctagtcgatttgaactaggatgtacgttgggtatgttgattgcctacggtccctttctagctgtttctatcgctcgagacatacgtcctctgcttctttccttgctttgttcttccccttttcctttttcccccttgtctgtcaccatctttctccaactggatatgcgctcgtcgactgtatctaattggagaataagaaaagatcccacgtgcgagtctcagatgttgttgttttctttctttcttattttcgtttgaaagttacgcagcgtttctggcacactcacttgaaagaacgggatttgttcagggcatcccgtctttgcggtctttctcaagacctgctcaactcactggctcactcgcccgttctttggttttccgttcgatctgcttgaccaagttcgattcagacctagacagacggaacggtcgcttctctcctcgcgcttatctgacagatctgtctgttttgcccgatctgcccgatttgtccgatggtcggggaaagagatagatagattagggaagagcataaagaacccggggtggacacagatggacagacagacaaacaaggaaggagataaataagcaaaccatctgtttggtcagttctggcttgctgtcggctcgtttgtttctaacatccataaagactctatccttgcggtttcttcttcttttctttcatttcttttcagttcttgtctgactttctttctttgttctttttcggtgagacggcaggtcgaaggggaaggggggttggaagacatacaagaaaagaaaagaaaaaaggaagtcaaaagtgaaagccagacagaggcaagaaaaaaaaggcgagagaaatctttgtcaaaagccggcactgtttcccatgagaagacttgtagaacgcaagaaaacagaggaagaaaagcgcatctcaatttcaaaaagtcaaacagggaggggaaggattgagggagtgtagatgaatggggggatgagggggagggcgatggagttttgtgtttttttatcgggaggaggaagcagaagccatggccttctggacggctcgcttgatgtgcaggtgagctcgtcggagctcatcagagctggtatcctcaatctcgagcttctccaaagccttggcaagctcagcctcgacggcggacttagctcccctcttcatcttgagcgaaagctcagggccagagatggtagactcaacagagtgaatgtaagcctccaaatcggactggaaagtgttgataagaaagaaagaccaagtcagacaacgctaagaaaaacgagtgaaggaatcattcggagcatagcaaaaagcttaccttggcctcgtgtcgggcctggaagtccttgtcggcggccttgaactgctcggcatccttgatcatctgatcgatctcggcggaagaaagtcggccgacggagttgttgatcgagatctgggcgtttcggccggaagctcggtcaagagcagagaccttcaacaaaccgttggcgtcgatctcaaaggtgcagacgagctcggcctgtcctcggggcatgggggcaatgccggaaagctcgaactctcccaacaatcggttgtccttgcactgggttcgctctccctcgtagacggggaaggtcacctgggtctggttatcctcaacggtggtgaaagttcgggacttgttggtggggataggagtgtttcggggaacgacgactccgaagatgtcaccctgcatggcgactccgagggagagaggagcgacatcgaggagcaacaagtcggcggtcttgtcagaggtctgaccggtgagcacggcggcctggacggcggctccgtaggcgacggcctcatcggggttgatggacttgttgagctgtcgtccaccgaagaactcggagacgagggactgaaccttagggattcgggtagatcctccaacaaggacaatgtcgtcaaccttgtctcgggccatcttggcgtccttgaggaccttgtcgacagggtcgatggtggacttgaaggaagcggagttctaaaagaggggagagtaaaggaaaaaaaatgacggcaagatgaacaaattgtaccccaagaggactgcaggacaaaaaccaaagaaaacaacatacgatctcctcgaatcgggctcgggtgatgttggcggagaaatcggttccctggaagagggagtcgacctcgacggtggtctgggtgacggaagaaagagttcgcttagctcgctcacaggcggatcggagtcgtcggatagctcgggggtcctcagagatatcgagcttgtgctttcgcttgaactcggcctggaagtgctccaaaagggtgttgtcgaagtcctctcctcccaagtgggtgtctccagcggtggccttgacggcaaagacaccaccggtgatggagagaagggagacatcgaaggttcctcctccgagatcgaagatgaggacgttcttctcctccttggtcttctggtcaagaccgtaggcgatggcggcagcggtgggctcgttgatgattcggaggacgtcaagtccggcgatggctccggcgtccttggtggcaagtcgctgggagtcgttgaagtaggcggggacgctgaataggcagacaaagtgagaacaacgtcagcgagcgtcaaagttgggaggcaaaagcgaaaagaacgaacgtgacgacggccttcttgacggtcttgccaagcttggcctcggcaatctccttcatcttgatgaggaccatggaagagatctcctggggggagaaagtcttggtctcaccgaggtactgggcctggatgaaaggagatccgtccttgtcaatgacggtgaaaggccagtgcttcatgtccttcttgacgtcagggtcgtcgaatcttcgtccgataagtcgctataaagagttagggagaaataaccagagggatgagacgatcgaaaaaatttatcacaaggtttttcagattatttgaaagtctacaaaccttagcgtcgaaaacggtgttggtggggttcatggccgactggttcttggcggcgtctccgatcaatcgctcagcatcggcgaaagcgacgtaggaaggggtggttcggtttccctggtcgttggctaagaagagaagaagcaaggagaaagaaggggtcaaacttggtgagttgattggatgtggtgtgaagggcaggagcaagatagattactgaccgatgatctcgactcggtcgttctgccagactccgacacaggagtaggtggtaccgagatcgataccgctgtaggatagaatgggtttactagagtcagacacagctgcaatttttttccttgtctattcgatctttgattcttcaatttttccctatgccgggaaaggggaagaaaaaaagtactccatccgtcttcttcgccaccgtagtcttggacatagttttatgttgaaccaacttacatggcaccttcgtagacatcctcagcagacatgatgaccttttaaagagaggggggtgggagggctgaat

SEQ ID NO: 1745 - DNA, 27752 bp, Xanthophyllomyces dendrorhous
aagaagaaaaaaaaagcaaaaaaaaaagatcaaaaaaaaaagttgcacacccgggggggcggtctgtgcgtacggagtttgaatgtaacgcactttgccctggttagggttatttcacgtataggctgcctatagcgcgtacagaacctacacaggtcctggagagaacgatgtatgctcatgaggggtgtgtgtatatgagttggagggaagacacgtagagttttggcaagtagaacttgaggttaaaacgtatgatactttccggtctaaaaacgtcactcgtagactggcagatgttttcgaggggaggagtgaacggagggaaagagagcggactgggtgttttgaggacaaacaattgcttggaggatgtgcgagagtgtgaaggtgtgaatgcgtgtaggtacgtaggtatataggtgtgtacatatgtaggtatgtagatgtgtacgtgtgcgtgtgaacaagagaggtagacggaaagcaaagttgaagaggacgatggagtgggcatatgagtagggattcaatcagacagacataccgatctcatctgaaccaaatgaatgagttcaagatgtgccatgtgtatctctgacctatacatgtctgtctctccatcagtatgcacctcattctccatctgcgtccacctcatcctccatctctctgtgcgcctctcactctcttcaatcggtctggggatgattggtccgggagagacggacactgccatttaaccctaacagatgccttagtctatcttcggccatctccattagcccatcaagagaaaaaaaagggaaacaagaaacaagaaagaggaaatgaaagagatgaagaattcatactatcaatcacccagactcacttcttgaacatccttctgttttccgtgctcgttatcatcctaagtcgttcctgagaatgtccaactttatcactcacggtaagaaaatcgttgccatcggccggtatgtctcccttttttgtctctcgaggcgcaagagaaaaagaaatagacagaatagaaaaggaaagaatactgaacgagagaatatttcacacgaccgacatatcagaaactacaaggctcacgccttggagctcaagaatgcgatcccaaaggagcctttctttttcctcaagccgacgtcgtcttatatcacacacggcgggactgtcgagatccccaaggggaccgaggttcatcacgaaggtaggaagaaaccaattctctctgtcgtttcggagactagatcgcgtcgttatcgattttgttgacgtggaacgagatggatttctctttgtttcttcccaaatgtacagtcgagctaggggtggtgatcgggacagggggccgagatatctctttgacggacgcgatgaagcacgtcgccgggtacagtaaggtcgtttgtataaacctcgagagcatctgccctgttcgatacatccgtcctgaccagatctctatcgggttgtctcagctctggccatcgacatgaccgctcgaaacattcaggatcatgtgaaggcaaagggactcccgtggagtaccgccaaggggtttgacagtcagtagcacgtttcgctttagttcgctgaggtttccagagcctggctggcgttgttactgaggcaaaaaatgtatctggatacactgggacttcaagcgttcaaccctatctctgggtttattccaaaggatttgatcgagaaccctcacgacttgaaactctcgctatctgttcgtcgcgtctctcggttttgcctttgcctttgcctctgcctctgcctctgcctctgcctctgccgttatacttcctttagaagtgtgtgcgtgtaggcaaagaagtgagtgagaacaagccgtgccggtgcttactcttcgcgtttgtctatatgtctgtagatcaacggacagacaaagcaggatgggacgacgtcggacatgatgttccagatcccaaggttgatcgagcacgtcagcagtgtgatgactcttgagaaaggagatcttatcttgaccggtctgtcctttgctctgatatggtgttgaccggatggctgaatgctcactcgaacgctgttgtttctctccctgtctctctggcttcttttctacacaggcactccttccggcgttggaccgatcaaggcttccgacaagatcagctgtgtgatgaaggactctgcgggcaaggagattgcccagctcgaggtgaacgtcaaggaccgggatggtggttacgcgttttcttcataggttgtatatgctcgaggcctgggtggtgatggtgatgagaatgacaatggcaatagcaacggcaatgacatgtgacgagacgtctggtgtatatgtgtgtgctagtcacgacgagaacaaagaacacaggcgagcaacgcaagcgccagagcgagagcagcagcagcagcagcatcacctccaccaacacaggcaacagcaagaacacaaacagataaccgagagttgccgtgggagagtacagaagagatcgaaacgaactgcccgggagatgaccggggaaacgtggggggagcgagtgtgggtgtccgtaaagttccgatggcgattccaacagagagcgaactacgatccagatcacaatccctaatacactttcccaataaaaactcctaattgagcccatcccgcgcttccccggctttctccatcttccctcggcctctgcactctgggtatataacacctgtgtgatctcctttcatcccgcttcctctttcgaccttcccagagacttgcctataaggatcagatcttctctctctctcttgttctcccatctccatctggtctctttcctttgtttatcaacatctatactcacatacacacacacagttcaccatgtctgaacaagccgagatcgcacctacctttcccgtagccagtgagtgtgattgtttcttgactcgcttctttttttttcccgctttctcccccaagaaatacacaacacacaagatcacacgcttgatcgtccgatacatcagctgatgcgctccctccattctttcttcttcttcaaactctccgtcattccgctatgcaccgtggaacgaaacactaacctcactggcacatcatccataatacaatcttctgatacatcaaccaaaaaaaaaacacgcctttttaaaattctaaattgccttctctaacccaaacaaaaaaaatcatccaatccgaaaccttcgaatacctatgggatccttcaacctctcttcctcgcgcaactagagcgtgtgtccggtacccatcctgatcatcctgttcctcacgtcggacctactctgcaacactatcatgattttcacgcacagaccgttggtggtaagcagggctcggacgagtggtggaggaaggttagtctcctttcttccccaaattgatagcatattccggttgatgcttacatccttcttctccttttttcttcttcctttttccttccttgtttttctttcttcttcttctttgcattccctctcttcgcctctccacgctcttctcgttatttccttcatggtctcctctcatctcgatcaaactttaaatccccatgtcgccgagattagatggccaaggatactctctactggcaccgaccgttcgagaccgtccggtccggctcgttcgagcacggcgatctccagtggtttgcagagggtggattgaacgcttcctacaactgtgtcgaccgatgggctttcaagaaccccgaaaaggtctgtccggctgttttgtctggtttcgtacgctcctgggtctgatgccttgttcgccattgcgcgtccctctcgtcttccagaccgctatcctatacgaagccgacgagcccggacagcacgtcgagatctcctacggagagcttctcagagaggtctcccgagtcgccaacgtcctcaagtcttggggcgtcaagaagggagataccgtgagtcctgttgtcttcttcttcttcttcttcttgctttcgggctttcttcagaactctgcctcacctcctcccaattcatcttacaggtctcgatctacctcccgatgacctggcaagcggctgccgccttcctcgcctgtgctcgtattggtgccgtccactctgtcgtctttgccggattctcggcagaaagtctccgagacaggtgcaatgattgcgagtgcaaggtcgtcatcacttctgatgaaggcaaacgaggaggaaagacgattgccacaaaggccatcgttgactctgccctcaaacagtgcccgttggtcgaacacgtcttggtcctcaagcgaacaggaggaaagatcgcatggactgagggcagagatgcctggtggcacgaggagaccgcaaaggttccttccgtctgcccggtcgaggtcatgaacgccgaggaccccctgtttatcctatacgtcagtctttagctctctcctttcctctacttgcctccgttcgacgcgttcccggttaatagcaattgctcatttactgaactcgcttaccgctttccttacaaatgctctccttctttcctctacagacgtcaggttcaaccggaaagcccaagggcgtggttcataccaccggtggttacttgctaggtgctgctttgactgtgaaatacgtctttgatgtccaccccgacgacaaggttcgtctccaagcttttctctttctcctaactctctccctatgtggccaggccaggccagacgcgtctttcggtttgtgaaccccttactgatcgtcatttctcacccatcctgtttttggttcacagttcgcatgcatggctgacgtgggatggatcactggtcatacttacatcatctacggtcctctactcaagtacgtctctcgcaccttgtatttccatgcaatcttctccctctccatcttacgtacaaatctgactttggtttccccccttgtttcttgtcacccatcagcggcgtcaccaccaccatcttcgagtccaccccggtgtacccgactccttcccggtactgggactgtgtcgacaagcacaagatcactcacatctacactgcgcccaccgcgattcgactgctccgacggctaggagaggattacgtcaagcaccacgacctgtcttccctcagggtcatcggttccgtcggtgagcccatcaacccggaggcctggcactggtacaacgaccacgtcggtcgaggacagtgtgccgtcgtggacacttactggcagacagagaccggttcgatcgtcatcactcctatacccggtgcggttccgaccaagcccggatcagccacgttccccttctggggaatcgagccaaagatcctcgatcctaccaccggtgccatcctcgagggcaacgacgtcgaaggtgtcctctgcatcggtgctccctggcctagtatcgcccgaacggtctacaaggatcacgccaggttcttggagacttacctcaagccctaccccggttactacttcaccggtgacggtgccggccgggatcacgatggttacatctggatcaaaggacgagtcgatggtgagtcctttcttgtgatttacaaacaacaacaacaacaacaacaacaacaaacacaccacgccttgtatcctctccgttgacccggagttctcttttcataccacagatgtcatcaacgtctccggtcaccgactctcgaccgccgagatcgagtcggccttgatcgtccacgccggtgtggccgagaccgccgttgtgggaacggctgacgaattgaccggacaggccgtctacgcattcgtctgcatgaagcctgaggtaagaaccatcgctccaggttctcttccgtcggatcttccatgctgaccgatctcatctccgacgcaactctttacgtctcttgtttgttcagtttgacttcaaggctcacaccgaggccgacctcctcaaagaattgacgttgcaggtccgaaaggttatcggtccgttcgccgccccgaagggaatcttcctcgtcccggatcttcccaagacccgatccggaaagatcatgcgacgtgagttctccttccccgtcttgtcttctcgacgagataatccttagcagaggatttatataaatttcctcgaaactggttattcatcacatttgtcatcctctctattataatcaggaatcctacgaaagatcgtcgccggtgaggccgacggcctcggagatctctcgaccttggctgacccttccgtcgtggagtccagtaagtctcttcgaaccgtccgtcaaaggtatctgacaaaaggtctcactcttgaaatgatttttcttcaacctactctccctttttttagtcatctccaaggttggaccccgataaaagacaacatatttctgttgaacgcctttccttccgttggggtttccttacattcttcgttgccatgtctgctctctcctcgccctcctttgggaaatatctctcgatgtatcactagtgctcgacccatcttttcgctttttttctctcctctgtttgttctcctctccgctttttgggttttgttctctccttcagctcgaggatgttggctttcgttgcttcatcttgatttcattccttcacccttctcctacccgttgttcatatggatgtaaagttgatatcgatgacccgcaaccgataaaatcctcttctcgtgttcatgccaaagacaaaaaaaggagaaacaaagcatagcactcttaggcaatgatagataaggaagaaaaaaccccttcattctatcgacgacctctccttcttctgtctcatcgcctcgtccttgaactctttccgcctgagagcgtcgaggactctgatgatcctactggtctccggttcgacagcgctctcgtccctcctcctcgcgatctcgtcctcgaacgtgagcttatcttgatcggcccggtcgatgaatttcctcaggacgttcatcgggatgggcacccggtcgatccctcggatcccaagcccgacttcgtcctttgtgcgaacgctgtcgacgacgtctttgctctcgatcccgtcggacgcacccaacggctcgcccagaccctcgcccctccatcctctggagtagagcaggtcatagatatgactgtccgtcgagcggatccggttgatgcgggagttgatcagatcgggatacgactgggatgagtagaacgcgtgcggggcggacagacgggcccatgactcgggcgtcagcaggtggaacgagtcggtcggctcttggatcgattccctgcctggttctgttggcgaggacggatcagaccgaggagggagcgagaggtgggcgaggatccattcgcagactttatgagctgggtaaggcgtttccctttcgtaatccggtagagttctgaatatagtaatcgagaaccaaatgataagagagcaaacccgcccgatgaccacgagtcaaggggagagcgtttctccagtaagaacaaggagctacaaatagcgacaaacataaaggagaagaagagcaaggaaagaaaacctacgagaccatgtttcctatatcgcccaagtcttttccctcctggaaccactcccaacaccaaccattcctcctcctcgcgaacgacgtgtcctccaacgtgttcaacctctttgttctttcttccttttccttctctttcagataatccctcacctcgacctcctgtcctctcagccgttccttcctgatggctttcgccgactttctctgtttccgttccggcccgacggattctctcgtcggatcgacagcgaactgaacggcctttggcttcttgagcacacgctcgtaagactcaatcttagacggtgggagaccgagcgctcggtagtctctttcggcatgtctcgttctcgaccaggatgctttcctgggtttcttcccggtaggtgtggcttcaccaaccgaagaagacgacgaggacgaggatgagcaaggggtagaatataaacgaatgacctgagaacgccgaatgagagatgtttgagatgtgctcgccaaacgggagcacagcggagagattcgtccgagactcattggctttttgacctcaaggtttgctctttgcttgtggagggaagtgtgagttgaaccaaatgggtttccgaaatgatgtataggtgagaggtcgcgaggtgaagagcatagcatatgtggcggcattgcacgtggcaattacccaacacgaacacataatacaagtttatacaacgattttacaagtacaaccggacacaataccaaaatacagcagacctcgagaaaagaaaagaactaaacgacgtatcggtagcctggaagaagagaagaaaggacaatcaacagtcagcaaggaatactctcggccttgaaacatgaaacgaaagaaaccctctggaagcttaccaatggtcttgtcataaaggacagtagtgtcgagagtgactgcctttgcaggaggcccaccctcagcttcgtctcgctttgcattctctctgtggtagtaggctgtcatgaagagagagagaatgacggcgagaccactcatggccaagttgcaagaaaatcccttggtccactttggtccgtccttggagacaaagaggaaggacgcggcgattgccaagcactgtccgacagtgttgagcattccgagagagaccgctcgagcactctcagagtacctcacgttgttggcaacccaactcatgatcaaaggaatagctccgtaggatccaatgacgaccaagaaggtggcaaagtatcggaccttctggttcttgtgcacgatcaatagaatgagccagcctgtgagttaatagagagttaaaatatgcacagaacaagagactccctttcagtacttgtttcgagacacagacacggagggagaagaaacgaggaacgtaccgacactagcaagagcaaacacaagagagacgtaaagtcctcgcctcttctgcctatcactaaagtagcagacggtaagagtaaagaccaaggcaacggcgtaaggagggacggtgtagagctgagcttctgagttggtgtatcccatggtcttgataatcgtgggaaggaaaccgctgacagatccgagaccaaagttcatgcactagaagtgaaaacacagatcaatattcattatcaacagaaggattccaagctagttccacatagtgaattggagaacttcgcttactgaataggtgatagaaatcacgtaggttttccaatcggtcaatgcatacttgatagcgacccaatcgatgcccttctttttctcgaccaaatttaatcgatccactgaagagatgaagaagtagagtcgatcgatcagtcccaagccacatctgaagaaggagaaacaaagaagtacatacttcgaaggaactggacggatctctccttctcgttaagatatcgagaagtttctggtcgggaggggaggaagaagaggacgaagagaccgaggacaaaagatgggactccctcgatgaggaagagaattctgaaagtagcgattgacgacttgatatgagaaacaccctaataaaagaagattcaattacaaaatactcaagtcagcaacgttgagaagatcctaacggttcaccagatcagaagatacgtacgtaggcgatcaatccaccgaatgcaccagccaacactccgcatccgatgaagatagagagccgcttagcctgtgagtattgatgacagttaggatgttgtcagtacgatgagtgccgaggcatcggagctgaaacagagaagatgctcacgatctcattgggcgtgtaccaaagggagtagtgaaatgcgacggcttgtccgaacctgagattcatagtggatcgaggatgaatatgaagaagcttcgagggggtgaacaaggaagaaatatcactcacatggactctccgagaccgatgaacaatcggcagacaatcatggaagcaaagccttgaacaccagccatacaactcgcggcaacagcccagattaagcaaccggtagcgatggtgagcgcgggcgaggtcgccttcgcgaggagggttccaggaatagaaaatatgatctatgcagacaaagtgtataaccctgggtaaattcgataggcccattgccgcggtcaagtgtaaagaacaaggcaacactcacataggtgatgaagaatgacataaggacgatcgagtatttggtatcatcgtcatccaatagggtctgtttttccaaaagagatgatgagagcgcaaatgaaagaattagtcgagatcacgggagacaccacaggcgctggaagtaaatacacatacaaacagcccttgaagtttggcatttccgatgtttcctctgtcgaggtaaccagagagctgaaagaggatgcataaaggtgaccgagtcagtacgttgtctttgctgtggagcagggcctgacaagtgacaaggtacacatgtcaccggactcacatagagaagcgcggtcaatggaatgatgaccctgtccaacttccggacaagcttccgctctactgctttctcctcctcagtcagttcgatgacaggcgcggtagtgaaggcctcctcgatatggttggtccgagctttttcgtcgtcgaaactgtcgtctcgaatctgagcagcttctttactcatgttggttgtgatggcgagtagttcttttggtatatatcctctgatgaagggatgtgtgcggggcacctatgatcgaccgaacgcagaggttgaaagatgggatgaagggagacaaagaaaattcgagacaccctcaagatggacgaacaagaacgaagcttttataaattcgcgacggccacactcgcccaaagggccgagaagatccagatgaaatacgtgtttgtacgtacgggacttttcttcttttttgggaagaactcagggaccgatgaacgcgaggctgaaggtggtgagggagcagagtcaggggtctcgggcgccgatgccgacacaggcacaggcacacgtacacgcccacaggcacattttcctgttccttcatttttggagaggagcatgcaacagttccgaggaaaaagccaggttctctagggtaatggaactcatcattcggcccgatcagccggtttaagccgtttgaagactgtcctccatcgaagcaagtctgattttcgagccgatcggtcattttaaggacatgatagggaattctcgtgtctaaatatagaacgagctttagtactgttcctcggtcaactcctaaatggaggctgagcctgggaaaaccgttcatagaataagagaagccgctgggacggataatgtacatatcttgagtaggtcaggtgcatgagagaaaattggtatggctctatcaggatagatcttacgcccgacagacgaccgatagacacggttcagcacaatccaacgcggtgcatatgcttaccggtcaatagagtgtagagagaaaagggtgagaaatcaacagggtagattgtatggcttacagacttgaagccgaattgtcgatccccgaggagaaatgtgcctctggagagtgaagacggatttatgtgacatctcaacaggacagcaggtcgaacgtcaaaccgaggcgcaatccgcgcggcagaccaggaaggtttccaccagacaggcaaggaggcagaccacgtttcgttccttggttgcgtggccctcgttggggcatgaatccgcgagggaagggaattgaacagaaatatcggttagaatgtgggaagagtcttcgtggaaatgttcatagctctggcttagtcaagcgtcagcatcggccgctgggttggcaacatagaaagcggactagacaacagtcactatgttagctagcacaaccaggcctatactctcacaatctgacaaacgagaactagcggtcaatagatttctcaatctgtttgcctcttttcctgttcccttctgctgtcttttctgataaggacagaagaaaccaagacgtactcaggccatttcatcatttttctctttctactctgtaaagattccacaataacgactcacactctccggtgtcaggatcccaacatcactcatcacaagcccaatgtactctctcggtgtgtaatcatacttcggctggtgatccttcatcgcctggctcatcccttccagcaacacttgctcaatctgcctctcgtccttgtccagtcctgagcttgtctcctcagcactctcccccatgttagacgacggcggcgacaacaacggagtggtcaatccaagactctttttgaaacataacggcagagtcgagctcgtctttgacgacgatccagagccggacgaactgaaaggaaggagcgggagatcctgttgagagagaggaaagagtcggagaaacttgtaggactctgccaggcagtagaacggcttgttcaacgcccgggatagcagtgccatttggtacgttccaacctagaagaatgcgattaaacacaagagcaagacttgttaggggagtggactgtagctacgcagcaaagaatagaaaaaagaacctactccggcgaccaaccctccagactcaaccacaacctcacttccaaccaacacaagatccactcgatccatcacgtaaccaacggcagagtccaacacgaccgtacacggaattcccaacgccgtcaacgcggcgtgtgtctttagcctaaccatatttgtatattcgggtaccagaagagagcagataatgtcagaacacaaagagctatattccttattggacttgtctgtgaagaacagagaaaaacacgtctaccaaccctccacagttcggacgggcctcagtcacgtaaacgttcacccgcttgttttgctccattgccttcttcagagtcagaaggacaactctggagaacgagtgcgtcagaatctaatgaacgtgcaacaaaagagacacactcgccacagagtgagtaccgtagccaacagttgacaaagagcaagaaagatgagaacgcgatcgagcaagactcactgtgcagtcatctttcaagaaaccttgaacctcccgggcaatcttctcaatacattccgaagcgccattcttggcgaatctatatccagaggagaaaagagagtaaagtaagcttctgaaccaaatccttaccacctcaacgaaataaagagtcaactcactttcgaccttcctcaacaatcccagctctcatttcgtctaatgtagcacccctgcctgccgtcccgacagaatccctcacccatcgctcaaacaatcggactcctgcctgggttccgtatgtcgccaagggagactcgaggatgagcgtcgaatttcgatgaagcgtcatcaacagatgagacgtagtggacgctatgaaacaaaaagaggcactgtcagtccgatacctgctgctcttatccttccaaacaggagaatatcagactaacctgactgagaatcaatcatctcggtcaatgcagagatagctgctaacggaggagtgatctgtcatatgtcgatcaggggacggcagaatagtgtggtcagagttgggctcagttgtgagagggcttcatggcgtataggagaacgtacatcttcttcgatagcctgagcgtacaactgggcgacatctcgaggagctggagactgggatccgttaggcatttgatagatttgccgacagggtgtctaatatatatgggtagagtttcgtttgattgttggctatcgatcgtccgttagaatattggcggatgaagaggaagaaggagaaggcgaatgaggagaaagagaagaaaaagactcgagaaaattgattagaaaagtacaatagggattcttccggagagaatacaaaattcctctaatcagtgaaatcctcccggcgggccgaaactcacctagaccgacgagaccaccatcaccatctcccttagactcgttcatcaacacgcttcaatctcatccatccataaataaacaacgcaagcacaatgtctgaaaacttgtaagctttgtttgatcgatctttcatcatcgtatctagctttagtctcacatctgtccccttccagagcaatctttctggaccgggcaaaggtaatgctccgtgacccattctcctgacttaaacgccatacgaaccctaacagacatctcattctcacaacacacatatacacacctagttctatgctacagactttgcgacttcgctatgctctgtactatgcaagccatcctcagaactcaagatcaatggtcggacgtttcagatcgtcaaactcctcggtgaaggcggcttctcattcgtgtatctcgctcacgaccaatcgacaggccggacgtttgctctgaaaaagatcagatgtccgagtggggatgtcgtcaagattgccttggccgagattgaagcttacaaacgattcagaagcaacaacataattactggttcgtcctaactttgagttcgatataaacagacgggaaagcaccgactggggctggaacgagggaaactgacggtctccttcattgatgtttccgttggttcgtatcatttgttatcttatgttcttaacatattcagtgcttgactcggctgtcgtccaagatgaaagtggagagggtaaaatcatctgggtctttctcccatactatgaggtttgttagctttttactctgctctcattcttggggtgtaaagaagattaggccatagtctaatgaggtactgaacgcttggcgtggcatcattctttcattcccttttttctctatcagcgaggcaacctacaagatatgatctctcgttctcttctcacaaaccccccgactcatccaccagaacgccagcttctgagtctcttctacggaacctgtctcgccgttcaatccatgcaccactacaagccttcccatgcgcatgccccaaccgcgtctggctcggacggttcggtctatccacctgccgctaagttcgtgtccgactcacaggctgagctagagttcgacgaggaaggagggatgttgctcgaaggacgggggggaaaggacgatatcgtgtttgatttgggcgatgaagaggaagaacaggatctcattcagaaggtcgacctgaagggaaaaggcagagaggtagttgttgaggagaatgatgcggaagatgatgaagaggttccatatgcgcatagagatatcaagcgtgagtaattataaaacaagaaccagaaagcaagaatagatttggatgtaccatccaactgacatgatgttcccctaactatctactctatatagctgcgtaagtcatctttctccgtgcttgattacgatgtactctatgatcgcttatgtgtttcttcctctggtatctttgtatatgaaacctgtgttggatgatgtagtaacatcatgatagctgacgatggcaagacgcccatcttgatggacctaggatcgtgtgttaaagcacgaattcaccttcgaaccaggcaggaagcattgattcaacaggtcggttgaccgtatttttagctttcagacatgctttttcctgttttagctcgaacgagtagacctatgatcagtctgtcttatgcaaactgcccttctgtgcgaacgatcatacgaacaggatgttgctgctgaacactcatccatgccttacagggcaccagaactgtttgagccgaagacgggtcagactctggatgaaaaggtcgatatatgggtaagttttgaacgcatgttatctccaatatcgtaagaggggagtggatgattacatcgcttacctttgcccttctcattgtgtttgtaatctcttctcaaccttccagagtttgggttgcactctgtttgcactagcctatgtatgtcatttttctctatctcccgtttctataacaatatcatcctaggaacggtgcctgactagatattccatcatttgtttatttcagaattattctccctttgaggatcctgctcaggctggagggtcgatttcaatggctgttgcttcgggctcttatcgacacccgagggactcgccctactctcaggaattcaaagatttgatagactcgatgctggttgtcaaggtcgagaagcgagcaagaatcgatcaggtttgtttccttctgttcagctggccatcttatcagcccatcgtcctattcttctcttgttgattcagttccggctgcttttattctcttcacctttgtgtaggttctggagaggacaaaacgactattggaagaggcccaatagttggctggcatatttgttcttgattgtgttctggccgccatgcctctcttccttcctttcatgaaagaagagatgttctcttgtattgccagaggtatatctgtctcagtttgcataaacttccactcttgaatgtatgggtctcgacaacaaagatgtacgtgtacgacatgaagaaggagagcaggaaacgcgtccggatgcgcctatgaaagagccacgggcttagaataaatccgaagaaaatcttccatgcgcacaacccatcagcaagttctcagatcttacacaccctctttcctttcctaccatcctgtatccttatagtaagagattcggtatcgggtttcttctccttattaagacttaggcgttagttttatcgtctgtttgaatgaaagcaaacctactaaatttattccttagactcaccgtgactcaccaaacgacgcgatgtaggtttctacttcaacaatatcttagaaccctaactcaaccgataacacccgctctactttggtcaccctcctctctattcgaacaagttccctcccttcaccttctgtctccctctcgcctctatctcggacttgacgatgtcaaactactctcggtccggaagctctatctgtggacatccttcacccgaagtttcgttctcaggaatgcctacccgattagatccaaccccaaataagcgaaagcgaacaacaacgaatgagaccgatagaaacgtaacactatctgggcctatggaacaatccgatccagaggcagaagaagaggaggaagaagaagaagaagagatggaggaggatatggaggatgatgtgtacgaacgacgagcagaatcgtcagctacatcgtcaacagtagacaagccgatgatctctcttgatgagggcgtcacgttcgagactggcttgagcggggatgaggatgatgaggatggtaagtttcctctcctttcttgcctcctttttcactgctgatcttactgtatatcggattctgtgctcgcggtttccttatggcttttttcagatggagacgggcctcggaaaaagacgcgtacgaactcgggtgattcccaaggaggccgaagatctattcatatcgaatacattgagaacaaggctcgaagacatataactttctcaaaacgacgagcagggattatgaaaaaagtgagattgagttgtcttgaccattcgcgtcacaagatggatgggaagaagagcatggctgataattttctgttgtggcctggctactatcttcaaggcctatgagttgtcagttttgactgggacgcaggtgttgttgctggtcgtttcagagactggattggtatatacctatacgactcctaaacttgagcccttggtcactcaaacggaaggcaagaacctgatccaggcatgtctcaacgcgcccgagggtgtcgctcccggaggagaacccctaggagtcagtatcctttttcttctcttctcttctcatcctcaaaacttgacttgtacgaatcgcagatcgcttactatgctcgcgtatcacctgattttctctggttggacatagtcgggtggaatgactactggcgccagatccaaagccaagttgaggtcaagcaatcaaggagctgccatcagacacaaagacgaattagttgtccctcctcgaccgaccatttcttctccacaaaactttgttgatcctaattctgccaccctcaacgtatccgataagcctctaagccatctccctaaacagtctaccccattgaagcccaaggctaagcctagttcggctcgaaagcctccgtcctcgtcttcttcgacccgtcgaccaaaaaagaacgctcaacggagtccatctcctacctcaacacatacgagtctcccagaaccaattaatcatcttataggatcagagttctccgaggatggaaggaagacgcctcctattacggaggacatgctgcatgctgtcgagcaggccaagatgcgacagatgaaagaagaagggccaggtcaaccgggcgaataccgaccactccctcctcactcatcgtatcttcaacctgttcctccgtcgatagatcgaccgaattacagctcacctctggaacattctcagcagcagcagcagcagcagcgacaatatgctcctataccatatcctcctccagagccaggtcataacctatatccttcttctccagcctttctgactcatcagcaacaccaacagctctatgatcagcatcttcagccttcagctggattccatttacctcctgaccaagctccttctcagcagcagcaacaagctcagcttcggaaccaaccaaacataccgcctccaaattctcatcaacataatcctcaccaatcacattcccattcgcaacaaattcacccttactaccatccagatcggtcaaactcctactcgaaccacacctcaccggcaaacacagtggaggaagctccgccggcaatggctgcacagacagacggatatggatacacgattgagcgggatggacaggatattggagcatggggtacgtagagtaagggaggggtccatgaggacgagcgcagcgttatcggccgtagattaggcctcttcgtttcctccttctcttttcactttcatgttgtcgtttcctctttcttctcttgtatgtcctcggtttcttgtggaaaagtttggaactagaaactccatcttcactctccgcttgtatgcatctcatccatatttcctcttcccggtttttcatttttcattatacctttgtagaacgcttctatatatcacaataatttcctctttcactcttctttttcctcctttttcattcttcctaattgctcttgtacttgttgtcttcgccattcctttttaattttttttcccttctgtgcaaatgaacggacatttgtcgtaacgttatgttcatccaaaacagaaacacacatatacactcacgtacgtacacaagcacgtgttatctgccttcccaaggaaaagtacagggccgatggctatacaacgcttgactgatcattcctctttaatgagaacgttaaaatagaatgagatagactagagagtaagattttgaatcatatgcgagtctctgacatgctagggggtcattcttcttcgttaccgatatcgtagttcgagtaaatcgttgctgagaaagccattagagacggtagttccgcgatggtctgatagcaaacagtgggaatgcgtcagacgtttgtcttgagaactggtggaagaaggaaagatagacaacaaaggaaagagacgcacatcgacaacgatgtttccgaccgccacatccagagccttccttccccattttgcgacccctcccagaacctctgctagccttttccctctggattctctctcttccaaatcgaccaatcttctgtttacactcagccccagtccaccttctgcttcgagtccgctgacgagcgcttcgaacgatacggctagacattcatctagaacttttccgaaattactagatctgagcacttgagacgtctcgacgagcagtgcccggagtggggacgctgggtctatttgaggaacagggaaagagggggaaggagagagagatgatgtcgaaagaagatgggcttcttgggtaggtgtttgaggaagaaggtgcggcacgaagctggaagacgaatcggccgggcaatgagaaaatagcacggttagacttttcttccttgctttcttcgggaaatagaacatgatgagataacatgaaggaaaactagacaaacgaatgaggacgaggaattccatctccgcctagatcccattcgaccttccgacggacttcagagaggagaatttctacgtctgttcgatcaatcatcttcttgagacttattctgcattgtcaaaggttaagaaaagaaagatctcgtcaatattctgagcatgatttcaacggcaaggtcgctgagaaagagggatagaagcgagaatatgacgaacggggtaaacacttcttcgaccgctaatttcactctctgtccaacctccttccatcctacgtgaactaaccaccacccaaagctcaagtaaaccaactcatcatcctcactaatctcaatttcttggtcaaccttctgctcatgtatgtcaggcgctccaataaacagattccaccaggaagattctggggtatgcgacgcatcggaaggaccagaatctggttctcgaacagagcgaagataagcgtgtcggccaaggatgttgagttgaactcgggtttgcagagataaaaggacaagggtatagattgtggtgatcgttcgggtgaatgctgaatgaagacgccattcgcgccaagggttggagcagagtgaaggaaggaacagcaagttatgaattcagttagcttttcccaagagatcgtgataatgttcatcccgaaacacttactcagcaacttgagctcgttccagatctgagtctttgtctttgaaggtactggaggttctggttccggaggtggggacgctggcgcacttggtggtagaggaggatacgagctccctacatgtggcgagccagatccatgagacgaagccaatgttgaatcagaaattacagactcagagacatcggtcgagaaagacgacacagacgcgtccatctatcagagtttggtagttagcggagcgcagtgtgaatgtgtcttctgaggacatttaaaagaaggaaagatgggtagaagacgaactgcatgcatagaacctgcttgagaagcagctttgaactcgcttgcccagctctcgcccattagccctgaggccacttgtctgtcttccgatcgactctcggacgacccttcatcctttgtctttgagcttgcttcctctcctccttcgattgatttagcttcctctgaggaagctacagaactagccgaaagtgagacaaccgagtctcccatatcaccaagttgaacttgaattctttctttctgtttagatgctttgatcgacttgggcgaggaggtagaagtgtgggtagaggtcggagagggtttggtgagctgggcgagctgtctatgaagatcttcaacctccatcgcttcgaggatctgaggtgacagagtaggaagtagggcggccagggtgaaagtggcatcttcttggttttgcagaaacctccgcttgagactggtgcgtgtatgtagatatctatgagtaactgtactgatggacgaatacgaatccatttggaaaacctacttctccttcgcccgacgctcgtccaatgctctctcctgaatctctcgaagtctatcgagagcataagcaccggcaagatatacccctcctatgacacctgccgagacggcgatcgcctttgagtgtctacgtgctctctgtttgattgaagtgagcatgcctatgatgtgatcgatggttgatggttgatagttgcaagccaagggcagggtagccggaatagccggggaggaggttcatgcgattggttacgatcacgtgaccatacatgatatcacacggacctccgcggatgttgctgtgtaaccatcccggatgagtgactatcattagttcataccaaagaaaaagtatcagaacagaaagaccaaagaagacgaagagagaacagcaaagaaacctctcacacaccacacacatatacactcccattcatatccgtacactccttgggcatctgaatcgacactatccatgtcctcctcaaagccagcacccgttttattcggtccgtcgctcgatcacgcgatcgcaggtctcacagcaggcacaatcacaacgatgattatgcatcctctcgacctggtcaaagttagatttcagattgccgatgctcccagtcgttctagtggggtcaagagagctggctttggaaaagaggtctggtccgctttgagagatgctgtgtcaaaagacggctggaaagggctttacagagggttaagtccgaatgtagcaggaaatgcaagcagttggggattgtacttcctctggttcgtccttttcatgatcggtcttgagtacggatgtgagtaaaagtttatggagtctgaacagaactaatcataagtttatgatttgatcctccaacaggtacacctcgataaagagccggaaacaggatggagatcataccgttcgactctcacccacttcacaccttctggcagctgccgaagctagtcagtcctcctttttgagcttccttttattctacctcttttggctgtgttctgtttctcatcctctcttactaaccgcgcatatcttgccgtgtttatcattgcccaacgacaaccctctcctaatgtaacaaccttcaggcgccatcacagcaatgatgacaaacccactttgggttgtcaaaacccgaatgttttcgtcttcgaaatcggatccaaaatcttatcacgggttatggggttcgtactatgttatctttcttttcgtatctcttctctttcacttgctcacctttattttaccttttttaaattaaaaaaactcctccgctgcaccccgccacctctgcgctacatccgtttgaacgaccacagatggtctcaagtcagtttaccgtacagaaggcatccgagggctctacaaaggatccctcttagctctcgttggcgtcacaaatgggtccattcagtttgccgcttatgaagagatcaaacggagacggactgatctaaaacgacggagactagaatcccatggtggtgtctggaagcaagagaacgaaatgctggtgtgtctgttttcaagaaaaactcgatcaaccccttgaaacgaactgacaaacaatggaattcgttgttcttccgtcactcttgaccttttgcagtccaacactgaatatattcttgcttccggggtctcgaaattcgtagctattgcgctcacgtatccctatcaggtcgtccgagctcggattcaggtacgtctataagcatctgtgtttcattgcttttttttttcaacattcatgtctgtccgattcatgtccattctaaccgatgatttctgtcaattcattagtcgtctaatccaacattatacccaaatattccgacgacgatccgcctgacgtacgcaagttctggtcttcgtgggttctataacggcttaggaacgaacgcgatcaggattctgccagggacgtgtgcattctttgtggcttatgagaatttgagctggctctttagaagggaagctctgaagcgagccgggcctgatgatcgagcattggcttagatcagaggcctgatctttcttctggtgttgttgttgttcttgtgtcgagttacatctgttactccttcttctatcaagttttgtctttatatgtatagaccactttgtccgcctgctgatctctttgtgtgcgttctcaacaacttgcattcatatatatttcttctatccctctatatctcacctccgtcttttttcttttcttttttctcctttctgggtcattcggtatcgttttgttatcttgttctcactgtctaatcactttgtgttctctcatgttatatatcgcccctccatcctatacattcccccgacattccttcttctctcgcgcctacgtctatccatactttctccattacccctctttctctctctttcctttttcttatctattcgggaaagaaagaagaatacggttgtaaaactcatctacctactcagagtcccttcttcttttcaaatcgggcggatattgcccttcagtcttcttcgtctagaatatctcttagatcactcacttttgggtttaatcttttcgttttttctcttttggaaatatagataaatctttctcgaacgtcgtcaatggtatgcatcaccatcatgatcgctatgtttttttttcctattaggcagaattgcggttgactcttcctttgctgttcaaggaaccttttgttttctgtgggaaagagagaagaaggagaaacgagattggatgtcaaagaattgatattcgagctgagtgttttgacttcagcttcggtatgatttgtctctagtgaaacaggaggaggagcaggggaaacagaggaagacgaaggagagtgtgcaaacgaggagagaaagagagagagagagagagagaggcaagttactgatgagaaggaaatttatgtgaagagaagattttttaaaaaaaatgcaaaggaggttggaatatgcagcggagaacgaacgaaggatgatggtatgaaataaaatgtataactaaaaggggtggcttcttacaaaaaaagatgaagggtatcgaatcaaccgaacgaaagaggaaagtagtcgaaaaggggaaaagaagagactgataaattctatatggctatgtacaaaggaataacgaaaggaaagatatgtacaaggagtgaaaagaatagctttctagaaccgaggtgaatgaaactcgagatgttgctgcccgtcaacaccatcgttgtcatccgattcccacccggctctcgaagagtcactgagaccagggtggcattcgttctcgctctcactttcactctcttctccactactactactcccatattcgctactccagacgcttcccaactcattctcatttcctcctgccttccgttccatgctttccttcctgagcgcctggagagcttccgtccgggcgagcgcctgtcgtttcagatgagcgtatcggccgggggatattgaggttgggatggaagaagccatggaaggtcgtctatctgtagtgggatcgaattgatcgttctcgttcgagtccgagcctgaacgagcgacggaggcagaggtcgaacatgaaggaccctcaatcgatgctcggttcggaggagagtatgtttctggggatgcaaagaattccttatccggcccctccgagaatgctgttgaacgagaagggtctggacgagacggtgaaagtgaagataagtcgaacgggaattctgttccggcggtcgtgttggctggagaggtgagtgagatattgaggagctggattgttgatgtgcacacagagagagagtacttcctttgagcggatgataacgccggtcggggaagcagatgaagtggaggcagcggattggagataggatcatatggcgcagaaggctgagcggcagaaagtgactggtgctggcgctgaggcggaggcgacggcatggctattgtaaaatagcacgcacacgcatgacaaacaagcttctcctgttagttttaacacgattgatgggactaaaaagaaaaagaagagactcactttctttactagaagcttcggcttcggtttccagtaccggccctaacggctcgccagatgcactgacatgatgatcgggttcagacccgacatgtgctgtctgaggaaggacaagacggagatcgcgagctgtggatgcaaagtagtctttgcctgatcgttcatccagctcagaagagattggttgcttggatggacgggacaagcgcgagattgtttccaggccgacgaaaggagaaacaagacctgtagaggaggctgtggatgattttctactctgaattgtaggtgacagaccgggtagagagcactcggatgatgaggaatcggagcaggacgagtagtagagtgaagagggataggacatggcgtaaagaatgggacgaatatgtgagagcgaggagaggaagtgagagttaagagtcaagaattaagaatcaagagtgagagggtctacagaaacttggtaaggaaagaaggtttgtcttgtctgtccgattgtaacgaagatcttggaagaacccacgcgatggctgccgaaaaaaacaagggtatgagatagagaggagaaacgaccgcggtttcatctcaaccgggtcgtctatcgtctttctgttatagaagagtatggtcgctcttcccgatgagctttctcttgctttcctttgctgcttgcttctccgcgtccagtcggctcgcactcatgagattcactctgtcggtcgtcgcgttctcttttgggttttctgttcggcacaccctctttttcctgtgcccggcacatacccctttcttttgaattggctgttggatccgattcctaccttctcactctcagctggaggcttaggtttccttcattcatttgtttcttccttcttggcttcctttccctcttcagtctatcccttgtgagcttgaacgtacacgatggaagtctcatgtcacatcaacactctcagagcgtagtgggtttgacaagatagtcgagagataatcaaatatggctctgctggcccgacatgtaacgaaaacgaggcggcggcgaaggcggctgtcggagtaaccttctttggtccggtccggctgatgaatttgaaccggcataggttcggcgcgcagcacatattgctgcggaagatgctgatcggttcgctgatctggttactgccaagttacgttaccatcggccgaaaagggatcttcaaaacacgagtggaccctgtctcggacatgtctgcccgcgtttattgtctcattggttacattttgtatgtaatctcttgtaattttgtttattcttcttatttctatcgtttttagcattgttgcgtctttacttcaggttagggttaaacaaggagttgagacgcctgagcgatagatgaattttattagagtaaacaacgatgaaaccaaaagaaagaatgcaacacatttttcttgcggttcgttctttcgcagccaaaccggattctgtaaagggttgtctgatttgttgagaattgaagttcagcttcttttgagacatctttcagtgaatgttgtcaaaccctctttcttttccttttttgtttttttcttttcttttcttttgtgtcactttctcttcccaatgcgtcctttttgcattttattcaaattccaaagtatacaaactacctgaatcagtaaagaagcatttcttcttgtctttcctctcttttttggggggttacctttcgttccctgttgtacccttgtttttacggactcgtagttttcgagtctgtgccatgctatgctatgacataacatgatgttactgtttagaatgcgttttaaggacataaatttggacgatactaagagagggcaagaagggaaagaaacaaaggccggtgagaacatattgtcaacggcccaatgatctacaatatccatcgtctttccatcattgggggtgcacctatcggcaatcttgagcgtcacgggataatgtagaaaaacactttggaaaaaaagaaaaaaagaa

SEQ ID NO: 1746 - DNA, 1955 bp, Xanthophyllomyces dendrorhous
gaaaaaaagaaaaaaagaaaaaaagtgagagtacaagcagaagagaaacctaagaaaaaggtgcgaaagaacagaaacgataaaagagggtgggctgaacatatgatgcccgatgtaaactaaatcgacgattggatcggcgatatctatgagggttcggatcaacatatatgtccagacgatcacgatcaagagatgtatagaggaaagaaggggggaggaataggaaatggtgtgctgattgggtacaaggcgttcttcctcccggctattctaaacatattgatcccttcataaggcgttttccaaccggatagaatgcctactctatgaatttcttatcagacatggccagcctgctgtcggaagtaaaagcgaacccatatggttgtcaactatcttgatcatgtgcttcagcatcagttgtttcccgatagcagggtctctatagacattcctcttatgaccaggacagcagagagatacattgaaagaacccgcgcgggattcgttgtctgtgtgtgtgtgtcaatgtatgagtatgtacatgtgcggggagcaactagatgacgaacaccctcttttgtgtctgtctgtactttgacacgctacggtcaaatttgatgaatctcttgtggtctactccaatctgattggcactgaacatgccggaatgaacaagggaaacacctttgaggtcttctttctattcgcctgctaacctccgatcacgtgtctgatgaaggaaaaataattaggcatggctagtctccgcactgcttgaaataaatcccatacctaggatccggacaatcgacggtgtttgttgagggaacggaaccctaaaaagacgataatcgttcggacccggtcaaaaaattaagagacggttgggcccatcggatggagaaaagtccagacctttctttaagcccactcccctttttttcattctcttgagagttgtctactttgaccttcttctctccttctctccttccttctctcttctctattaccccgggattttttctcttttctttttgtttaatcaggtcaaccctcttttttgtttttttgtttttttgttgaatcaatgagtgcgcgtgtcggttttgattctgattgactaaacgacacaacgaccagatggctaaacgacagagaaaacctctttttattttttagggtcttccctccgagacttctcctttttcttatttctacccaaggacgatggaaagagcataaataagaaaggaatccatcagataaagccttgttctgttccgtcttgctcttctctctcagatctcacatccattcttttctcactgacttcctccccttcactgtccttcctccttcaatccttcattccttacaaaatgttcgctactattgctgctctctcccttcctcttcttgctctcgccgctcctgtggacgtcgagaagcgaggtggttcccgattcacctactagtgagtgtctcttctcttcgttctctactcgggtagcagaacaaatgctgactacagcaactccctcgcacttgctctctctcagcgatacctccgttggactcggagcctgtggaaactggaacgccaacagcgcttacaccgttgctttgaactctgccgactatgccgcctggggaggaggatacccctctgctgcctgtggccagcaaatctgggtctcttacggtggaaacactgtgtccgctacgatccaggacgagtgcccaacctgctcctccggcgagctcgacctttccgagggtctcttcggagctcttgcttccatggatctcggtgtcatctacggatcctggggctactcttcctccggagccgccgccgctaccaccaccaaggccgctgagcctaccaccacctggacccccgagcccactaccacctggacccccgagcccactaccacctggac

SEQ ID NO: 1747 - DNA, 44479 bp, Xanthophyllomyces dendrorhous
  misc_feature (35833)..(35842): n is a, c, g, or t
ttctactaccgagtccgctgccgccgctgccgctacctccgcttacggacaacagaagatcgtccgaccctggactggtgttaacgcctcggccacctgccctgacgctcgattggtcctctggaacgtgaccgatgtcacctacaactctacctggcataccgtcaactcttccctcctcgattccgtactttcttccaacgagaccaagcgattctgcctcaactcggccatctccaagtacaccggtgccgccaacttgaccgcccttgttgacgagttcaaggttgtggtctaaatcaatagtcctagtggcttccttcttcttttacctctatttgatatagacttctcccagtcttcaatattccctctttttaaaaatatatttaccctccctaaaaatgcccccggtcctccgtccgctttcttttactcctcgttgacgaatctacttcggcgctctaggtcgccttatccttacttcatttcgattttcttctcttcttttttgtgaacttgatgttcctcttgggctttttggggtttcttgcctttttctcatgtgtttgtagtgccggttgctgccttccttcttttgctctgcttttggtgccttgcttaaccttttacatacttttaaaaacacaaaaccggcctggaggctggacacatatgtgatcaatttgtttttcatcgaaacgtttcccagagtgaagagtaaaaagaaagaggatacatatcaactaaatatcccgcgactattgcactgatttttcgtgcctgaccgccatctctcgctttctcagcctctgtgtcccttccccaactactttcttttcgaaagtcaatctcctccatctcctccacatacatatcgtgcaaaccacaagcaaaccggaaactcagtcgttctcatctcttatgccggcgagtttatcagaggaattattcacgcaacagtttgtcgacgaatcgtaagcctttgatctcttactctcttcttccttcgtctcgcgttctagagattgtctagcacgcttgagctcaaccaaacttcaccttgtacttttcggatgaattctgtttaactctccttctggtctggcttgttcctccaacatgtggattttttccctcatttgaacctatctccacgcaacctaaaaagacatatacgagcgtttgcgaaagcattatcggcaccagacctagccacagaatcatcttcggtcttgacagacaaagaaccgggcgaggacccggccagatctggaaatgatctcttggatctcgacctggccgctaaaagtgggggtggcatgttaaatgggaacggagcaaacggacatgaaggagtagaaaagttaaagtcggtcagtgattttgcaccaataaacactaggattcgaaagtacgtcacctttctccttctttccgtgcatatatggctggattcgatcattgatctacatagtgtcgtctcttctcttgatacagacgaagtaagaagaagacgagtggcgcaaaggccggattttcataccgcgtgtgtcttctctctcgtcttatcttgtcttgttctcctttcggtctaacactagacattgagtcgaaccccgacaggtcgctaggtatccccttttggttggtccatcaatcttctggcacatcggctgtatatcgacagagtcgtccacacgctaactccattttcctgacctgaataccttatagtttctcatcctcgggatgatcttcttcgagtttggcttctacgttgccacaaggcagatcgtaaacgttttcgagtttttcatcgggttgttcgggcaaaagtatgtgtatcttccctcatatccgatttttttccaggaatttccccttctctccagagatgtcttgtcttgagggtttcatttgcggttttatattgacgaaagtctgctcactcatttccgtcggatcgacaaagacgaaatttacggcataagttacggtatgccaagacattcgaagagtggaaggaagccgcgctcgagatggacgagtttctcggttttaatgcttggaaaatggtctgtggatatttcctgctagtcagtaagatgcatgcgccagtgctgacacttccttgtttctccttctcttttctacgctctcgggtgtcttgttctaggaagacgaagatgctcagtacgattggtcgctgtgcgtatctcgtgctcctgagacttctcgatgcttgactcgggagaaatccttctcatcctttcttcccctcacctctccccaccgagaacagtgtgcgcaaagtcaaaagatcgttagcgaccttgagagcacagaacgatgttcgtgggctagtcggtgtactagacgtttgtctccgaccgtcatttgctggtatagagcgtgtgagactctacagcgaagcgttctacggtacaaaacatatcattgaatgtgagtcgttccagtctcacaaccgatctaagaaagtatcttttgctagttatttacatccaagccttgtttggtatgtggcgcgcatagcatacatcgacgaagtcagtttagccctcaagttcgttagagagagtgaggaactaggggtggaggaaaagaaacggttcttcaaaagttgtaataaggtttgctccattcttcattcgtttcctgcattcctcatccgattcgtacggctgcccaatttgtttctagattgacgactgacatcgctccctcacagaattttggatcttcggctttatgtttgagtggtggagcttcgtttgggtactaccatattggtgttgtccgaggtatgcttcgggttgtctcatctggttttgtgatttcctttgggaaaaaaggaaagattttcagtagagttaattcgtttgatcctcgtgttgttttcgttaaatccacggcttagcctttttggacgcggacttattaccgagagtgatcaccggaacctctgccggagcacttattgccgcgtaagccattctctctacagcggattcttgagaccatactcgaagattacaaaccacagcgcactaaaatggcggagccatctttgcctcttctttcctcttgtcgttaagcttggtcactacccggacagatgatgagttgaaagtactgctaacacctcaattggcagatcggatcactgcttgcgaagattcgtaagttgtttgatgatatcatccctctcgtttgaaaaggattaatcaaagaatggttgtgctcgtcaggatccgagtgtggctcaagagattttggaagacgggtgctcgatttgatacagtcacctgggcagagaaagtatgtcttatggacatcaatctttttatgttgtcatgaaagccaagtctaaacggagtgtcaccttatccggtttgtacctaggcttcattcttcacccatggatccttgacatttagagaggcatatgaacggacgggtcgagtcctgaacgtctctgtgattcctcacgatagacattcgcctaccaagctcttaaatgtaagtgatttaaacgatcaatacgattgcctacccttgatgtttcctcatcatgtcttgatctttctaacagtacctaacgagtccggactgtgtgatctggtctgctatcagtaagtcgaagctgtatcctcgatctgttcatcgttcctacccaactagccagatattgatgttcatctgagtctgttatctcttcttctgtccgtagtcgcttccgcggccgtgcctgtatgtgtcttgggatctacatgccggatacctcgaagaagatgcaattcattaaatcttctcactttcttcactattatgaatttggacttctttctgtttgtagggaatcttgaatccggtcgtgctgatgaagaaggatatggagactgggaagatcatgccgtggaattggggtacccggtttaaagacggaagtcttaggtgcgtacagttctactttctctgtctgtgttgagtcagtatctccgtactgaccaatcgaggttacgtcctcctctttctgtgatttgtaaacagagttgatattccactgcaatcattgcatcttttatttaatgtcaaccactcgatcgtttctcaagtgggtggcacaattatacttgcatgtattcaatctatctcatctgatctcacggttctcgttcaaccactttcacaggtcaaccctcatgtccatttgtttttctttgcgccccaaggtaccgctggtcggccagtcgcacatcggaaaggaaaaggtcagtttccaccggtgactttacttttaggctcagacttatggatcggcttaaactctaatgctctctttctcttggtttggaggtaggctggagaggtggtttccttctgtctgccatggaacagtacctcaagctagaactcaacaaaaactttaaagttatccgggatctgtgcgtgcaaaggtttcctgtcgatttgtctcgaccacacagaaatcgacgaatatgtcctgatgatgtgttctcttgcttcacagtgaactcatgcctaccatgctcggtcaggattggagctctgtgttccttcaggtaagcttgtctcgcgcgtatatgcccaaatggggctgatctcgctgttaaccatgtggtttcttttgttcgttcttctgctgtagaaatttgagggatctatcaccatctggccaaaaacacgtgcctgggtgcgtttgacaaccagtctctatatctgaacacgtatctaagcaagaaaaataggaggaaactgaccgcgttggatttacactttcgcttctcacaggattggctcagacttctgttcgtgtcgtctgtctgaaaatactcagtcctgatttgatctcactgactgaaatattcgcgtcaatatatagcactgatccggatcggcaggagctagagcggatgatcaatgttggacaggcttgtgcttggccaaaggtaagttcttcttcttcctgtcctcaacgaaatcagatctgcgaactaaattatctatcttttttatccttccttgttctgaatacagttgcacatgatctcgaatcgagataaaatcgaacgtgagatccttcgcggccgtcaattcgtccgaacggttttagccaacccttctcgaagagatcggatatcagacgatggtgattccaaacatgcttctccttcccgacctgcccgtcgacaagattcgatcccagtcgactcggatgcagagtctggttacaatcgagcatccactcaaaactcaccttcaaggacgagatatcggtccgaggtctcacttgggcttggtagtagggaagacgggtcgagaattcatcggaaacggaatgcaacctctaatagtagccgctctgcatctcttggtcggctggaaaacccttcgtctgcaacagtagtagcacgagaagacatcatggaagactacgacgatgacgacgatcggtcagaatctgacgctcattcgactgatagagagagttccggatcagagaccaggttccctggatttcagaatatcagcaaacttggctcatcgttccgccggctgcgaacccagtcatttcctgcgatcccatggtcgagttcgcctctaaagtcgacggtggttcgaaatagaaagccatcaaggagcggaagtcgagctcgttctcgagggaccgaaagtccgttgatcaaaccaaatgattcgagttcgtcagaggatgaagacgagttgagagtagtagaggccgcgacatctagaggcgcttatagcggtgggctctcacgccgagctgttgaggaagaggcggcggaacacgaggaggctcaattggacgctgaattatgagcaagagaataacgacgatgtttaagacaaaagatccagagaaaacacaagcactgtatctttacgtcccttttttccttctcttcttttctttgtataacatccttgccgaaatatatatctacgataccatcagatctgaaatagatttcgatcatcaatgcattcatgagcaagaccagtgttctaaatacatacaacattgttagtcaaaccccagtacaagccaacagtctgaccctagaaggatgtgatttaagatttcaagatatagagttgatcttccgagcgcgtattcttcaagaaaggaaaatagaacggagaatgaggtcgaataagtttgggttacagacgcgcgcaagaacgcgtcataaggttgagtgacgcgtccgtttgatccgcctgccatcttctcggaggcagtcgagcaggcaacacccccagctcaattcgttcttgtccattctttctgggaagttttcgctgtttggaacccaagaacactttgtccataacaagcaatggatgaagcatcccagatacagcatttctcctctaagaggtcgtcccttccctcgttctcatcgagagagattccatcgtctccctctgtgtctgtccgtcgacaatcctttcagactcagccatcggaggctcctttagaaaagaagaaggacggccactctggtctaaagagaacttggtctatggattcagtcaagtccgactcagaagagtccactcatcctatcgggacgcccaaacgtgaaggcttccagatgtcgaacaatggtttgtgcttgtttcccagcttatcaacatatgtctctttatactgtgcatcctcatgcccaagaccaaagttgacggttgtctcatttgtaccatgcttgatcaacatcttgctctcagcccatccataccagatcgtcagttcttcctctgctgtcttgagcagaggcaatccaacacctacgaagaagagctgggttccgacccatagatcatccaagtcagcccttcattttgactctcagagcagttttgttaatcttgttaaagtctgaatatatggtctgattctttatctggtttgaaaacagatcgctctcctctatgccttcagatccatcataccggcctcgaccgcttcccactccaccccatgctactctatctccttcatccactacgggtgtacaccctcagttgtctccttgcccatctgatcaggtagaaaaacgaggcgtccgaaatctcgctcgaaagtgggaggagagaggaagtaactcgagtgaagccagctcggtcgaacagagcgaaaccgaagaaactagagtgtcagatcactcgcagagcaacagagaacctcgatctttgaatgagcacatcgttcccccaaatcaacccaatcgaattttcgatctcaatgggagcccaacgtccgaaaacgaagcatatagtttactacctccttctcctccggtctcaatttccagctcatctgatttcggtagtcctccattggttcccacccctcccgctttaatcaactactctcaaccgagtaaatattcgacccttagtcgatcgaccaaccgaacgcgccccaaacgaccctctgagtctttcgtcgacagaccatgtgctgattcagatggtgattcagacgaagaggatagtcggtcaaggacgttcaggcgaaatgtgaccgctcgaccttcaaaaattctcgtcacatcgcatataaccggttcgatcgaatcaaagaaggatgaagcagattggatggtgcaacattcgaacgcgccgggaagagagaccgagtataggtatatcattcagagtttgacagctaggatagaggctctagaagtaaagctgtttgatctagagcgcaagtctatggtacctttaggaagccttgactctgagcttcctccattcagtgccgcaggacacgttgtatcgtcgatcccaggttcatctacaccatctcgagccgcatcttcaaccagagagcgatctgacgggaaacgaaatagatcagtattagctgggagcgttcctggatatctattcttggtctctattggagtcggcatcgtcacttgggaggtcctctggaggagattcgtaagggggagaggctgagattcatggaactgcagggcttttttctcatcatttagttcattttcaatctatacttccttctctctgtcttgttcgttagtcggcgctctatttctctgtatcttgtaaaaacacatcttcctcatccctttcatcttcttctgtttcacatcttttctgtagtcttcacgataccctcgacatttcatcacccttgcgtgtatacccatttctgttcagttgttatgtaccttacgtcctttccgttgcagtctctatccccggcgagtcatgtccatgtacttctaaagtacattttggttatgttctggcatgcaatttctacgcaacgagaccgctgcatacgtcctacccttgcatctagagtgcaagacaatgctcgaccttggctcccaagatgtactcacgactgttactatcggcgatatccggcccggtccggttcggctcggagatttttgaagtgtctaatggatctagctctagatctcattcgtccatcaccatcatcactgatctctcggtcgaatcgctgacgagctaatgacaaacgtacgagggtcacatctgaagcatgctgggctagctctcaggtgagaaaactgaccgatcctggtgcatcctcaatcgatgacactcaagatggagcggccagatgtgtctacatgcctaaccgtcgggatttgtattcatgcctgcaagctgaactaaacgccacaacgcttaccttgaaagacatgctatcataccagatcccgagattgccactctggtcatcgcctctttcattgtatatcaatgctcgtttgctccatctcctctcgggttcttaactaccactctcctccttctctgtgctcttctcaacctttccaatcttgttcttgttcctgcccttgccttcttcttcttctcctccctcttcctcttccttcttccaagctgcctggttattatcattgaccgcatacttacaaactgatttcttgccggatggcggacttgtctatagaacaagatctcgacctagggactgtaggcggggttatcaactcgctcttatcggccgttctgagctctgttgagtccactaggaaagctacctcctccgttagcgcttcttcagtagtcctcagagtgacctctacaatctcatcagctagcctgacaagaagtgctagctcagttgctaggtgagatatctaatttcatcgtcgagtggaagaatggaacccaagtcgaattatgacgctaaacagaatggaaatacacgcacactaattcatgttcgctcgtcaggccaacttcatcactaacatcttcatcactaagaccttcgccaagaacatcctcgtcaacggcaccttcgtcgagtctatctgtcttgaaatcatcatcgacgatgctttcactcgcaacttcatcatcgatcccctcttcatcttcatcatcgaccccctcctcatcttcagattcacccactccaactgccatcttcttgacttctagcccggcgtcatattcgagttcttctgtttctgcgctccaggaaggagtgatcagaccttctgctcgcttcaagaggtccagaatcttgatcatcgtgctttcggtcgtcgccggttgtatctttcttcttcttctgctgtttgtgatccttcgtcgtcgtcgacgatatcgtttccacgaccgtccggaggatgatttccaacccgactcagtcggtcggagagatctttcagagaaacctgaaagataccaaggctcaataacggatgaacctgtcgttcgacctcgtcggttttccagtatatccaaacgactttggcaagatcccccaaagagacctctgactcctagctggggacctctaccaacgtttccagattctgcctcgctgatgactgtgggttctcatgaacgacaacttactcctcgtttcgaaatcgtcagtcgagacggtctgctgggggataatggaagcggtcacggagcgagaccttggaatttacagagagggtatagtgacccgatgctcaacaggccgactggtcgagcaatagaaatcgcacctatcatcatccatagaccttcagaaggcgaaaccgaagcagaacaggaaattaatccggaagaagaagcggaggaggaggacaaagggaatgaagatgtagcgcagagagaagttggagaagaagaagggtttaatagaaagagcgtagagaagtcatccactggttcgacaagcagtagcgtgctaggatactactctcggtcgcttcgagcacctcatcagtccacttcagagttctgtgaaccttcatcatcgtcgcattctttcgacactggaactaaatcttcttctacttcacagccagttctggaccattaccaagcagaacccttgaacgatcaccccaaccaatggacaactcctgctacttctcttcttgctcctcctcctaagccgcccaagtctctttatcgactcacaccggctctcaaaactcagatgtctcttacgactgatagtcggcagaactcagggttcacgttggatgggtcaaaccctttcaccgattaatcggttcaacactttcatttccaaactctccttttagtcttaccacgtcctttctcatttattccagcattcatacacaaactcgctccgaggtaaacgtttcctttgtttccttcacacatacaagtcccttgctcttaccaccctacatacactcgaaaaagacattattctttccggattctttggggtctatttatcagctgtcgtattgataccctcatttcatctctacactctttcacctcgtttgttctcacacatccacacacgcgcgcgcgcacgagccctttggctttctcatttctctctttacttctcttgcttcacattgggtttattgtttctccttcatatcctgtcaaatggaggctctcccagcagtctgatgtgcgggtgtatttggatcctgacacaatcaatttgcttggtgacgaatacgataagtgtttctctgtgcataaatttgaacaaaagtcgaaaaaaaaagcgccgattttagagtagaaagaagatcaattacagttctaaaaagtataacaagacgatctggggttaaaaaaaaagcatagaaaaaaagaccaaaacaagagatagtgaaaaagaagaaaagaaaaggaagtgaccaaaagatgaagaagaaaaaagaagataagaaaaaaggaaagtaaaaaaggatcaagaagagaaactttgatcagggaagatagccgagtaatcaaacaccccttgttcaagcagttgtaagatctccgaggcagatctacacacatcaaaggaaagaaagataaagaagatcaggatcaccctgcaccacaaaatatataaaaaaagatggaaaagcacccacaaattatcctgagtgatccctcctccgatgagtgagtccatcccggcactaggtaaacctaggtcactcaaatccggacctgtcacaccttgcatcggagaatcaaaatcgtcgaaaatcatggatgcaaccggatcaccgaatgcgttgaatccattcacgttcgttcccgggccaagcaagcttccgtttgtttcttcattcgaaggggacggaggagacgcagcggctgtgagatcaaagaattcctcattattgtagagcattgattcatcgtctcgatctaaggggaggtttgaagacgatgatgctggtatcggtgcctgtgccatctgagttgaaggcggctgtggggaaggtgacacgttgttggttgtggaagcagaattgaaagtttcgtccatggggggagataagaaatcgacagtttcaaatatatcaggtgtaggtatatccatcgccgtcgttgtcgtcgtcgtcgtcgtcgtcgtcgtcattgtttgctgtaggttcgaagaaggcgctttgttggtatttgaaccaggagggacattgttggatatcgagcctggtgagagagaagtatttccgggcgtggatgatgatcgggaaggcgaagctgatcggtgtctcctaacagggcgaagccaggccggagaaggcttcgagggatcaggtacttgcggaaggtctataggaaccttgcaaattcgacagaattcctccaagatatcggctgatctcaagccacagagatacctcccagaaaatcgtcggagcaacccgacacacgacttgaatccttccagactagccgagctaatcgatctagattctggactcttgcagttcagaatgaccgctaataacgttcgaccagcctgagcaagctggtggactacatggaccccgtaatacgtcatgaacccgcgttgcgagatatgaagatggtccgccacgatcgctaaggcgcatgacatggctgttcgacaatactccaggttccgagtgtgttcttccggactttcacctgccgataagacgttcccgctgaaccgatgtcgatagatgactacgagaaagaacggacagagattttttttcaaagctcagtttgtcgcctcccggtagctagatgatcgttacagattagaaagaagatgatgatcaaataactcacgcatcttgatcaaattttccagacagtgaagtctctccgcctgagtgattcgaatagggtctttgctagcgatcgtctctgggttatatgcccaatatggttctaataaccctgaccattcattcagcagagcttcctcctcctctaaatcctcgctctttggttgccgtttcgcaatcagttgagccgctcgggagaggaacggagagccagagaaagtagatggtcgaacggatccgtcgagctaggggtgacattgtcaaatttaattgtatggttatcggtacatgaacagagcttgagagaagtggatgttgacaacaaaacgaccccccccctccccccaaaaacaaaaaaaaaagaaaaaaagaaaaagaaaaagaaatatgatactcacaacaccctccagaacgacgtgagctctgatggcagcgacgaaggcacatatccgactcttgctgttctccggctggtcccctagaccatcacttcggatgtactcgtcatctagaattacaggctcggtcacatcacagtcccgcaaactgagaaagaggtgttcaaggttaaatgttgaaatctttaatgttactcgacaatcaatgtaagagcgaaggaagagaaacaacgtactggatcatggcaggtcgaccgaaacatgcccctgattgtttatcccaacaatatatagaccagaacgttcgctacaaatatacgcggagaaaactcgtctttgttaggaaaattatccgtcgaataagcgaaggaacttatggacatgcctttcgaacttctctctcaattggattgaatatgtcgtagcctcctacgtctcgatggagtcctccatcgatagccatcgtgatactacagagtatagagatagcaccggcagtaagttaacatacgaaaatatctccatgcgaaagactgatagagacggacctttcagcaaacaacatgaaagcttttgataatgttcctaaacccatgcagtagatagcctgatgccatcaagacatccctccaaaacacgtcacgaatttgtaacacacttggcgagaaaagcagaacaaataaagcaagacttacggctaagaaattggcttgaatagaatataatgtcggtcggtccgcactgggcaaatcctgcatctttttgaaaagttcaaggtaggattgaccggcgctacctgggtcgtctgggttcgttctcactctcggatcatccacatctactcaaccgacgcgatatgcccagaaagaaaatcttctctcagcctagcctgaagaagaacagggaagggacaaggaaaagagagagaataggagacgtacgtcgcgacgatagggtacatacagccacgatgaatctggagaatccaggttccccccacctggatggattggcatagtcctaaaagttagaagaagagccgaaaatcagaactcttatatgttcattaagcccgtatggagctgcatccatgcgagatagagaagagaattcgacactgactgctaggaaacttggcacatgaaggaaaggccataagagatgagtcgtcgacaactgtcacatcaagaatgggaatcaagaaaaaaaggcgcgtaagtttggggtcccgcatcggcgcgacggtctataaaaagcctccaaactgacatagctcctgataagggtatccatcagagaaggctcaatgacggcggtgatgactttccaactggcttctgggtttaaccttctcgcctgtcttggtttccttccggggaaaaattcttcgcctgcaccaacgcccgtctcttccaaacctcccagacctccaattgcgcctacggactcggatcggttagatttactgctcgccgaattgacggtcggcggggaggattgatgttgcctgttcggtggtcgacctcgaaggatgaacgctgaaggatcttctgaatgagaggtcgtaaacgagtggtattccgctccgtgctcgatcgaccctgagggtgtcggtacggaggatgacagaaatggtccccccgatagaggggaggtgttgaaagtgttaggggaagatactgcttgtcggagagctttcggcttctcaccgctggaaggagggtgttcagtatcgactggcgtgccagaccaggccgttgtgcactctggtgaggcagaggaacaatgggaatgctgtcgttttgtatgatgtggatgaagttctgcttcagcaagtctttccagcagaggaaacccagatgtagcaccctgccattttctgtggatgtaataagggaaacaagaagaaagaaaacaagaagtgatcgttggtaagtattaagaattgcaagtaatagacgacagacagatatctcacgcacgtcatgccaacctcgtccaagtagataaatccaggactgaggtccatcgcgttcatctccttctccagtctgtccattccattctgagcagccttactggatcctatcaaactagtaatccctccgtccgaatcgcttttccccaccgacgcggtccatccattctggactttgcccacactcggtccacccgaaggaggcgtgaaggtgaaaccgtaagctccaggagagacaccttcaaagggcgtttggaggccaggccgcgacatgtttgtcgggccggctttacccagcaaggtggatgagggggtgacgaatagtttctgagcatttggtgaagtggccgcgtcgggagttttcatcgaaggattgataagcgaagcatcaagttgagaaagagctgcattgtgaatatgcggtgggacctctaaagaatgtttgaagtgcgaccgttaaatttcagttagcaaagtcaaactctcgagtgctcttggtttttttaaccatcatgattaggaagagagaaaaccctgtagactaacggcgaagctgctgctccagaaaggccatcctggcctccaggtctttcacgttctttcgaggcttgtcagacggactgtttccgatcataaacaggcgggtttaacacatagaagatcaatcaaacatcagtaacgaaatcaagacttcttgcgacctaacacgtaacgaagaagaaaaaactgataaattgctcacgttcttggctttgagcttcggcgtaaaggggtattgaaagtaccttttattcgaaagcaaaaagttggctgagtaagtatgtgcacatacagaagaaagaaacagccaggctactagtgagaagttaataagaacaattaaaaaaagacgggcttacaagcttgctttgcggctatacaaggtgagcaaggagagttggtatcgcactgtaggcccaaacagaacggcttatcggtcaacgccaagtcgtcgaaacaagtggtgcagcagacgtgacctaatcactcactttgatctttcgtcgtctaatccacagcgatggaattaaattaggaaggaaagggaaaaggaagagatacagaaagcaggaagataggaaaaaaaaaaagacgattagtcgctactcggatgagcccggagtgaagaaacgtgccgagagcgaaactcacttgcacctgtcacacgctctcgctggacatcgaaattgatacatctgtgagtatgagaagaaagtgcatactgatagatatgactgacctaatctgagacgtggtcgcttattgtcatcaccttcgtcgaatgacgactcgtggtcatcctcggtatcatgtatgagggcgatagattgcgactgtggttcctgtttaaccgatgctgatgacgcttgtactgacgctgaagggatcgaaggcgacaacgatgataacgatgatgatgacggtttcgacgcaagcgatgggatcaagttagatgctgtctgcatgtcgagcagagagaaggtggatggttcaacggagagagtatgcttgatgtcctgccaaaaacagacggaaagggagaaacagtaaaagagtcatcgcctaggggggaagaggtaaatgatagaatagatgattttttccacagttgactaagggagggtgtataagcaagtgtcggtgtgggcatatttggacacgacatggggtgtttggggaaatatggggtgaaatggagttaagtggggccccatatggggtttcatttggggtcacccatgatgatgacgcgctcaatcgccggtcagacaagccgaacactcacatcagcatacacactccctcactcactcacccataccttgttctctgttcaagatgtttttcaaccagatcagagcttcagcaaagcccataggtaagttgaacctcagcttggctctcaattctcgtttgagtatgctgacatcatctcatttagcctctctctctggctttgctctgttttcacgcgcttcgtccacaaagccgggaaccggcaggtttctcatcaggcagccctctccgctcgcctctagagaagtacccactcctcttgtatttctgagcgccactacatgggataagactgctcccacagccgacggagctggcgggtggactgattggtccgcaatgtacgcctccagaggttacacctgtgagtatctgtaccgtcgttgacttttgatgcaagtactgattcaaagccaaatactttcgtccaaccgaactcaaggcatcgagattgatctcaatcctcccgatgtcctaccaggaacatcagaagaacttatggagcactttacatccggtcagtttaccaaatccggtcggctatcgtacgcagatgagttcactgactgcatctctaccctcaatatcgtcttctccccccaaacagagctcaaccagcaaatccggctcgctgccaatccattcccaccagttctgttcgcccgagcgttctcctctctcattgcccaaaactatatctcatcccatccagtgtctgctatgttcctcctcgcacctccgacgccttctgtctcagacacaacttcccctgccgcatatgaacctcgagaaggcatccttcccaccgccctacctgagttcaactacgaggccaggttcccaatcggagtcatgtaccctgcggctggaatccctatgtccgactttgaagaagaacatcggctcgctcaagatcaaggaggatgggttgagcatcttcggtttagaggaaacattgatggatcggatagtgaaagcggcagattggaggttgaaaagtggatggacagagtgggaatctaaatcttgtgatgtacgttcctaggacgcttctaaaagagcatattgtccagttcttctatgtgcttcacatgtgaaagatacaatcgaggcacagaaatgtgatgtctcccctaggcaaacgttaggatctgttgttgttatcatcgtcaccgtcgtcattcaccaggtccatacgctaaccctggccctcaacttgttcaatctgactcagtctctgccctgttcgttgtttggaccctgactatgtcttgatttgtataagaaggcagagaattctttcctcattcctcccttttctttctcttcatcctcctttacctccatcctacctgtttatatcacagtcctaccgtacctcttctacactttttttttccacgtcaaactcatcaacccatccctttccatcaaaccaaacatgctttccttctctgccgttaccatgggattcgccatcctcacctctgtttctgctgttcctactcctgtgagatcttgtactaatgataacgactgtgttcccgcagacttacatcgatctctcccctcattttttctctttcagatgactgaagctacggtcggagctatggttgctgctgatggtcaaggtgtcggagcaaagaccgatgtttcagccaacatcctcgatggactgatctccaccgacacccacggtgcccttggagtatgttcctctctgggctatttgtttccgtgtttgtcttcatctcttctatcattaactgaccatactgacttcaacagctctttggaagcaaggttgctactagatctcttgtaagtcctctagtctgtactcactgcttcatcagcggcttctctcgctcatcacgagacacttttcggttgatcattccttctctttgcagctcgatttgtccgatagcacctccttgggtttgggacatattctggactcttcgactggggtcgctgtttcagctggtgacgatctcgatgccaacgttcgtatcaacacttttttcatccagctagattgaagcacaaagatacaaattattaagtagatgggttttcctgttgtgaaggtttcggtcggcgagcacctcagtctccgagatgtcgacgccaatatcggcgccgatgtcgatttagacgccgaacctgaattcgaagcctctatcgactccctgcttggtgccgacattgatgctgagactggcgtacacgctgagactggtgtacacgctgatattggcgctaaggtcgatgctcatgcctttgctggccgaaacatcgacgttggcgtcgacgtagacgctgaacatgacttagaagcttccgtcgactccctgcttggtgccgacattgatgctgagactggcgtacacgctggtgttggtgtgaagactggtgttcatgtcgatgctcgatcgcatgtacgtctgttttccgctcttcttttggttacttcttctctgattgaaagactcacttgtgatgttataggccaacgaggaagatgaaaatgatgaccacaaggatactgaagcctccggtgtccaaaagtccaaggctgccgaaaagtcccctgcggatatcactgaaggagtgatcgccaagctgaccaacggcaaagtgagtacttgagttccaataccctttcttctcgagtcgatctagtttagagtacgattgacgatccgatttgttttttcaacagggtggatcttctagcctaggctctgggttgctaagtgcttgagctctcaagaaagccggccattaggtaaatatatgacctccatatactcctcggtaaactcgtcatgctgtgtcttgctaatattcttgcaatgatttcaacagactgctctcttttttttctgggttgttcacggtgttccgtttcctttctggttttatgtcgatgttttatttgtgaatccatgatccccgcaagatatgacattcaatgatgccaagtgattttgaaatctatcggtcaacctaagtagatcttcggtcgctttcattctggctgacttggttggtcctgtgatgatgatgcagatgacaatgaaagaggaaccaagcgccacccgttcgtcttgtgctctattaatcgactgtgagctctaagagagtcaattgaatggatggagtttcagaccgacctcaagtgtacttctatcctcgctctgaaactgtatcagctcatcaactcacgtacagtcttgttcatgatgtatctataggacgatccaccaatacgatgtctttctatctatctttgtatggccgtcgggcctcacgatgagaaaattaattccacacgtcggcttggatcaaacttgtgcttctttcgttcctatcgttcatcgagtgctgaaacatgagcagtcagattgatcatcaattttctgtctctctccttttcgcgcacacagaatcaagagagcgaaaaaggcgaggtgacggaagtgtctagcaatcaatctctatccaagatcccattctttccgtcaacgatgcccatcgccgaggccacacagccctccaacaaggggatccctttgaatgcataggcgccggtgaaccagacgccggcgaacccttggaaggaaagagggtgagacggcctaaaccgggagacgattgcagccgattctcgagttgggagtgctctgttttttttgtgattgcagtgggaaagtggaatccattcactcaaggcaggattagctcaaacaattatgatactgaagcgtagccttatggtggagattgaagtaaaagaagaaagggcggtactgacctttctaactgcgagaccgaaagaaccatctcctttggaatcggaacgatcgggtttgtcgtctgaaataccgggctttcatctttgacaggcgactgaacgacgtgtgtcgccattgtgtagatctttccatctgctggatcaaagaatggtacgtctgtgttacttttccagtctttgccgtctcggccagcacttggggacgaaggcgagtatgaatcagggtgaaagtcgggagatggccggacgagattgatatctttaatatcggccgggtgggcgggaagaacgatgggtgatcgatggttgacgacaatcgcaggctacgtgaggtgaacactcggatcagatcagtacacgcactcgatagaatcaacaaaggcgagagaagaaaaaggaaaaaaaaaagattttttcctcacaacatatttgaattcgcccaacgattgctctacctctcgcaacatctcgatttctcccttcttatcggtctctctgtctgcttcggtcaactcgtctaggaagcccttgagcagaactttcgcttggttggcctgagtcgcaaatacgacatcagtaaaatcttccagaacacgctccgaacccgagtcggttgaatctttgaccacgagcgtcgtagaattttgagaaaacgaccgatgaagaccggtgatggtggtattaagatggatgtgcgatcgaggaagggcggagaggagagcttgagagatggagctcgagttggaaggaacggtataatgagaagtgaagagggtgagatatatgtaatctgagttgaaagttcgtcacgaagcaacgaggtttaacttggttatcatagaagtacggtagcactcaaaaagtttgatcgtctctcaccgaagatcaatccgacgtccattcgttctatctctgcatccgagcaagtcgcaacagctccaaacaagctgaagactatctccttgatgaacccctcccaggcactcccaatcaggctaccccacgtgtgcttccctgttctgcgcatccaatcaccaacctctcctccacccatcccagtccaggagtaccaaatggtcaatatgaggagatacacgtatcccaaggcgtaacctagaagcctgagaagcgcgcgtgtaaagctgaaaggggaggacgtggttggaagggcaggtatggacagcccggaagctccagagtgaatgaagtgtgttgttaacgggatgtggtgtgagaaggaataactgaaggatgttggtgatatagaaattccaagtgagcggtacatagcaatcagccgagggtaataaccttgttccgagagatagtcattcattgttcacattggcatcagcatcatcgaaagaagaggagtaagttaaatacaaaagccgagacctacctccttggaaagagcgcatggggacatctacggcccacgtctgctttcctccaggttttggtgatgataatggcacatcaagggaattcgagaagaatcctattgagggagcctaagaatggggtcgaagtgacgacagatcagcttgcgctcctgtttgtcgaacaagcgattctctcttcatctattgttctttcttctgaagagggagaaaaacagatcgacacagacggtcaatcatggtcagacaagcggatgaagacgaaccttttcaaacagatggacttcgactatcctcccttgcttcctttcttcttcaagctttcgcatcaacaaccagacggtcgtcaatcctgccaagcccgagccaacaacggcaaccttaatggcccgctttctggaagagtatcttgcatccgcatctgaaggatcccgagacgacttcatactggattagagaacagattgggagtcgaactgatatctacaagcgaacgaatacgctctcgtgagttcttctgtgagtgatatcaacgggcagacgggcaaacgggttgttagtatttgaattatttgaatatacttgagtatacttaattaacaccccccgttaccctccctcttccttccctgctccttctacactcgccacaaacgttccttcgatcaacaccttcaactctcgttcgctcgacaggctctccgttctctttccatctcccatctcttgctctttctgtccaggaccaatctgggtgtcctgcttcagcgcacgcaaagaatctttcgtcaagtgggtctcagagaaagctgcttctagccatctcagcgtcatcgaccaatcatctttcgctcaagtcttgcctctgtttctatagattccaccggtagacataatattgatctccacttttcaaataggcacacatcgaccttctcgccggtctctttgccagaaaacagtacaagcagaaaaagagtcttcttctctctttcagcttgaaccgttttcaaccttcctacaactttcatgggttgtcccctccataatgcgttcctcttacttgcaaagaaggaatttaaacggcttctcgaacgaacctctccgaatggaggtcccaatgggagtaactcgtcctttaaccctaatggtaatctcggaggttcatcgtcctcaaccctaaattggaccggtccctcctccggtcctaaaagctggcagccagcctcagtcatccacggcgctctctcgagctcgtccggtcgagttgacatcaactctcgagatcgatacgggcggacgatccttcatctcgttgcgtcctcaccacaagagtcaacagcagtcgattatctcaaacttttacttgatctcagtccaaagaatgggctgaatgtcaatctacaggatattgaatctggttggacggcgcttcatcgagcattgtatgctggaaacctcgaagtcgctaggattctattgttagatgaccggatcgatcccaaggttaaggatggagaaggcttgacatgctacgatctctacaacagtactgtagaaggggtgagcattttgtctctctccgccgattccttctctgtcgcgtcgtgcgtgatcgggatcagactgctgatgctgttttcttctttggtcgcgcatcgtatttagacaaacccggcggaatcaacctctacgaagcagattcttttcacttggggcactaacagaaactgtgtcctcggatccggggacggaggtgaccgcattttgcccgaaaaggttcaccttgtacgcgcagagaagaagattcatccaaaagccgcgcagtttacgaatcaagaggaaaccgagagcgatagtaatacagatgaggaagatgagtctagtgaagaagacacaaaagaggagaccattgagattaaatccgatattcgaaggtttgatccggtgggcgtgaaggacgtcgtgatggccaagcttcacacaggtgtgtctgttttcttcgctttgggctgtactgtctcaaagtgctcaatctgacaaaaaaacatctattctcaaactctacaacagctgttatcacaacggaatcatcaagcaatctcaacctctgcggattcggatctggtggaaggttaggccgttctatacacacccagtacgacatggctccgataccttctttccctcaacagatcgtgtcgattgctctcggacaagatcatactctcgcgcttaatgcccatggacatatatactcctggggactcaataagttcagtgttcttggatacccggtagaggctcctgctctaggatcgaaattccagaccgcgccagaggaagcaatccagacgacgcctagaaggattgttggtggtttcaaaaaagaaaaggtgttgggcgtggtagccagtcgatgttcgagtgcatgttggacggaagactctgtgtggacatgttagtcctgattgctctttctcagaattgtttcttttctcaactagtcgtctgatctgtttggtgaatacaatttgtgtcttcgttcttagggggatacaacaacggtcacctgggatacgacagtggcccaaattctgctcagatatatccccgaaaagtggccggtgcccatcagactgtgatcggtcttgcaatcaccgattacgcgcttgcctgtctcctctccactcatgaagtccttgtcttttatcacggaacatctttcaagattcaatttcccaatcaccggcggtttgcagagtcagcgacttatcgaccaccaggatcccagaagaaactgcaggtggttaagatcacgagctgtggaatcacatttgcgtgtttgacctcgctgggggatgtgtacacgtttagtttaccgaaccccttggtggctgagcgggaggctgtggcggtaggaagtacagcacagaaaatggtgaagccacagagggcatgggctcttcgaaaacgatttacggtgagttcgatccttctttgttcccccgatttgtgatttgtccatccacgtatgtccgcttctgctcaccgccttttcatgttctttctttccaaacttaggctgttcgggatgtggccctagggtctgacggaatgatcattgtgtgcacccagtctgggcatgtgtttgtccgaactcggaacaataaaggcaacgtttccagcaatcccaccggatttgcttctggctccaaaacgtataaatttcagcgaatcccttatctccaacgagtcatcaaagttgccgccaacgaatctggcgccttcgccgccgttcgtgtagatgcatcccctaaacctgtcgatatcactggaaactcggtgggagaggacctgatgcttctgatccctcatgttcgtcgatggcaggagagcagacagaaggagacattcctgcctaaggcagaggaacatacaatttcaagagacgacctagatggggacttggaaccatatgtgattcaatcagacatcaaggtagcatgtcggttgactgaaatatgcgaagagtggcagccagcttcggcatatcctccgttgatcggcattgcaggaagcgattgtgtactccgtacggccggaagggatacccctgttcatcgaacgatcatagcagcaaggagtccggtcatccggcgactgctttccgagcttgtcgctgtcaaaaagacgccgtctggaggaaacaggggcgtttgggcggaagtaatagaggacggaagaacccggattcatcttcccaaagtggatcattactcaattcttttgttggttcagtacttgtacaccgatgatttcccagctgtgtgggatccccgggtcggtgcttcattaaagcccttcacttggtttttgggtaagaacactctcctagggaatatccgagtggaaatgcaatctatagccgatttactcggactggtttctctttcggcctctctctcgcgattgaccaaaaacactcctgcgccaaccttggcatctgatatggcgcgattgttttcaacctcatattcctgttcggaaaccatatcttctctatcgccgttccttcgacccaacgtgatcgtgcagttggctgacaagactgtcgcatgtcaagaggccgttcttcgatcgcgatcgcctttcttcgcaggtttattcgaagatccttgttggacacttcttcgtcgagatgaagctggcgtcgtcaaagtagatctcacatacatgaagtggagtgttgtccgtcttgtgttccgatacctttacgaaggaggtggagccgaactattcgactatcagcatcaagacaacgttgacagtttccttgactttgtgttcgatgtcttggaagtggctaccgagttgatgctcgatcggcttgttctcgtctgctcgtctgtcgtgcttcgacacatcacgatacataacgcatgtggtttactcgccgacgcctcattcttccacgccaacgcgctcagggaatccatcgagctgtatatttctcaaaatatggagaccatgttagagagtcatctattggataacatgccatcggatatccttgccaatctttcgagttatgtccatcggcgacaaggtctacggctacctatctcgcgctccggcgtgcttctcacagcagctatggagcgacaggccgaatggctggctcttcaggatgtgcctaaaccgtatctacgacctgccaagtcggctctggccatccaccgatcacccggtctgtctcccatcgaggttacatcaaccctgccgccgcccccaaggagatcctcatctaccaccattatcggcggtacccctgtccaatctagtccagcattcaaatctcagctgagatcggcggctgaaggtgatgatgatatgttccagatggatgaggaccaggacgtttcgagcattagtcatctagtgtctaacgcgtctattgaaggcgcggaagagtcggctggatcatcagtaaagcgagggtggacatctcagaacgacaatagcaagtaagtctttgcctaaacagacagaatgttgatgagcattcagagctaagacctaccttgctttccttctcttactaagattgaatatgagaagtattatagctgcagaatcagctgccgcttcacgacctagacctccacccaccccagtccgaccgccaatcactcctgaatctcaaaacacgtctttcagactctcccaaaaagacaggaagaagcttcaagctactcctactgcaccagtttccacaccagctccgacctctttgaccagtggcggatcatcctccccgtggcgtatgactactccacggacgaactcaatctctatctcacctgcgtctatcggtctcactatggcttctacatctgcctcacgtccagccatgtcgatttataggaaagactctgccccggcagggtctacttcggttttccctaggcttgcctcagggtcttcctctccaaagccttccaccatcggcggtggaggtggtggaatcactccgtcggtgactccttcatcaacaatctcatttccaaaactggggtcaaacgcttcaggaacagtcattgtaccgactcgtgcaccagccacatccaattcttctttcatcactcgaaaggtttcctcgttcgttcattcccctcctttacctttcatctttgtcttctgctggtttcatcacgaccatgggactgactaactcactgtccttctcctttggttcatcaatgacagtgacccggcatggactgtaccttcatttggaactcctattccagagcctagtgcgcctgctacatcgtcgttcgcgcacatacagttccaacaacaagaagttcgagaaagccgaccggcgccgaccaagacgctgcttgagatccaacaagaagaagccgcttcggtgaaggcgaaacaggaggaagaagatttcctgaaatggtgggaggctaacgcggccgctgtggccgcaggagaaggttctgccgaacctggagaaggcaaacggacaggagggaaacgagcaggaaaggcaaaaccggccaaaggaggaggaagaaagtcagccggcgaaccaaacgagggacaaaagacaacgaaggaggctgtcgagaccggcaaagctagcggtagtggtggtggggcacggaagaaagggccacccaaacctccctccaagggaccttctcaggatcagcctttcagcgcaccacgaacaaatccagcatcgccagcacgccccaaaaatctacccggtcattacaacgccagtagcagcaatgatatcaacaacaacaataaaaacaacaacaagaatcatacctctgttaacgataaacatgcatcccaccaagcgcaaacagacaaaccatctggacctccgaatcaatcaaaagcttcgatctcctcgccaggcgtgccgttgaaaagagtacagagcaactcgaatcagccgggcaggtctcaactagcatcgtccttccctcctcctcctttcgttcctagtgggttcactcttccgccgacgtcaacaacaacattatcagctagctcagctgctttcgaaccttcgtttttgagaaaaacatgaatagtctagacttttccttatttgacgggggtttcacagtaatgctcttttgctcttttttgttatcttccatctaccatcgttctgggtttgtccctttttttctgtcccaatcgttctatcctagagagaaatcgcgcggaaggaggatatgtattacaatgtattaccaacccccaaggatgatctttctgatctcacgtgattggtgagaaagcaaaaggagaacggagaagcaaatgaaaaaagaaagcatttgaatcaatcccatcctctatctttgcgttcgaccagagctctaggcagtaccctacccgcactccccctccccgcgccatgacctctctctctgcccaatacaaacaacgcgtctctcatcgtgaccggcccaccattcctcctccaatcctcatccgttccgtaggacaaggctccaccgttcgcacccgaattcagaggcctcctaccgagacctactccgccaaacgtaggtctaccaatcgagcctgaaccaggtcggttcgcgtcgtgaacgtttgggccgagtggggtggatgtgacggctgagaggaaaggtttggaccagccaccacctgtggcagtgctggaggtgttgttattgtttgtggaagttgaaggattggcattcgtcccaatcaaagatgttgatgactgagcggatggaaccaggatagatgaggctgtaggtgtagatgaagacaaggatgatggtcccgaggctgttggcgtgctaggcgccagaccggatttgccaatgggaccttttaatgttcgctgagcgggtgtaggtgtgatgattcctaagctggcaccagctccaccgcccaacatccatgatttcctggcgattccagctgaatgaagagcaacagagtttgatactctcttctgagtttgttccgacatcgtcttggctgttactccaggccctgccgctcttttcgatctctttgctggtttctctccagcgttcgatggagtcgatggatgatcggatgaagcaggtgcgtctgactttggacgcttctttttgttgctctttgtttttgtttttgaagcttcatctccgttggtaggtacatgttcggatcccccatcattgatggtgtgatcggagcctgtaccatctttcccaccagtcacagaggattgacgatcaccctcggcatccccagaaaggtcgtgctctggttcctgcccaggcaacggatcatcttccttcagccctagagcctccctcatcagccgttcgtcctcctttctcttttcttcggccttttcctcttcgtcccttgcaaaccgttccctacgcctccgactttcctcgtctctctcggttcggtcaagagcggtgatgactcgacctggatcggaagtaacgacctgcgtccaccggggggtttgagtgctatcaggatatgtggcgggtggtcgactggcatgcgccgtcgtccgatgatctttggccgagatcatggaagaaagcagatctctgacgcgagtctcgatcgacagagccagataggtcaacgcgtcttcttcgatttggagagaatagcttcttgtggctatttatgaatgttaccccagtatcgcagaaagaaagacaagttctttgagcgcacgaaacaaagagtagaatgacgtggcaaaagatgaggaaggacaaaccgatctcggccatcttgcgtctaagggaaactgcatcgagaaagttttgttttctgtttcgattgatctcatctggtctcctaccagcaggtggtctagatgaagcttgatatgagtatcctctcgttgcttcttcttccgcctttttgtatcaaggcaaatgcagaaaggaatggagcgagagcgatcgacatgggagcagatgtcaataacatcgtatgttttagggaaaacgacaaggaaaagaaggtaacccactctgatgtcaacccccttgactgcatcatcatctggctctgttttaagtgtcgaggctataccggcatccgaatctctcctgaaacctaacggaggagtggatgcggaggtgggagtagaggacatgccggtagaaggaccggacattgacgcgtgccggatagctgtagttgcttggtggagtgttgtcgggcctgagtatgagaagatgacgcgtgaagtcgaagggcgatgaggaaaagtcgacattgaaagggagaggaacacagatatgacgatgcggaggagtgtatgacagatatttaaagaatagaaggggagagggtaaagaaacgaacgagagaaaaaaatggaaaggagtaggggtagggatagaacgaacctgggccgggctttctcgcaccaaccggttgctgtgctagtcttggaggacctacagggttagttgatccggtttgaagcggtggaggtgttggtggcggaggatccatgactaaagaaggactggaagagccctcagtaggacctagggcggaggccggtctgagcggcgcgatcgaggaggatgctgtcggaaggcccgaagcggagagtgtgggaacagatgacacggtcgatggctttgatgtcgacagagatgatgaaggagagagtacgacgtcaggagagggagcagtcgatgtgggtgtggacgtggatgtcgggctctttgttgaccttgcgactgagggtaggttgagcttgagcgagatgttggtagaagagtcaccgactggcagcggcaacggcggcggcggtggcgatggattgggcgatacggatacagagaccgatggtgtagaagcagaagagtttgctgttggagttggtgcttgtctgttgggagggagggataggttcataagaggatgggtgatggatgatggcagagaagaagaaggttggaagttggacgtcaacaaaaccgagcgggctattgatattacgacagcgagactacgcctagccagaaacgtcctttgtctttacaaccagcatacacctcaattttctccgcatacactcaacatgcacttattagaaatcgtttggaaggagaacacctacttgttctgagacagagagtgcgatgaggacagggagagagtactttggaacgtcaggggtgtgagcgacgatggtgctgcatagagacaggcaagagccgtagtagcactatgagaagagactacagaaaggactacgatgggtgatagaacgagtaccacagagaagactacaaaaaaacatcgagacagactacagacagaatagaatggacactacaaaaagggacgttcaacaaatgactacaaagatatcgacaccacactacaaaccagactacaaaaaaaagagactacaaccaacgacgggccgaaaggctgtgtgatggatcgttcgggctttcggtctcgctctttgtttcttaacgacatcattcgactctccatccactcttagactcatatcaaacactcaacatggtatccccacactacgactttctcatcaaacttcttcttatcggtgactctggtgagtcggtgtttttctgtagttggttgtcttgttttcctctcgtttacctctcttttggtattaggtgtcggcaagtcttgtttgctcctcaggttctgtgacgatgcttggactccaagctttatcaccaccatcggtatcgatttcaaggtgtgtcccagccgtctttctctatatgttgtgagagcgttcgttcaaggtacttctgctttgtgtcctttcagattcgaacaatcgagctcgacggaaagaggataaagcttcagatcgttagtttgtttcgcttcttactccttttcttcgggtcctctggggcccgactccacctatccgtcttatatacttactcccaatctcattccttaccatattgtctcttctatcattatgtcttttgtactaaagtgggacactgccggttagtcaatccaaacgtacacacatacacgcattcatgcttccgtaacctctaacaccttacacttttcatctttcgctctcacctactcttttccctgatctcacgcaaataggacaagaacgattccgaacaatcactacggcctactaccgaggggctatgggcattcttcttgtgtacgacgtcaccgacgcgaaatctttcgagagtcagtcgccttgctcggtcgtatatctatcgtttctgtgaacttcacgccctgacctatcttgcactgccttcctttttttgtacgtccacatgctttgttccttattagatatccgaacatggcacaacaacatcgagcagcacgcctcagaaggggtcaacaagattttgatcggaaataaatgcgactgggacgacaagcgagcggtcaccgttcaacaaggcagagaactcgcagacgagcttggtctccgtttcctcgagacaagcgcgaaagcaaacgagggcgttgaggaggccttcttcaccttggccaggttggtcttcctatcttttcctctctctcttacttcctgttttcttctatctgcccgcttaccgcttccttctctgaaccaaattcctctggatcactgcacagagatatcaagttacgcctgatcgatacccaggaggcccaaccggcaaatgtggcagccaaatcttcgagcaatgtcgccgttggtggaggcaaccagtctggtaacaacggaggatgctgttaaatctttccttctttctttcactctcttccattaccttcttggtccttctctgctttttgtccttcattcaactttaaggtggtctaaacgcttgacataatgtcctgcattagagtttccttcgctttctcgacccatttcttgtcctttcttccacacttgttttctgtttctcctgcttcaatcatctctcgccatctaacggttcttcctttctttttggcgtcttccctcttactctatacacccttcatttccccattacactatcctatacacttatatattgacttgagaaaacgtttcgatccggtcgtgttcgtcctcagccttccaggggttgtgatcttgatcggacagaaagataatatcgatgtacggtacatactgcttctttttagcggctcgggccgagagaaatcacgtgcttgcttcgtgatcacacccggtcaaagccgagtcatctcatcttgcagagatcacctctttcttttctccctcggctttctttttcacttctttcctcccaaccaacatcgtatgaacattgtccgatctgttctttatcgaccactcatctatcagcctttaagtctctctcgcgcctctcgaaaaacactacacctgaggaatatgtctggtgcttctatctttaacacgactaggttggaggacaaaaccgttctgatcactggatccgttgagtgtctacttttcgttctttttcagtctacatttcaagattcggaatgagaagacgaaaaatcgagagtgaaggctgatcggctcttttaccaacaattgatgtcttgtctcacgttgcacatcagtctggaggaatcggaaaagcaaccgccatcctcttcgccaaggtatattcccctatctttgttcatcatccgactcatctctgtccgctgaagtcagaagcctgatgcactccctccttcatcatccacctcgtataatctataggcaggtgccaacttagttcttctcgcccgccgaaagactgagctcgaagctgtcaaagctctttgtgaagcagccaacaaagaggccggttcgggcaaaggaggaaacgtcaccatcgtcgaatgtgatatctcgaataggagcgctgttgatgctgccttagcagccgatggagtaaaagagtgggctgagaacgtagaagtgtatgttcatgttttgcttttgcttcttttgccgctgcttcttctccttcttcttcttcttcaccacagttgtgttccgaataggtcgctcatcctacttccatttctctttcggtcgaacatcttgtcatgtgcgccaaatgggattacagtctcgttaacaatgcaggcctagtgaaaggcgtagagaaggttggggatattgccgatgaagacatcgatggtccgtctctattgctattcctcttccctctttcattcctcttccatgttctctaaaccgaccagtggatcttgttcttgcttgacagtcatgttttctaccaacgttattggtctcatccatctcacccagaagatcgtcaagtcgatgaaagccaggcagactggacatgtgattaaccttggatccgttgctggtagagaggcttatgctggtggaggttcgtcttgctctcctttctcgaacgtcttttcttttccattttgcattattgggaacactgatgttgatgtaacattgtatgacataccttattccttcagcaatctattgcgctacaaaggttcgttctcaaatgaatcttctcaaacagggatattttttatctgtgtttattcctttcctctggctgatcgcatgctgttcttatctaaatcaaatagcacgcgttaagagcattctcatcatcgctgatgaaagaattagtgggcactccaatcaggatctctgaagttcagcctggaatggtcgaaactggttcgttgatttccttgctcgctctctcatctttccttcttgtctttacgcgcctcgtagaagcacttaacaaaagaatttatctggggacggggctgcttgatctatagatttctcggtcacaaggttcagaggcgataaggaccaagccaacaacgtgtacaaagggacgaaacctttggttgctgaagatatcgctgaggagtacgtccatcttcttcatcttccttgcgcgagccagagaaaagtcttggaattgaataattaagcctaaccatcatttatctcgacacgttcggtaatcaaggatcgtctgggtcgctcttcgaccaaaacacgttcagatcgccgagctcttcgtcttcccctcctgccaggtacgtcctcacctttatattatccctataaagatccttgggatgctagacactcacttcagagattggttgttgttgttgttgttgttgtnnnnnnnnnntgtaatctttgtctcaggcgggtcccggaatcgtccaccgagagtaaagaaagaattatttacggattcaactcattacctcgttaccttcctgttccccccttctctttttgttttctctacaccaaagtgtgatctgtgtgagatttaaatgatcctaagacacatcgagtgtcggtcgtatgtgatgattgacgtatggaacgcttattcatgtatataataagtttcgttgagcttcattagtctgcgctcaaacggaaacatccaagggctgattgtagaaatgacgcatgaacggttcgaccctgagcagaagaatgtttatcgacggatgcgttgtgttctgtttcgacgagcgatgttatgtcgttagcatagcttaaggatagcatgaagctatagaaagataccgaatccgattggaaaggaaggaaggcaaaaggagaaagggaaccatgaagagaaaacgaaccactctgttttgatcgccccccagggcaaagaacccactgtcagattctttccaacccagagtcctcacaaatactctcttccttctctcctctgcttcttccctttccgcttccttatcctttcctattgttgtggtggtggttgtcgtcgtcgtcgtcacaggtgtctctgttgacgaggaagacggccgagatgttgaactttgcacggaaggtcgccacgaacgttcgaggtcttccattcgagagggagaaaggacgagtttatgttgcgcggccgagagacctgataggttgttagctgtgtgataaaagtcagctttcctttcaaagaagggaagccaaatgattgaggaagaaagaaaaacgccattcggtttggaacgtatgagtaaagatagagtttcaagagaagaggagaaacgcgcactttggaggtttgtcagcaagaccacccttggaatgttgagccaacaaaaggatatactcctgtaaagctctcctatcaaacaactctatttggtctagactagataggtctctaccggcaccgacggcgagttcttgctcaagaactgcgaacgaacctccaacccaccaaccgtagcatccatccaccagtttgtttgacctccctttgaagccaccaccatctgctgccgaggcctgcatcatcacgctccatctcagtagcgcgtcaagatccaccccgagatcgaggtttggctggacggaacgaagtaaatggagagagaggagagcgcatgatgtgtatcctccatgagcttcgcctaggggagtcgagaatatagagtcctggacgctacccagaccgggagggagaaatttggaggtgaaacaggaagaaattgaggatgggctggcagagaaaccgccttcgaacgtctggcaagaagcgatgaactggccggtgttgtgaacgagttcaggagttaacagatccagcaacgtagccgtgaccaagagacagtatacacctctgaacgatttcaatgagaacgcggtcgtcagcctcattccctgacgatatgcaggaaaaggaaatgaaaattgaaccataccgaacatcgacctctccgccatcacacacagtgaaccctccattgggtcgtttcattcgcataaagaagttgtagatcgcctgccggtcaatttgatcccaccctttacccaatatggctaaagaacagacagaggcgtatgtcggaagcaggtgaggggcttggctgatattacctccaaagcctcctgaagggtgctgacatgccagaatggtattcacccctctagagcgagggaagaacggagaacatgtcagctcaggagtcaattaaacagataaatcatgcagacgtttcagaacgtcaaaactgcttacctctctctggtaacttcgtcaagggcgataccaagaatatcaaaggaatgaagaatccaatagaccatccagggacgactagcatcgagggaaacatatgctgcaggaagcccaaagagattccttgcaagaaactgtacatggttctgcttcgctaagggcggtctgagtatgcgaattgttacattaagggttcagcaaccttgaaggtgaatagaggatgaagatagaggagagacacgaacggggatccatcaaagccgagagttgacttgtgaagatcgatgagcgtgctaagaaacgcctctgtattaagctgaacatcgctcgtctctgtttgcacgccgtctgtctggaagctgactgggttgctagtgagagctgacatggagagatggaagtgatgatctagatatacgatggggatgttgaaagtgatggtctagacatacgccatattctatgcggtctaagataacgagtgttggaagtttatttgttcctctatcgtttccgtatttttctaatctttgtcattccgtatatagatagctagtttatctcttttctacttctttttctcttaaccatatcacttgcaccttgtgctggtgtgattgtttgacctttaacattctagaacaactttactttgtatatctttgactactagaaagtaatctcaactgatgatggtcgatgcatggtccttctggacttaggtgtcctcagaccacaaatcaccaaaatcccatgggtcatgggtctgttttgtcctcgtcgatggggcaactttagcggtaagagcaacaacagcagtggaaaacactagcattctcgctcccttgttctcctcctggtgaaggcctaggtggagtatgttgtgcaacgcattgacatccctgtcccactaagtctgagagtaagcagagagcaagcagaaagaacagaagaaaccgattagtacttgacacactatcttgagacatccaacacaccagacccaccagactgacatttcgacgccccttgggcgcccacgctttgtttcctcctaagacctcaccatggcacttggaacgcactctcgatgtccaggaattcctggactttgcgagcctggaggggcgggaaggctttcagcttggcaaacagcatcttcacagggcctgaggcatccccacgaagggatgatgaaaaggtgccatctctaaacgcgataaaggtgcgtgaacgttctgctgccagacgaagtgtcagcttgtggtgcgcttgttctcggccgacgtgcgtattccagcagagacgtctcgaccgtcggatagcgaagaatgtcaagatccattagtatgactgggaattcgaggtaagaggaacgcaaatctcatcgagaatggcagttctgaacagagaaacatctgaagaaagaagctgaggggagcaagatggtctgcagtgtcagtaagacagtttacccaatgaacatgagcataaggaacacttgctatagagagctgttgacacttccgcatggttcttcatctacagccgatgtttctgacggcctctgtccatccccgcgaggtgcttccaaagcttaaagaaatattgatcactgcatgcctcacccaagcagatcaccgttgtccagagatatatccaacccccttgtagtcgtcagtcatcgagagaagcgtccgacgaccagggtcgagacccacgacctcgtcctctggctgcacaccccacggaacgtattttgctcgatgacgatccttaccttcgcccttccatctacatccgtagtcgtcgatgccaagtggaggcgacgtagacctcagtactccggcggaaatttcaatggcgtctgtgatgagcgaccgggtgaaaaggcgacattgggtttcgcctctacagacctgagaagaccgcttccaccaagtgtcggagtcagcccgaagggactcctttgtcaccccgcgcatgtgccagactcatatctcctgacctaagctgtgcactaaggtcgtggagaatctagatgtctacaaagacgtaggagtatcggtgggacgaggtgggcaggaatgagaagaggcagatgctatgcccccgacgacgagtagttcgtctcgccgctgcatcttggaagctatgtaggctcgaacatgatgattacacagcgcgaagagcgtagataggaccaccacgaggccttgacaaccttgcctgtcagagacagacttcctaagatgttatctgagagaaaagtgatacagtactcgcaaacgagcctccatcaccgtgcgctgaagaggaaggaagggttcagaagccaggatggggccatcaagcttgtgacaacttgtaatggtttctcttcttcctcttttctttcttcctcctcttcttttcgtcagacaagggggaggggacagctgctctcacagatgatgagagaaggcagggcgataagaacgatcaagtatatcagtcatcgtttcagtttttcttcgaaagataattcattcatctttatctgactattgttgaggcggctctgatgtcttctccgacgtttgtctccagcagccaccaggatacgagccgagaagtccgatccgacatttcaaggacagcatggttctgacagaacataatccacgacaaagccttggcatcgatgactatgtctagacatctatgacgatagcgagtcggccagtccgtgttggcagtcagctgcatcatcgccatggccagagagaccaattacctcgagctgatgctcaacagggaacggggtgtctcggatgtgatcgattcttgattccgtataattgccccttggtgcggattctccacgcctgttgaagaaaatagtctgaaaatacaggcgtatcgtcgaggaaaggtctgggatgggggctccatccgagcagagcgccgggatatgcagattaatcagacgcgacgtgtcgaatgatgttcttctcagcccagcaatggcggactcgatcgggcccgcaaggggaccgaaggcgagtaacgagctaaacccgatcctcaccgacagtgttacaagagggaccgctggagcaacgcgaatcattactttctgggatggaagacaaaacgggcatatgtgattggatcgccttgagttgccaacttgatcgcaggctgaacatttaatagtatcatcagtcgtagtaattgctagggaagatctcgtccgagcctgagccgtttccttgcggttcatatcgaatgcaagtggaatgaaacttctcaaggcagctaacgagtgcactaacaagaacagggattgttgcgcggaagagtgtctctgtcgccccgacttttctgtgtactacgatctgttggaattagcgcctccttctttacagaaggtctcctgtgatgggtttgactggttgtagaccattacgaacaacctcgtgaacgctctacagctcatagcctacggacaaagatatgaacggacagagaggtcatatctgatcgaggcgcctgcagctaacctcggtaatgttcatctagacgttcgataccaggtatacaacatgaacaccaaagtagtacagtcaacccagcacgaactccatcatcttcagtacgaactgatcctgcctgatcccgaatgatttggaaaagaataaaactaatgtatcaatgaatgattgacataatatggagaaacattaataatcagcttatcggattttaattttcctctcggtcaatgccgtcagctcccgaactatcgacgaaccatcccactggatccgtttaaattcacaactgccgtccctgtctcggtgccgatgcgatcggaggttgtggagctgtacgatctggagcctgagatcgggagaccacgcctcgccgagttctaaagcgaccttgatcgccctcgacggtgagcgggctcaattgggaagctcaatttgccaacgatcttgcgcctgtgaacatagacgccggcgaatgatataaagacctcacggctccggtgatttcatctcctggccttttactttagccggccaggacgaactgcctaaaaaagcgtatgtccgccgcttaggtaatcgtttacccctccactttctatctgagcaatgtgttcttctcccgctctctccatacatcgttttcgttgatctcgcttcttttcttggttctacttttcctcttttcctttctacagttccttttattctttctctttcgtcttcttctttgtaggcatctctttggttcatccttccgttagtgtccgtttgcccgttagtgtccgtttgcaaggatactcatatccatcgcgttctctaccacagcgtccgcctgtcaaccaagcaggttcatacatcactcgtctggtctagatccagcatcaatctttctggtttgaatcgttttggaaccgacgtaatcgttttggaaccgacgtagtcgatcgtaaagatctggacagcagctcttttcgcgtccttcttgttcttcctcatactcggttcgcctggcaacagaacatccatccatctttcttctttctttctctcttcgcgtttgacacacgatggaccactcggatgtatctgattcggcaaaaaaacggatgtccaagtttggactggcatgtttgaagtggtcagtactctttcagcccgtatccacttctattgtggtcgtcagaacgacaagcacgtacacatacacacgtctagctccaagattggcgaaggctgttcccgctcgtcagcactagctgcattttgctcccggtttcatccatgtgaactgcgttcactggtcttacctgcctcttttgctttcattctcaaacgtgtccatccggtcgttccttgtgatcatcctctttaatcagtcggtcacgcaaaatcaaatgcgactctcgaaagcctgtttgtgaaaactgtgagaagaaagggttcgaatgtgtttttgacgagactccgtacgtactacctctgcgttctctaattcttttcttcagactcctactcaaacgtgctgccttcttatttgtttctcccattcaattttctcatctgaatgtcgcaggaaaactcgaggaccagacaagaatccaggtcgaaagcgtcgaacggcagcgcaaatgcacgccgaggccaaacttctccggggacaaggtctttccgaaacttccaagaagtcttccgccaaggctgcctcgtccttatcctcgatagaaaagaaccaggctttcagcaatcaattcaaccacagcgccgagttttcttctcaacaacaaatccccacctttctatcacccaagattgatgagtcgtcgagtgatggccgtcggtctacttcgtctaatgatatgctctctgcctcatctagttcaggtctcttaatcgacagctcccatgttcttgcatccaatccaagccatccgtctaaccacgtcgccgacctcagacggccaggtcctcccttcgcctcagggtttccatcgcaatcggcagatgctgacgaagggtctagtgacccttcgtccttacctattaaatttcaccatcaacatcaacagactcgtcatcatcaccgtcaccaacaacaaaatcactacatccatccatcagcaatagcatcttcatatacttacggcgcccctcctttgtctttacctcccccccagatgttctcccatccttctggtacttactattcgtcgcaggatccatccatgaatgcgcgtctatcctatcctgatcaatcaaacaacgagacatctcaactagcagagtctcacagcccaatgcgtcagccctctcaggcaacctctgtccatctcgcacttgtgagccctgtgccgagtaacagtaatcaaaatatgacctcctcccaaaacaattcctatcagcttggatacgataatcctagaacacagtaccagcgataccagcagcagaacgatctgcagcagatgcaagcatcttcgataaatccgtcccattctggacacgtctaccaatatccatcttctgctcctgctagtggagagtctcaattgtcttccggctaccagcactacaatcaacagagggcattatatcaacagagccgacaatcaatgtaccaagctccaacggtatcatcttcttttccgccttattatcaaccaagactacctttgacatccacaccgactcctgtgtatgaccaggcccaacatatggaatactatcctcccctccatcaacaacagcaaccagatttctctcaccaggcttaccagtcttctccccgattgttggggaagcgtcgatcggaggaggccttcgatcaagttcctgaacagagtgctgcctctcaggtcgaacccgtacgaaccaacgatatcctgaagcaacccgatcgaccaccaatgtcctcaagaagaacgagagaagacggacagtacatgttagagctggaattatcgggaaaagaaaaaatcgaaggtccgtctgggaacaatcttgatagctgggctctccaaagagcgacggccgacagattggtattgaacgtatgtcttcttcttttcggggggtttgtttctttcatttcttttttgcctttctctttccacgccgtttttggactggcttgccatcggatctctgtttttgcgggtaatcctgacagctcacaaatgatctttttgtgattgttgtcttttcccacttccttcctgtctccttc

SEQ ID NO: 1748 - DNA, 3324 bp, Xanthophyllomyces dendrorhous
tccgggcttttcttctttgcgctcttctgtttcgccttttttttttttcttctcttcttcctggtctctctttcctctttgtttcttcgtctatccatcttgttttcctcttttcttttgagggggtttgttccttttcacttattaacggtaggatttactctcacccggggacccgtggatgcctagtcttgagttaagtgggatttctggcgtacgcacctttttattttcgtgtactctttgttgaatccgtgtctcacggacggtcaaaattacttttcggcatgatagaacgccatcggagcacccttgttcgtattgttcccatcctttctgcttttgatccggaaaacgtgcctgcgtacacttttcttacgtcctgtctctcttctctctgaatttttatctttgtgtttcacttcgggtgctcagctcaatacaatataccaacctgccgtttgatttcaaagggtcatctttgtcaccaacgatgatcaaatcgccctctatcgaatattcgaaaaagatttggtgggactgcttactctcccgctatggccaaagtcgcccggaggcatatgcagctatcattaaagaaattctgtaagcttttctcccttcttctttgctgtatcggttcatcaagcggtctgacgtttggttatctgtctctttatagaacgctatttcggataagtactcattggattgcgttcttcaacgtcccaaggtttcttgccatccttcacaacccggagcaaagacaatgtcttcgtgagcaagaccatccttttatatgttgccttttcgtttctacgttgtgcgccgtttctgaacaagctttatgtgttacatgtgctcctgatctcgacagagccatcgctcgtatatgcaatgttagccctcgccacccagctcacctcatgggacgggccaggcggtcgagaacttgacggaaggttgttaggtctgaagttgaatgatcatgcccataacagtttttggcaaagttggaactctggattcatcaagtgtgtttttttttctgtccctacttcacacggtatacaaatgttgtgttgtattgatttcgttgcttggatttcttgtctggaaaagtgttgacctcgcgaaggccgctttcctcatgtcactttatgaggtatcgtctcaccctttgtacactagaacccgagcatcacaaagcctagtgcaagtcctcctcgcctatttctgatacgtaacaaaatggggttgttctctaatcttgttttccttgatatagattactcgatgccgtcatccgggtactaaacttgaccgcgatggatgccgacaaccctcgagcgtcgagatttcagcctgatgagattccaaggataccggcagatgcaaggcgggtttcgcctgctgattacgatgagctttgtttgcatgctgagcaaagcatagtaaactgttcattctggggtgcgtagatgttcgatttctgagtatcaaggatcacgacaatagagattcttcgtcagaggctgacatcctcgtcaatcgtccacagccgcctgtcctcgatggagcaaaccaggttcaacctacgttgatcacgtcgagatcgaaaaagaagaagcccgccggttgtgttggagttcctcggccttagctgccagtgcttctacatacggtcataacgtttggaagacctacaataatttatcgatcgccaacacagcgaattacgcgctattgtttcctggagaactcttgacagaagaagcggatcggataggaaaatcctccatttgggcactttatcatacctcgagtttggtaagcgctctgatcttcaccttttggtacttggagcagtcggacagttcgatctaatgcccagcaatttcttcatcagatatggcatttctccattcgcctgcacaacgactcgagcgtctcgccaaaggagaagcaaaagatatttggttggtcaagattgtttgaagtaatatcactggtatccatacgcatattaattttctccaaccaaactgcatgcagccaaaatctgggaggccacagaagagacagaatcctactttggtgcagtcatatcagataatcttgtctacgaaggacagacctggcatgccaaagtcggaagcgtatgtgttgttttaagtccccgttcgcccatcttggtttagtttctaaacctttttcttctcttttttcttgatcggttttcagttggcctatgtttggcaatccatagactggctagcgacgtctcggtttctgatctacgacgcgctggtcgaaacgatgaatgcaaggtgggctatattttcttttctcgcccttccttccgtctgttaatttacttaccagtatatatcttagcgaacatatcccgaattatccagtcgatgccgctcgtcggtggcttagggtccaagctagtgtcgcaaaaatggtctgtccaggtagggctttctcgacagacttgactcaacgttcagtcacgatggtcgaacatcggccgttttggatctggtggcttatccaacagttagcaaggtttgtccttttctcctttcttgtggatcatatgttatcaggatctgacagcaagttcggtgtacaggatgatcagtatgtacgaacgagatccatcactcgtcgacattttagacattgctagagggagcttcacgcccatactagactatcttgttaatctctatccatccaaaggttcgttcaattcgggtggtcttgctagcggtgcttgtcttctttctctactcacatcgtttgtctctatttgcttgttgtgcaatatatagttctcgcccaaaccctgtcaagccgaatcttttcccgactgaattctcttaacgaacgagctagtcattcctacgctgtcgctttcccagcctcgaccgctttcggtccgagatttcctcaattgagttctccgttgtcagatgtttcctcatgtggaggcatagaacagtcaacgactgctcttccgcttcttgacgaagatgttaaaccttgagccaattcagtggtcttttttctctcctttaccattttcttttctatttctctgtgccctaaattatctgcttctccaaacatgctcttcgatctgttgtatcatcagttccgtacacctttttattttatttcccggtcactactaaggtttccttgttcagctcttgggcgatgtgtttcccatctggcaaagcatgctattttccctctgtgtttcgctttcgttctttctcctacgttctgcctgaacttttccctgtagtc

SEQ ID NO: 1749 - DNA, 43564 bp, Xanthophyllomyces dendrorhous
tccctgtagtctgatgttttttgctccttcttatcctgtcatttctcttttttgcattctgcaacggtcttgctgggaaataaacgctacagtcaaccgtgtttatttatcgtctcttcatctttcatcaagcgctatattcctccgtcgtttgttcacccttggtttcaacaaaatactcttttctttcttcttttctctttttaaaattgatcgaccacttggggtatttaccattactcagttttaaagatgaatcaagataaaatggcttgtcggtggtttcaaaacaaacgtgatctcgggctcgcttccaccaagaatcccaggctgatctgcagaggaatagaaactgattgagctttctgtgaaaacgaagtaaggagatggagagcgaagataggatgggaggtgtcttccatgttcgaccgtgtggtgcgaacgcaggtgtgtcattacaatgactttaaagtctgttccagggtctgtcgagtaagggaagggtttgtttctctaaaaaggcaaggaccagctcgttgctctcatccatatccctcagcgagcgaaagagtccaattcctctctccggttcttcgaggcaggttacttgctcgatgaccgaaattaaaatgaatcgtccatcgcatcctatccgacatatagactctcctccctactttgaactatgacattctttgctcgacaacctgcaaccctccatacttctgagcagtttttttcaccgcctgtcgaaataagaagaagaaaccccatcaagacgtcagtatgaagaaaactgcttagatcgtgttagatagcaagatggggtgaaggccaactcgatgaaggacgaacttagtgctgagcgttcttgtggtatccttgagaagaacagagatcaatcatccatgcaacagaaggatgaggtaaaccaagttagtgtctttgaacggaaagtaaaggggcggttggtcttaagccaatgagaagagacgaacggagatggtctgtttatgaagatatcaacaaatgcaagtgaattagcaaaaacacaaaatctagatagctccacgcattacagactagacagaaaacagtaggacttactgaagtattggatagtgtatccgaggacgaaaagaccaccaacgagggcaacgatgggctttctagatggttgtgcatcaccgattgaaggccgacatcatatcaaaaaggggaaagagagataatcagttttcatacgctcgttaacacagccagataggagtgttatccttcacgcagccagcttgaggataatatcagatgatattggtctgcgggaccggaaaactaggtcgatgaacactctgactgccgtcgctccgcatcctacgcatcggtcacgtcctttctatacgacagcattggtcgagcgacatatccatccattccactaatccatttctaactagcttcaggccatccaattgagagagaggacgcttggaaaggagaggagaaggtaagaaaagatgaacggacccggtagcgttctttccgttgacgaatttagaaagtccagtgtattgctgggcgttgggagctcgtcccttaggaagcttagtgtagaactcgatgactcgatccatgctggcggtggttcctcctccagactggattttgttttacaggtttttgtttaaatatccagaatgatgagaagccagtgatgccggggacgagttgaacgagcgagattgttagccaaggaaagcagcaaaaaaagatggaaaaaagtatctaatcgaccgaaatcaaaacgactcggacgtaccacggaagaaggagtggcgatcttgggggggataagggaagagaccatctttgttgattctgttcgcaagaaaaggaaagtgaacggaagtaaacgaaaagaaagatgggttggagggaagaaagagagggaggaggagagaacgaaaagaaaagtgatgtaaccaatgtgtgtaaccgatgcttatgtaagcacaaatcatcacacattggctaccccagaccccggaccttgtctcgctctcttcgttcaaggttgatctcaccttccatcttctggatctctatcgaccttcttctgatctctcttactctctttcatcaatcatgcggtctacgttggctttgaatgtcagtatgcttgatctggcttctgcctggtctccgttttgttggttctcagcgcctagggctcatggttagatttctgattgattaggctggcaccaagcgttatcccttcccaagacgagtctggtctccctttggtaagagctgtctgccgttgtgtctatttcaatggaaggattttactgagatatgtgttatttcatcttggtgtaccttcctgttcacaggaggatggtggggaggaaacaagaactggaaaaggaatactgccatcgttggtgcaggctacgttggcttgatgttctttgttgtcatgccttactcattcgcacatgaggttcgtgtctatcttctcgagacaatcgatcctgttctcttctgaaacataagctgatttcttgaatatgggcgttggaatgataaatgatagtggcggtatgttcccccatcgcggcctatcccgtcaatgctggttcgtttcttttccttacgactgatatccttccactgaactacatacgaggtcactctaacaaatctattcatctacgctcatcacgatcagttcgccaagcagtacaaagatgatccttacggagaaaagatgtttgaaggtcaggaggcatacgttcctcggaagcatcactaagcattcgctgatgaccagacggcgaaggagagaccggtcgtacagggtaatcccggttgatgtattctaaatcgttgtatcctccgtgtcaatgatgagcggacaagagtaggaatgtagggtttatatctgcgacaacaagctttccgcttgatgaatggttgttggcctatgagagatggtctaatactctatctgatttgatctcgaaggggtcgtctttccagacaccaagccaaagtcttctgtctgtctgtactcggtttgtttgctacaacaatgacatatcaaggagaacaggctaatttacaaatatatccaacaaacctttcatcgtcggctttcgatcggctcaagcgacatcatccataaatatatcggcagagccgtgccgaacctgtccgtggcttccacacgagatcaaagtgtgggatacaacatccatccatccaaagaatcaagtacagaccgggtttctataggacgttctctccttcaccgctcttcatcctagccgtccacatacagccaggttgaacgttgtgtcttcaataattgagaaaactagcccatggagaagcgtgacgactcaccggaggtctccgatcaaccaaatcctgaggcgaaaagtgcaccacctcctctcgatctagaagctcaacgcgccaatgtagacgtacctcttcctcaaacagatagtcatgctaatgaaaagaaatcagtatacccaaaatgggtagatgatccagaaaatccattgaactggccaaccagtaagaaatggagagtttgcctcatcgtctctgtcacgggtttactttcaacattatccagctctatggttgcaccagcaggccatcaaatcgctgtcagtgtggggagtgggaatgttgggaaaagggtagagacgctacttacagttatctatgtgctcggtttaggatttgtgagccttctctttcgtttctcagcctattttgttttcgttctccgagcacggagtcgcgtgtgcttcattcaacggacttgaaatctctctgcgttcaacagggtccatttatcttctctccgatagcagaattgtttggcagacaagtctcgtacatcctttcgacggttccatatgcgcttctgaccgcatcgtgcatcgttgctccgaagtatatcctatgtctttctcattctttttactatcaaacgttttgcaagaggccgaggactaattcagtgatttgacagcctgtattctcttatcatccttcggttcttttgtgggatctgcgggtcatcaggttcgtctcaattatatcttgggatctgttgagctgattgttcaaccaagcgcttggtctcatatgcttttactggtggtttatgtgtttgataatcgttgatttataggtccgacgctgggcgtagccactgtgtcggatgtgttttctcctgctcagagaggaaaaccaatatctatctatgcacgtaagtatgtcttcttgtgaccattatacacgtgtctagccttactgaaaacgcgaccaattcatgtacatagttggtcctatggcaggtgcgtctatcaacgtatctttgtgttttgtcttcctctttctctttggtcaatactgagaaattagacggtgtatacctcccatttttaggtcctgtgatgggatccatgttcggtggatggctgtctttagtaggatacaggttggttaatccttttatacgcctcttgcttcacaaggctgattcttttgtctttcgcgcatctcattcgtgataatcataggtggatttttggcacgttgacaatcatgaccaccctcaattgtgttgcgattgtgctatttatggaggaaacctatgcaacgtacgttgtccttctcttccaagcgtctcgcgcgcattcttccgacccatagctttgatcagccgatagtatcgcttctggttgttagcgtggctaaatctcgactgtgttagcattcgccattcaccctttcttctcttggttctgtcttgatgtagtacggttaaattcaagcttgaacatagacgaaaaactcttcaagccaaatcggctgtagggtcctcgtcttcctcgactgtatgcgaagaagatttgaatagaaaaatcgctttcaaagaaaagcatgcatggattgcttcactggtctctcaggcaaactaccgattggtatttcttagggcttttagtatgtttccaatcgtttcctcgcgtcgctcgattggtcgatattgctcaggaagacatggctgctgacagtcttcttacttgtctcgatgttctgggtcatagctcgcccattcaggttcttgttcaccaaccctgtactggccatctttgctttgtattactcatacatctatggtccgtgtttcttgcatatcctccgtccggctggtccacaccaagaacacacattaatctctccgttttactctcctgtgtatacatcgtgataggtgtcatatatctcctcatcatagctctacctatcctattctccgcgtcggacgctctgcctggcctattcagttacggctggtcatccgctacttttcctttagcgtttctcagtttgggtacgtgagccctctcgagctggtttggttattcagctgaaaggccgtatgtgagaagatatattctgaccatggcttccggaaatatgaatctatcgacacaatcaggtttgggatttttctcggcagcattcctggcagctactatgcaggcaagcacatttcatgttcgttctcgtacaaaaggaggcataattcttaccgccccgtgtggtgttgcttgttttagaatcgtatatatgctaaactttgcaagcgatacggagataacggacaacctgagtaccgagtgcgtttcttctgagaaagatatactttgtctcaagattttgtttctgaccagttgctttgtcctttatcgttatctttcttaagcttgtccttactcagataggaatgattttgtaggtattctccttttgtctctatcgaaaagtagtagtcgtctgacacatacgtttctgctcatttcgacagcttccctatcggctggttcatttttgtgagtatcgatttctcaggctgaatgtcacatatcttctcaacttatgatggtgaaccttgtaatcatacaggcatggacggcgcacagtggggcgtactttatctgtccgatgataggactggcgcttggtggatttggcttgatgttggcgtttaattccattcaaaattttgttggtaagtggatccgttggatctgaagctctgcgcaagcatgtgtcaccccaagatttgactgatcaacctcgcttcttattttgtcaatgaaatcagttgatctcacatcgccctattctgcggctggtacagcgggtatgtttcttccgatctctttatctttaaaccaacctccctatctgatcataccttgttttatcctcttaccattctgatagctatctcatttagtcggtcgatcgtcgcatgcgtcctgcctgtctttggcccggacctcttccaagcactcggctggaactggggaggttctctcctggcgttcctgtcgatgctcgttatgttcgcgcctctaatcatgttcttgtatggtaaacagctcagagagcggttccaacttcgaggttgatattgtagaattatagaatattgttgtgtcatgtttgttatatcagcgaacctccctgttcaaatctgaggctgatgttcaagctgaagttgacgttgagatcgatctgccccagcaatggggataaactaaattcacaacccatggaatcttggtggtttgtggtctgagggcacccaagtccattagggccatatatcgaccatcataggttgaggtaactactctcaccaagcccagagtttgacaagtattcaaatattctattcgttagggttgcatcaacctctcccaccgcttggatccgtcatcaccttctccattcccaaatcatctatgtagatccactgggccacataaccatggcagcccctcctcaagccaatcatttcctggccagattagttccgtcctctaacaggctgcttctctatggtgctacatcgaccgctctcgccgcctctgtcctgctcaatgccgcacagaccagatcgtccttctacgcggccgctgttgggatcgcaaagagtaatggctctgtgatggtaagtagccgtttctattggttctgatgtttacatgggatgagagggaaagagaggagggaagaagaagtatcgaatggcatcaggatgtctttgaaacgccgccaatggctgaatcttcatcatcttacccttgtttgggaattggactggatcacacgtcatcacggtcaggtccttgccaacttttgcctcttcgtgtcgctcatgataggcataggattccaacgcctattctttggaagactcaggcccatcgaagtcgaggtgagtgatggatcatgacatcttgatcgtctatctctattcgagaactaactatgcgtttcttgttgggaactatctttcagcacttgtacgatcggtcatggtacttcttgacagagtccttgttagctttagccatgttccggtaagtttattcgaaataagaggctcttcggagactagttgttgagctgcttgtcgtctgttttgtctgtcttagagaggatttcgatactacattcgttcttctatttggcggattactcttcctcaagtgtttccattggatagctgcagatagggtcgaatgggttagttgatattgctcttttgcattcgtttctttttggtcaatactcatcatagaatgcgtatttgtaaacagatggatcagctcccgcctcctggaccacctctcctattccatatacgactcgtcgctctactcggacctttcctgtttatgctcgatacgttacttctgatgtacgcgattagctctatcttcacctatggactcagcggaaaactcttatttgtcaatgagtttgccgttctcctgaccaactgggcgaatatcgtcggccggtataatgtcaatctgtgggatcaatggaagtctcgaaggatcagacgagatcgcgaaagagctcgactggccgctgtggcaagaggtgaggagaacgccgaagacgaagatgatggtgacgaggatgagacgtgggaggggaagagtatggtcgtgttttatatcgatctcgtcactggtatgtccaacacaaccttttctgcgtcctagaccagtgtatcctgactgttgtgattcatatgattgcgtttctcccttcaaacagacttcatcaagcttcttacttacttgacattcttcgtcctgatccttacatactacggacttcctttcaacattcttcgagatgtctacatgactatgcgatctttcgtcgcaaggattcggactctctttcagtacagagcggccacccgaaatatggaggcccgatatccggatgccactagagaagaaatggacaggatggatgacaaagtgtgtatcatctgcagggaagagatggtttggcagcctccggccggccaagaagatcaagcccaagacccgactgaaaccggagcggcagtccctcctagaagaaggcgggttcgaagagatggagagaggccaaagaaactagggtgtggacatgtgttccacttgaactgtctcaaaagctggttagaaagacaacaaaattgtccgacctggtgagtctttctcttaagatgcataggagcggaatgttgagagcagatattgatcctttttgcgaacccggtttgataaattcagccgacgtacggtcctgaaccaaactccggtggtgccagccgcccctggagcggtacctgctctagctggcgcacaaccaactccaatcgctcctccaaatatacttcctcgatggcctcacccaactcaaccacatcttcatcagcatccacacgctcctacgccgacccaaccagctcccgctcaacacccccttcctcctaacggcgagggtggtctatttgctggtccggttccacctcctcgtttcgcgcatcaaccccatcctgctgcttatgcaggatacccccctttacgcgttccacatctgcaagctcatcctcagactatgatacccggattaaccggtgttgtacctggccctgatggacgacgaccattggcaggatttgaggtggccggattcggttggggcatgggagttagatttggagcacaagtcggaaatcctgctgcaggtcaactgagaagagttgtcgaagaacaaccagcgccagtaacgccccaacctcctgctcaaactcagcctcaagaagggtggaatcgaacagcatcagctccttctgcggcgactgcgcccactctcgtcactcctttacctgccgatgtcccttcgatatctgccagcacttccgatgcgccagtagatcccccttctgacggctcatctaaccccgaaggagtcactacttccggttcggatgagcagacgatgactccgagggagatagctgctcaagcggcacttcgtagatccgctaggttgaatccatccctttcgaccccacccaaggagacatgcacgacggtggtcggggaacagagcgttatagatgagccagagctctcacatgtgccttctatccctctcgaaacaacttcttatctcccttcagtagaagggtccagctcaaccaccatccctctttcttcgccatctgaagcgactacgcctggctcggctaagtcttatcttcctcaacaacaacagcatcaccgtcaacagggacccactctgacgcctctacatccaacaccctcgctgagctatctagacagctctctgcgcttcccgttcttctctaatccatcccggatcaatgaacctcctccttctcgtcccacaggaactttggagcttccagagaggctcacagaggatgagttggaccggatggatagacttactagggaggctattcaggatcgactgtccttcattggcagaattgatcaggttctgactggactcagagaggagctcggcagagtagaagaaagattggcgaggccgagatttgagtccagaaacgatccagagagcggcagggagatgggggcaagagaaatccctttgccaagagatttggacgatgagttgtgaaaatcccggcgttgacagtcgccgatggaatgatattcctgttcctcttgttttttctcgctattcatctggtagtcttctggggcgattgataccgaaattaaaacatgtgctgtcggttgtgtctctaaagtggtgaacctgatagtttgccgtgcatatggattgatgaatatgaatatgaatatgataagatgtagagaacagattgacgattgatgattgatgagattgatagatgttttacagataaatgagaacgacaatgatatgatatgaagatgaaacgataccatgcagcctactgagatatacatcatttttttgattcctcttgagagtatcctggtcttataagttatcccttcttaactcttctctcaacctcgtcgggactggacgacattttacgtttgctgttcggagagaagaccataggaaatgaagaggctccctattttttatcgtatgaaagtgtgaggctttaacagatttaagtatttcttcgatgtaacttgggtaccacagacgaagagaagagtttggatgaagaaagatacgaacagaaccaggaatcgtctcactccttctattagacctgtcatctctatccgactcgagcctcatccgtttgaacgctgcacccttccctatatccctagagtcatccacttgctctctgtcgataatttctagcgcggaagatcgtttagacgcccgcggcgaagacatcaaaaatgggcttggttctggaggctgagatggtaggcggaatgactgagttgatatcgttttactgttatttctgctgataggggatgcgggacctgatggtggagagaacagattgtgaaaagatgatggggctctcgtccggggagatgatagcgggtggttggaatgaaatctcgtttcagacgatggggatagaatatttttgggagagaaaggtcctgagtgtgtctgatccgaccgaggcgaggagcgaaaagaaacggacaaccgtatcagctgggttgaatgaaaatcaagacgagagagaagacagtcgaggaaacgcactgagaggctctcaggagctggagtgtttcggccaggtagccgggcgattgacctggcctcctccgccgcctcaacgttcatctcttcttcaccttcctcctgtactatatctcttctactatccggctgatctgacccaagacaagccgtgatcgccaggactttctgcttatgtaggcgagcttgagtttccatcaacacacgctgatcgtcccattctttctctttcttacgttgctcgagaaggcttttgacgagttgctcacggaggtcattgacctccgtctccgctcttttcaattgaagctcgagctcctgagtatttcacaagagatatgcgcgcgcaagatataaacagagaaatagaaaatcgatcagttaaacgatacagaacaggctaaagaagaagaagaacatacatgaacccggttggagctagtttgcctctcatcagactcgatcccctgctttttgagtaagctggcaatctttcgcttggccccatctaacgacaagtttgcatcttgcatgtaatttttcgcttctatttctgaagcacgagcttgatgaagttctttggccaaattttgtagatcagtctgatgagagtgtcccacaaaagtccgatgtattcggtgttggcgtcaatccttgcgagtccgaaccaacaatggaacagagtgaggacgtacgtctttccgttggatctcagaagccattgctagcttttctgcgttgaggacttcgaaaacactctgaaatgacggtttgttttaacaaaagggtagtgaagccgggtagaagtaagaagacgatgagaagtgatatctctctcattgtctcggcgcaagataggatggatatataataaaaactttcttgacgaaccttggcttgttctatcattttattgtgctcagctatctgctgggaaagctgctcgatagacctgaggtactcctgttctttgatcgaggtcaatgaagtcctacacttgtcaccccgctttccccatgatggaaagcgccggtaccaagaatttattagaggatagaacacgttgtcactttgtgaatttgatgacagaaagagtattaggaaagtgcactagtacgaacgctaaggtttgcgatgtcatcctcgtactctttgctcttctccgtccacattcgttccatggcttcgaagccctcctgcttgtgctgatagagcactgaggcacgcaagaatcgatttgagtacgacaatgtttcaggatatcataaagtcagtgaatctacataaaacgaccacttacaccgttcagtctctattattcggacgtcttcggcatgtcgatttgccaagaaagtagctgtctcgttagcgatacgactgtgggtaccacatatcgaaacgggtcgatgtagtcagtaacggagtcaagtgtattacctatcaggtctaaagcttacgccttttcatcgaacagcgcgcttttcagctttatctgttactcaaaattgagacccagtcgttctttgtaagatattttaacataaacaaaatgcgacaaacgaacaagactttacccacttcgcttcgagcctcgatcaattctcgctgacacctatttagagcggctgcctgaccacctgtagcagacgactcgtatctttccttccaagtgtcagcaagcttgatagcatctgctttctgttgtctgacctgggagaaacaaagcgagcgatcaaccgataggcagtaagtgagtatctcccgctctgataccatggctttcttcagggtggcatatacaccgagtagttacgacaaagtgaatgaccaacctctgcgatctcggctcgatgtttttgatcgatctttactttctcatccaactgacgtttgatctgggtctctagaaaacgaatgcgttctgcttgctcagactgtgtactctgtatgtctgtctccatctggatgtatgctgagtgaagtttctacagaagcagcagataaaataaaacgacgcgtagaaagtgacgtattgggtgggtgtgagagttggtgtaacaatgtaatcattatatcacgtgactgcaccgagcgtttaatcaacctagatggttacatcggcgtaaagccgacggctacgcttggccccgtcggcttccatcctcatcgccatcaccatcatcattgtacccatacgatctgaaatcgaacaacacacgtacatacacacacacacgcacacacacacatatatatatatacatccaagcacatatcccatgatactgggacattattacgaaatcttgggtcttagttccagttcggtcgggcgtgtggagagtgagtgcatatacagtcttgacatacgtcaacctctcttcagcttgcctatcgattctccctccaaggggagatcaaagtttgtattacgttcagaacgctcaggctgacatctgctcttcatgaatcgtttgtgcccaagtcaagaaagcgtatcttcggaaatgcttggaggtttgttccattccgtatggactagctctttcaggggaaggtttcacagccgagattggtcggtctgattggaccgcgccggctgcaatcaagtctgattcgcttctttcatctatgcgcttttttctcttgtgaacctggtttttcaataggttcatcctgataaaaatccaagggacccagccggggcggaaaagctgttcaaagaagtgtgttgatttcacgtcgttgtcgttttggtcgtgtgctgatgtggcctgatctttgttctgttacgttgatccgtttgggcgccatcttcctaggtcaaggcggcctacgatatattatccgatcagctgaaaaaacaagaggtatgcagttctcccttgtgcgacgtgtgttcaatcgtttccggtctcccctgatggatgtgccgtgtcgttttcgatcagtacgaccgaacgatcaaccacggtggctctcctttttactccttctttgaatcgaactttcaatctcatgggccgcgctaccatccgaaacctttttcgtcctctcgatatactccctatacaagacccggccctcgtcctcatccaccaccacctacctcgtcctcatctagctcttcaacttcatcctcctcatggacatcattctcatccgcatcagactcttcgcctaatcctgcttcgaccgctactgctgctgctgctgacagcccggtggacccaacaccaaaatcgaaaccaggaccgaaagtggagaccgacccggtgaaaaccgcagcgttcgaagcgtttatgaaccaacttcgacaagaacgaagagaagaggtatcaaagacgaaacgtgaggacgctcagaatgagggtcattcgaggacactccaactctcaggtttgccagtgtccgctactgagaaggacgtccggtttgcattccggtcgtcagaggataacattgagaaggtcagtcctgcggtttgttctgtgtgggctgtggacgtgtgtaggcggacaggtttggtcgttgttatcttgcctcggatctgacgtcttgttttgtgttcaaccctgtcgatccgattcagataacggtctacccaggcaaacatctagccatcgtcgtctttctctcacacctgacggcctccgacacgatatgttccaaaccggagatccgaatacatggtagagtcgtcactgtcgcttggagtagagataacgggacgttcgtcagaaaacgcacggtcgacggctcgtttgtctctgtcaatatcgatggggatgtcggtgggggtacgggtagagccgactcgccggatctggctttagaagatcggacgggcaagaacgaagaggtctacttttggtattagagcttttccttttctagcctatttcgttttcgtcttttcttctgcgtccggtgtgttcattcactctcactttatcacataatcgcactcactcatatatatacacccatacattcatacgctaattgtataacacttattcttgacttgaacagcaagaaagattcacatgtactcttttttttcttctgtatttgtatgtgcatttcatcttgtctagctcggcaagaaagatgagaaaacaaagtatcaaacaccctggagcatgctccaaaagggtcaagatgagggaatgttatctcctcgaaagaaagaagaaaaaaggcgaaagcgaagaaagaagaatggagggatggaggggtggtatagacatctagtcgcctccaacgcttttagtgtgattggaaaaaggaactcgggaagagtgaaggaaatgagggtcggagaaagagattgaccagcaaatgctattctatagctaaaaagacaatgaagagtgatcttctctaattttctgagaaaggggaaaggaaaaaaaagtacatccgcacacaaagagaaatggaaaaaatgtctcagtacggttatatcgttgggaagagaagagggggaccagggaaaggtaaagctcacctagtacacagaccatgaaacccaaaagaatgaaggaaaaaatttgcttgaaaaagagcgattttcatggtttacaagagtggaagaaggaacgagggaaggagaccggtagaggagcaagagatgaggcgcttaagcggatgcctctgccaaggcctgctcaaaggtgaggaaatcctcgccgtcgtattcgacgtcctcctcggcctcgacctcggcctcgccgtctcgtcggatggctcgagacttggtcttcttggtagattctttaatgaagagggaaacagaagaacgttctagatcgagtttggttggaagggagagagagagagagaaaggaggaaagaaacttacggtagccccaggttccgtagatgacaccgagatccttgtcggccaaggacccgaagagaccctcggagagatccaactgtcccttggagcaagacgggcactcgtcctggatcgaagcactgacggtctttccgccgtacttgacccagatcttcttaccgcagacggcgctggggtatcctccaccccaggcggcatagtcggcagagttcaaagcaacggtgtaagcgctgttggcgttccagtttccacaggctccgagtccaacggaggtatcgctgagagagagcaagtgcgagggagttgctgtagtcagcatttgttctgctacccgagtagagaacgaagagaagagacactcactagtaggtgaatcgggaaccacctcgcttctcgacgtccacaggagcggcgagagcaagaagaggaagggccaaggcggcagagagaacggtggagaagagcatctttagttatttgtttgtgagtgagtgggtgtgtgaagggagtgagtagagtgggtgagtgagtgagtgaggaaggaaggaaggtagtatccaagagaatgagagaactgaagagatgaagaaagaaagagagagaacatcagctcgacgaaagacagtcttataggattctttcaacaaaaggctacacgaggacgagaacacaaaaaaaaactagggtcaaccgttcaatattctagacgaggtcatacatcagcctcggtcggatcagaaccctgaaagctaagaagaaccagcccgggggttgttgtcggaaagacgatcaagagatcaagtcagcagtgttcgtctgccttggccttaatttccaccgataaccctcgaaccctaaagtcgggggtgggtgaggtgaaatatattccgattgttaatacgtcagtgagtgtgagtgcggtctatgaggtgtgagtgagtgcgggtaagtacgctgttggctccgacccgctcaaacatcagagtgtctattgtacgtcaggtctcgtcagacaagagaacaaaggcgaaggaggagggaaaaaaaagggtgggccgaaaagaagagaagaaaacgaaagaaaagaaaaaaaagaaccgatcgcccgttaggtctagaacttgttccttttttcttttaatttcaccggctacaagttctcgtcctggtgccttttctgagagcgtctccccgatttttttgatccatccgtccgttcattcattcgttctaatgagtccacatggtttgagtgtcgcacagaacgggcccatgcacgttcccctcctctttccatacgactcggttaactccggtctttttttcttttcttttttctctttctcttttccttgttatgtcattttggcgatccgatcccccttctttggccgtccattcgtgatgaccgggtagtcactgggcagtagatcgagttttctatttcatttaattctttttaattctttttttggtgaaaagaagaagagatgttcattctattagaggagaaaaaaaaagaaagaacaataaaagacgacagacaaggacagatgaagaaagatggtcaaaagtagtatagcaagaagagaagaacaacaaacatcagaggaaaaaagatggacatctagagattaaggttcactggttctattatagaccaaacggtcttcttgtcctccttactttgctcttcccttctccctctctctctctctctattttgacttcttggcctcctcttgctcagccgccactttcaaaacattcatcggcgcgctctcctttccgtcagaagcgacctcgtctcccagtcgaacgttctttggcttggactcgccggacctggccaataaagccttctcggcagccagtccctcagcctccgtcttgacgttctccgcagcctcgaccttggctcgctccgaagccttagcagcggccactcgctttcggtaagcagtgtacttgtcatcagtgcccaaaaggtgatcccaccatcggaaagaagtagagtagttctgtagatcagatatcgaatgtacattagcatacatgttttctttccttcactaaagtcgtattcggcaaataaactcacgttcacaaacgccatgtgatggtagtcgtggtgctcagctccggaccagaacggaatccagtgtcgaggaccccaggggaaatctttagattgaaaaggtagaaaacaaggaaaaggagaaaacaagaaccaaaccgatccaatccaaaccaaacgcgccacaaatcagctaagctgaactctagtgaaagccaggaagaaacgtgactgaccatatccagaatgagcctcgacagcttggaacaacttaaagatgacccagacgtagacagtgaagatgtgaagcgttgtgtcaaatccgagcgacttgaggatcgtctgagaggcaacagcaaacaaaaggggtcctccgacagttccggctcccaagatcaacacctcgatcgggtgggcatactgtagaaaaggaaagacacaaatcaatcctctatccgttcagaccacgcttcagcattctcgacagtcaaccaatcttcttacctcagcagccaatccaaagggagcactgaactcatggtgaagcttgtggatgtgcttgtagagcataggtgtgtgaagccatcgatgcgcaaagtactggaaagaaagaagagggaaggtcatatagagtttagcatacagtcatccagccaacaacccgatcggacaagatatcatactcagaactcacatggaaagtatcctcaaacacgaaaaagatggcgacttgccaggccatcgtagtccacgaagggaaaggaacagagtgggtcgacattccaaagtactcagccatcgggtggaaaccccagatctgatagaaagatgccaaaagtcagccttccgaccatcacggaaataaaaagaaaagacatcacaagcccgcgccggcacacgtacctgaggcagttcaaccgtgaagtgagagagaaggacaagcttggtgcagtcccactgttgctttgcagtaggcactttaccctgtcggtgcaaattgtttgatcactctagtcagtcggatgtgatgaggatctttgtaggcaccggctagtctaaatccttacaggctggagcttccactttctaaagtagggaatttgatcaatgatcaccaaagggagacatcgaccaaagtaaacgacctagagagaagaaaggatgaacaaaagtattaatattgagatgagcgatatcgtgcaacttgatctgacaataaagaagaaactaacctcgtgaaggacgaaactcatgattccggtggcaagcacagggtttccgatgtacaggtaccatcgaactataaaatcagaccgacaagcagaagaaacgatggcacaaatcagagcctgtacatcaatgaatgcgccagcaaaagacacagacagacgaactcaccccaaagctgctccaagatgtttagatcggccatattaacagaagggtacaagcttgaggctgaacctgcaaggtcagcaggaagggttgtgtttttcaatgcggaagttataaactccatggtccaatcaagagggggatgtgtccagattcagatgaaggaggggatgatgaccgggcgtgagattgctttgatgtggtataggttatctgtatagaatagttgatgcaagtggcgtgtaaatgagtgtggttgagtgttcggatggaggcgcttgtgtttttctttttttttttctttctttttttttgatcggtatcgtctaaagagacaaggacaggaaaaatcgttcgatcttggtcacacgcctcgatcgttacgtaatatttacataatcagatacacgttcataaccctaataatacctctgatggttacacacgcacgcgttaccattcgttgtttctctcacgctagcgagaaagcgtgagagaacttctcttcttcctcctcctactccctcccctccttctcattcaacaatccagctcgtttggatcgagggtatcgtctactttctggttgattgatcaatctctccatagtgcagtcgaacatccacacaaaaagctacacatatatacacacacgagatctcaaacctcatcgtctggaaagaagcccgactgtgaaactcgatttggcagcagatctctctcctctctcttttcccagtccttctttcgccacgctctcgcttgatccactcttccgtataacatcctcatcatgcctctcggacacggattctcttactcctcggcgcctgtcaagacaatttctgagatccaatttggtatcctttcaccagaggagatcgttcgtcatttccgtgctattttttcgtttttcgtttcacgcgtcgtcgtggcccttctttggcctctagatcaatgatctccttctcacatcatgccctttctttttctcactggaatctatgatgcttgtatctgtgctcctcttcttttagaaagcctattcggtagctttgattgagtatccagaagtcatcgatgagatcacccagaagcagaagcgaggtgggctgatggatcccaagatgggaactatcgaccgaaacttcaagtgtgagacttgtggtgaaggcatgagcgaatgccccggtcactttggacacatcgaactcgcaaagcctgtgtttcatatcggtgagtctcttggattaatctcaaaagggacatgtatcagagccacgacagttggtgtggctgagggacagacgatgcagagagcaggcagaacgtcaggacgattgactcttttgggatgacgaacgagcagcgtggatatacattaatgtccttgttacgtactaattttgttggattgaatggctcctttgtaatcgttcaggattcatgatcaaggtcaagaagattctcgagtgcatctgtgtcaactgcggaaagctcaaggtcgacctcgtatgtgtttttcttcttcgcttccttctggcctatggtggcaaaaaaaaggaaaagtcatttgggcaaaggacgaaacaggatggtaccaactagaacattgtttttctgctcttacctttctttgtgacaaccaacagcgagatcctactgtccgtcaggtcgttcgtcgggttcctgccaaagatcggctcaagcacatctgggagaaagcaaaggccaagacggtttgtgacactgacgaggtcccggaggagggcaaggaaggagccgagaacgcgttggaagccgtgcccgggcatggagggtgtggacatgtccagccgctgatcagaaaggagggactcaaactgtttgtggtgtacaagaagcagaaagaagaagaggacgatgaggtaggtgtcctgccgtttcttacatgtgtctcatgtgcaaagagtatatgaaccagataggtctcatcatattcctgaaaataaactccctgttatcacaggacatcaaaatgctccaaccggacaagaggccgttcaccgcctcagaggtgtacaacctgctccgaaagatatcttcagaggatctccaaacgatgggactctccgagtcgtttgccaggccggactggatgattttgacggtactcccggtgcctccgccacctgtgcgaccgtcaatctcggtcgatggaggtgcgatgagaagtgaggatgatttgacgtacaagctatccgaaatcttgaaagcaaacatgcaggtccgcacaagagaacaggagggtgcacccccacatgtcattgccgagtttgagcaactccttcaggtctgtatcatccttttgccctctcttttccgatgtttaatactacggggggtctgactgtggtggacgatggcatatgtctttttgttctttctgtccttgatgtgtgtagtatcacgtggccacctatatggataacgatatagccggtattcctcaagcactccagaagtctggccgtccagtaaaagctattcgagcccgactgaagggaaaggaaggtcgattaagaggaaacttgatgggaaagcgagtcgacttttcagctcgtacagttatcacaggagatccaaatctgcagcttgatcaagttggagtaccaaaaagtattgctatgacgctgacgtacccggaacgaggtttgtatcagcaatctttcttcactactaccaagtataccggaacagcttggctgaaaatgaaatccttggcttacttgtgttgcgaaataaaagttacaccttacaacatttcgtatctccaggatctcgttaacaatggacctcagactcatcctggagcacgatatgtcgttcgtgacactggagagcgaatcgatctgagacacaacaagaacaatgcgtgttcgcttcaattcggttggatggtcgagagacatctcagggataatgagtatgtcctcctgagagtgacaaaccgactcggtgatcaagaaacgtgctgacagagaagggcttgctcttccgttctctctcagctttatcttgttcaatcgacagccatccttacacaaaatgtccatgatgtgtcacagagtaaaagtcatgccttactcgacattcagattgaacctttctgtgagtggactcctgcgtgtatctgtctatgcgcaagcgaccaggcaaaaagactcatcattatcccttcttgtttgataaataggtgtaagcgttctttcatggcttaggctttgctctaccggatatctaacccatctgccctcttcatcactacagtacatccccctacaacgcagatttcgatggagacgagatgaacttacagtaagtagttgctactcatctcgaaacccggataatgcactgacaacactcttttttccaaatctttctagcgttcctcaaagtgaggaaactcgtgcagagctaagtcaaatcgcttgggttccccgtcaggtttgtccattctactcgtccctatcagctacttctagcttgtgctgacggcactgcatcttcatttttccattagattatttctccgcaagccaacaagcctgttatgggtattgtgcaagatactcttctcggtatccgaaagtttactctccgagactgcttcctggagtggaagcaagttcaaaatattctcctctggttgccaaactgggacggaatcgttcctacgcctgctctcatcaagcctaaacctctttggacaggaaaacagatcttgagtatgacgcttcctaaggggattaacattgccaagcgagcggatgagccatcaccgatccatcccaccgatgaggaggtcatcgtcgaaaacggagagattctctgcggaattatcgtcaaaaagatggccggagcgtctgcaaacggtttcatcgatgtcatcttccgagagaagggtcccgaggccgctagagattggatctcgaacgtccagcttgttgtcaactatttcttgttccactctggattctctgttggaatcggagacaccattgccgacaagcacgttatgggtcagatctctgatgcgcttaaaaaggcaaaggatggagttcttaacttgattagttggggagaaatggacgcgatcaagcgacagccgggaatgaccattcgagagacgttcgaggctgaagcaaccaagttgttgaatgaagctcgagattttgcaggaaaggttggtcaaaagtcgctcaaggatgacaacaacgtgaaacagatggtggtttccggatccaaaggttctttcatcaacatctcccaaatgtcagccttggtcggacagcagattgtggagggtaaacgtattccattcggtttccggcatcgtactttggtaagtgttgtttttgtcgtagtaaaagacagggtgacttgtgaagaagccttgcctgatgaaacgccgatctattttatgtttctcattttctctcctcagcctcatttcgcaaaggatgactatggaacagagtctcgaggtttcgtagagaactcgtaccttcgaggtctcaccccagctgaattcttcttccacgctatgggaggtagagaaggtttgatcgatacggccattaagaccgccgagacaggatatatccaacgtcgacttgtcaaggctcttgaggatgtcaaggtttgctacgacggaactgtccggaacgccggtggcgatatcctgcaattcgtctatggagaggatggtatggatgccgcgtttatggagaatcagacgttgcacggtaaccgactggacgatcaggcgttccaagacaagtacaggattgacttacttgatcctcgattcaagattcctaacggtgttcttcaggtcggtatcgacgtgtcctctccagatttgcaaatctcactagatgaagagtgggcacagctcagagaggaccgtagaatgcttcgaacgttcatcatgaaggacaacgtttcatcccttcccctgcctgtcaacatctctagaatcattcaaaacggtcagcagatcttccatcttgataaccgaaaaccaagcgatctttctcctcaatatatcgtggacgccatccgagcgttgaccgagcgcttgatcgtcatccacggtgaagatgatctcgccaaagaggctcagtacaacgcaacgcttcttttcagcatcttgcttcgaagcaatctggcttctagggtggtgctcatcgagcatcgccttaaccgagagacgtttgattgggtctgtggagaggttgaggctaagttcaatcagtcgctcgttaatgccggagagatgtgtggtgtgttggccgcacagtcgatcggagagcctgctacgcagatgacgttgaacacgttccattacgccggagtgtcgtctaagaacgtcacccttggagttcctcgattgaaggaagtcatgaacgtcgccaccaacatcaaaaccccatccctcaccgtgttcctcacggatgagatgagacgcacgatcgacacggccaagatggtccagaccgagttggagcatgctactctccgaaccgtcactgccgccgtcgaagtcatctttgatccgaaccctcaggctacggtgatcgaggatgataaagagttcgtcgagggtttctttgccatgcccgatgagggtacggaagagaagctcgaccgaatgtctccttgggtgcttcgtctcgagcttgaccgagcaaagatgcttgataaggatctcgagattgattatgtggcctcgaagatctcggacaagttccaggacgatctgcacgtaatctactctgaccagaactctgagaaacttgtgattcgatgccgaacgattagcgacgaggctgacaaggatgacccggaggtggccgcgaatgaggatacgttcctgaagacgcttgaggccgagctgttggataagatcgatctgagaggaatcccaggtatccagcgagtgttcatgacgaacaaggatgacaagcttcaggtggtgagcgagcgaggtcaatgggaaaaggttaaggagtggtaccttgagacagatggatcgaacttcaagcgagtccttgctgtggatggagttgacgctgagcgaacgtactcgaacaattgtaccgagatttacgaaacgctaggagttgaggccggccgagccgctttgtactctgagcttcacctcgtcatttccttcggaggttcctatgtcaattaccgacatctctctcttctttgcgatctgatgactcagcgaggaaaactcatgtcgattactcgacacggtatcaatcgaaccgatgctggagccctgtctaggtgttcgttcgaggagaccgtggagatcctcatggaggccgccgcgatcggtgatgcggatgactgcatgggggtggcggagaatgtgttgctcggacaagtggctcatatgggaaccggaatgtttgatgtctcactcgatatggagatgcttaaggatgtcattgtcgatcataggttgcctgtacaggctatgttggccgctcgagagggcggtatgacgcctggattgaatggtggaatgactccagtggactcatcatcgccgatgggtgcgtttaatcacgtatctaacgacgtggcgttctcgcctatcattcactcgggtagtatggacgatgcggcctcgttcgagtacatgggttacggacagagtccgatgggcgcaggcggtctaggtggtatgagtcctcacggatactcgccatcctccccgtcatactccccgacctctccattcatgccgacatctcctttccattctgccacttctcctttcgccacatcacccttccattcgacctccggcatgggaacttctccgagttacagtccggcttccccattgtacagtcctgcctctccatctttcagcccggcctcgccatctttcagtcctgcctcgccttcgttcagtccggcttcgccgtcattttcgcctgcatccccgtcgttcagtccggcatcgccgagctatagcccaacgagtccgcggtactcacccgcttcccctgccttcaacgccaccagtccttcatactcgcctgcttcccctcggttctcgcctgtatcacctgccggtccgtcgcgaatgtcaccgacgtcacctgcgtattccccggcttctccggcatactcacccacttctccgacgtactcgcctgcgtcgccttcattcagcccggcttcgccttcgtactcgcctgcctctccgtcgttctcgcccgcgtcgcctgcgttttcacctgcgtctcctaagccggctggatcgaccagtgggggagcaggttcaagccagcagccgtcttggaagaaagcgagaggatcgggaaaccaagcgtcgcctagctggagaagatgagagcacagaataaagttttgtctcatattcagttctgttccctcatatcttttcttctatagtcggcaacatctgttgctcgtttttgccctctgtctttcttatcccgatgaatgggttacaactaaaaggaactcgtgattcgctattgaatgaataagatgccgtctctgtacaaaacatacgagggaaaactttgttcaaccttgaggtccaagcatccgaatactcttgtgctgctgatgtctgtaaaacacttgagtgttcggtttactatgtagaaagagataggaacaacgtagaatgagatatgcctctaaatttgcatatatgcactgacacaggtcaaccgctccaatacccattttttgccttgctcgttttgtcggccggttgctgttccgaccagccagctctctcgttcgatcgatcttctttccattcctccctgcttggactggacaccgttgtcagctagaaaagaaacgtttggttgaaagtactatctgattgtgtcttcatgtaggtttctttcttgttttgtctcgttgtggtagagcgttcgattagagtacgcggaagctgactcttcactttattttcttcctctgtctctttcttttctgggtttcctatcttgaacatcgattctctgcttcccgttctgcaatctctttaacggacaaagcatgcctatctacggaaaaacaaaatatctcccaaatccgatcccgtatcggctgtaccctaagattcgaaacccagtgaatctgccgcttcttcctcgatcgaccgtaccgaaccacgctatcgtcgaacccaagacgtatgtccaggctcgaacagaatccctcgcttactctcccgccaagatgctggccgccagacaggctagcagtccggagacgttccctcctaatttgagaatacagaactgggttgactctagggaggcttgggggaacgtgccaagggcgaaccgaaaacttcttatgggtatcgcaagaaggcattaaaccatgggaccatcaggcttgagaggaaagaaacaggagaggaggacatagcatcaaacatctatctttcaatcattcaaccatcatcaccgtcgtcgtcgtcatcatcgttcaatctatttcatcaagtagttctatcgttctcccttccattaccgtcgagcttctgttttcatctcccccttctttctcgtgttatcaaaaataagcactctggcatggatctatctctattatcttgcttctctctcctgctgatctggcttgtgattgtgtcttttcctctttttttcgctatcttttctgtcgtcttggaagatgaagagcgcgagaaggagacttgtattcttaatgatcttttccgaaatagccacaaacgaaacagaatcaaaccattctcttatcaacctttggctagctatacagacaagaaaccctattcgagagaaatacataacaataaacacaaaagtagaaacgaaagaaggaaggttgatagaagaaaaagagattcccaacagcgtgaaaaaggtcgcgtgttcgttttcttcactctcgccttcctttttggactctgaccggcaaccatcgaaccccgttgactatccctcaccggcctctctatccgttctatcttttcaataccttcttttagtcagcttggtgtatactcgtttgcatcgtttacagatatacattcagatgattccttcgttccctcgtcggttggtgtcttcgacctcaaacatcatgtcaaactcggcagttgccgtctcttcttcctcttcttctagcaaagcagcagtcgctactagacgacttcatcaaaccgccacccatctatctaaagggcccgagagggtttatcagactctcatgaaggtccgttatgtctttcttcatcttcttctcttgcttcgcttctccatctccttcctctttgcaaccgttctcttctctttctttcctttttttccccgttggttcttcttcagtgctaactcttccatctttgcctgatctttgtctcttcttctggcttcttccgtccgctctcgtcctcctatctctctttccttactctcgccgaccctccctgcatccaacaggaatccaacgcccaggctaccgatccaaacgcttcggttctcttcaccgagtcgacatgcactcgaagctaccacctcaatcgacctaagcagcttaatgcgctcaatctagagatggtcgaatcaatcaccaatcgggttgatgactggagttctagtaggatttctaaggttctcgtcggtcatggcaagggcggaaaagcattctgtgctggaggagacatcaaacgtatgctcgcttttctcttctttcaaaagtttttttctctttctacctgttctttctctctcgagccctactatctttcacctatctctcttcatcatcatccgtgaaggagatggttgaaaaagacgggtcttgtcggatcctctggatatcattggaagcttactgatcatatcctacacgtcattttcccttacagatatcgccaaattggtcgcttctaccaaccctacagacaagtggcaggccatgaagttcttcaaagaagaattcgagcttgattggaagctcgcctgtttctctgttggctctcaggcttgggatggctcgaaagcttacgttgccataatggacggtctcaccatgggtggaggagccggtcttagttacggagccgtcatcagggttgccaccgagaacacacagttcggtgagtctttatgcccttcttctttctttcttgaatagttcttcatattgatagttcttctgtgcgttctcgctcttctttgctctaccctcccctaatctctcttttttgaaacttgtcatgatctccatcgcatcagctatgcccgaaactttgatcggatatactccggacgttggggcgactcactacctttctctcctagacggaaaaatcggcagataccttgccctcacgggtgagacaatcaccggtcgagcgtgttacgatctgggacttgccactcactacgtcggttcccacaacataccttccctgattgaacggctggatgcggtcgaggacatcgataccaacggaggcgttgacggcttggtttccattgttgaggatttcgagctccgaatacacgaacggatccccaagggctcggtccctggactggacgtcggtggttggaaacggggggatcctaactctgggacccggttggtgggcgacatccgagttgcccttgacgacgcgtttgcccaggacaccgtcccagagatcatcgaaagactccagacatacatcaagaaggacgccgatgacgcttcggtgtttcaggcagagaggcaggttagcgactgggcaaaggagacggttgaggtccttggtgagagaagtccggtatcgctcatggtaaccttggtaggaatgcaaaacgcggaggaggagatcaagtcggtggcaaaggagctcgctcgggaggtcgataggtaccacaaggttcctccgaacgaggccctcaggctggctttcgagcgagaatacaagacggtcgagagctttgttgtgagtgttccgtttcctggattgcttttggatccacttgcatgtctgaatcaacctgaccgatcatacttacgttcacaaacataatcagtatgagtcctcgcctgacttcccaaagggtgtcatcaagaagctcgtggagaagctcagccctgaatgggatcgagaggtcgatccggccactctccagtccaattttttccctaaaccaaaagcaccgttcaagaacgccaatacgagccctcttgaacttgctcctccgacccacggatttgacaagcatcacttccgatcgtatggtctaccttccgaagttgaggtcagggctatcgtcaagggtgaagtcgagggtgacttccagcccagaaccagttccaagtctagagctggaggttcaaagtcgagcggagatctcgctttgaacaggcacatggtcctcgagtggttcaacaaagatagactgggtgtaaaagacagggtgacggagatcctgaacagaaagacttataaagtgggcgagggcgagtggctggcctggagtgattaaagtacagagtgggcttgataggacggaacgtgagaaggggtggcgaggaggatatagagactctcctttcttcctctcctcttccttctttgctttcttcgggccaataatatattgaacctttgtttgtgtctattttgtgtctgtcgagcacggaacaagagaagagagatgatggacgagaccgaaacaatcggaaagtcaacgaagcggaagagcaaagataatattctgaaagccatttatatcgggagttccaaagattcgcttagtcaaaggttcctccatctgcttgatagcaaacggtcaagagaaaatcgagaagaagggagggaagatgggtttgtgtcagcttcatcattatcaaaaagctaactgacaatagagtgggctgaaagaaaaagaggaaaaaagaagatgaacgactgaccgtctccgccatcgtcgcctcccccatcttcatcctcgccattatcgaagtaattgtctccgtctggtttccgagaagggaaaaaatccgaaagaagaaaaagggaagtgtgatcagtcaacatcaactgaacttttactactttgagacagaagaaagaaagacaaagaaaatgaaatccacgtacaatcatcatctccttcgtccacatcataatcatcctcttcttcacccgttccgttcccatcatcgcttccttcagcctggtcaaaaaaggcataaagacgatgggcaggcataagcggacagatgaacacgacgaagacacaaagggaaacagcagatcagacatagcgcatgtacgtgcgggtacgttcaaagaaaaaaacatcaagatgcgcacattttcatcatcgtcttcgccagagacgatgtcgtccaaattgagtttcttgcgcttggccgctcttttcgtcacgttcactgttttttttagtgacagatcatttgaaagagagagagagatatggtcaatgatattgtcgtatcaaacacaagttgaagggtatgacttccaaatctcaaacagttagtcggtcggttggtgcagtaagaaaatggagacgtacgttttgatttggggttgaagtagctttcatataacacctggggaaagaattctttcggtgggtaatcggacggttgaagagccgtgctctttgcttggacgggtttgtatttatcggtgtaccgttcaatgtctttgtcgtttagcgagtgaggagaggatgaggtcagcgtgttgtatcgaagtgaaatcaagacgagcttccaacaagatgaaatggagaaagctcaccgtcaactttcttaggttctttcaggtattccctgcttagactcatgtcccaaccaaaccgaacctgagcgttaaccatagcgcgttcagacagggaaggttctgggagcgtcggaaatgggtgaggatattgctagataaacaggtcaggaggatacagagggacaaccgtggcagaaaggtatgagagaggtatctgatttgttagttcagccgtactaacgcaacaaagggtttagaagatcggatggatgacgcacaggaaacagttcttcagactggccagctccggcggatgagatctcggcgtatgtcattcccatctgtgagcaataatcagtttgttatgtttagcacgtaagaaatccaaacataattagaccatggcggatgacacatgaaagaagatgtatgagtgcggtctgtgttgagctttagagagacatgacgaacgtaccaagttcaaaccttcacctggcccgcctctgccgccggctccaccccttcctccgcctcttccacccctaaaagacatttttgattgctcggtgagaggtacaggctgcaagatgcctgtctggagggttgaaggatgccttgtagcagctgatgaagtctgtcggtttcgcctattctgttggttgtttctgtgttctgtactgggcttaccgggaaattaggagagccagggtcggagcattgatgatgactaagcatgatgcacgtgatcccagagggcagggccggtcccacggactccgcagaatttcgctcacattcagtcaagcctgagcgactgctaatgtgcaagagacgatcccatcaacgatcaccaacgaaatgtcgactccgttgacacaagaggagctcgtgtctctcaagcagtggttgatcaaggagctcgagccgatgtttgtcttctttgtttcttgtcttgctactactatcgtcgacgtacacgttcgatctgaccgctggttcgactctaactcgttcgtcctctgggttggaaatgatcagatccgatgcggacaccgatattctctcggattatgtcctcgctttgatcaagacggactcatccgagtcagagatggagaaggtgagagacagagagcgctgtggcgatccttactaggttagacggcgactgacacgcgctctgaaattccttcatataccactctcgtaggaaatcacggatcaacttcgagactttcttgacagtcgtcagtcgtctctttcaacctactaggctacagcgctagtgcactgactcgcacctccacgcttttaccttccttctcctggcccactcgcacagacacggactcttttgtagcttcctttttcagtgccttgcgctcaaaatccttcgtttcggtatccgtagtccagtcgggtttaccagctaaacactcgttcctgccttctgagtcgtcgggctctcgtaaacgatctcgatcaccttcatcttctactcagcaacaggtttcttcgtctaaaacttcccgcctgtccacccctggcgctggaccagagttggatgttccaactggtcctcgatctatgcaaaatgccgatggcttcgtctctggcaaccagccgagcgcaggagggcgacctggtcagagcttccaaccttactttccttctgttgattctcaatatcaaccgcaacaacaccagcatcattttggctcgatgaacgcgttccctcacccaaacgcctggctcggtggcaacgcgaatcctcaagctcaatttgagtttcaacagcgagccgggttctttatgcctggcttcaacggacctatgcctggaatgggtgggtttggtacgttaggaccaaaccaaggaggaatgcaaagctccgtgcctggctcagaagatccatcaaatctaaaccagttcggcggacaagatcagagtggtcagatgacaggcatgccgatgggtatgggaatggatccaaatttctttgttcctcatgcaaacgactcttctcggggtggctacatgtctcgtggtcatggacgcggagggtcgttcacgcacggagctgggggacaaggaggacgccagcggtctaacaacaaggatgcttcctcccaccctccgaaggaccgaaacggagtgacccttgtcgtgtcggacatcccggcccagcacttatcccttcctgccatcaagacgttctttgccaagttcggaacggtcacaaacatcgcgatcgaccagcgatcttctcgggcgcttgtcagctttgcctcgaacgaggaagcctacaaagcttggaagagcgaggaagccgtgttcggtagtcgatttgtcaaagtgctttggcatcgaccgatcgagggtcagggtgggaaaggcaaagaagccctcgagaagagtaaagctgctgtagacaagctggaaggcactcctggcacatcgtccactatgacggatgagcactcattagcggccatctcatcatcagcaccttcatcctcatcgacggcagcaacggccggtctatctaaagctgagacgttggcaaaacaacggcttctagaatcccagatcgctcaacaaaaggtcttgatggccagactgacgagcggttctctgagtcctgaagagaaagctgcgctgagcgcccagttccacaagctgtcagacgaaatgaaagcgggtacgggttcgttaccggtggctgtagcttcgtcatcaacgacgaacgctgcaggtaacaggacggcagtcttcggtcctcctcctcctgcgtcttcaggaagagagggaaatggaaaggagcaggagaaggaaggagaaactagagagctctcaggctcgggcgagggaagcagaaaggacgacgacgaaccgatggcttccggagctacagaagaagaaataaacacggacatgctgaagcgaaaattggctatgctcaaagcagaggccgctcttctcggtgtagatcctaacgacccgaccgcctctccagccccttatgcggcatatccacctgcccgtggtcgaggcagaggtagaggtattagaggtcgcggcggcgccggtagaggagcgtatcggggagggttcaacagttatacttcgactggttctccggcaaagtcgatgaagcttgacttgagaaccaagcggttggcgatcgttggacagggcttaggagctgatgaggaaggcaaggcggctgtggagaggtggtatgatgtaagtcttctttcgttcctctgtcttcatcaactttcttcaggcgcatatcaggagtactaaccaaatccctcttttcggggagagacgtgtagacgattggtggggttgaatcaacaacatcggacgatggatcagatcggttgattatctctttcaagtctcgtgcgctcgccgagaaggtgcgtagtctcatttgcccactcttcttatcttttcccatatgtcaacttatacttttttcctcgcgctttgctttcttctgaattcaggctctcgctaaaggaacgaacatcacagatctgtctctcccaatcaacatctcgtggttcaacactcctccgagtttacccatatccaagcctaccgctgctcctgacggtcctacaactggctccgatccctcttcaggttcaggtccaggtcctgggtctagtgtaggcgctgctatagagtcaaccccatcagacttcagatctcgggagagagatgcttgggatgcagacgaagatgaatgaaggctggaagaaatgatcttcagagtatgtgtgtgtataagagggaggaagggaacatatccatgtattgatacttttcgttttatgcggaatcaacatcctgctcgcaagtagaagaaaagaggccataagagaaaaaagaaaaaagagcacatatgatacgtcagagatgcagagagttgtttgtatcaggcagatttgtgaacgccaaggatagggatctcgacgatctggtctgatccggggtacgcaggaaggtcgagctcaaaatcattcgcgatatccctttgttcgaattccgttataagacgttttgatgagttttctgaacctgataagaccaaagcaaacaagatgaaaggacaaagtgaaggatacgcacggaggaacaaatctccctcctagataatggaccttcccgttgaagaacttgacgccttccttgggcgcagtgagtgaaagaagggtatgaggttgaaacgttggtacgtgatcaatcggtccatttgtcacatcccagccctgtttttttcccatcaaattggaccctgtttcgtaagctatcagacagacaggcgaagaaaaaaggaagtaaatgaggaagaggacgtgcagaaggaatgtcgacagagatgatcggaagttttgtctgagatagaagagggaggatttccgtgaaaggttctctcaacggaggcttaaatgagaatcctgatttgaacacgatcaagacaaacgaatcttataagaccaacggcatccggaacagattgaacgagacaagacaattaaagaccgaaccaaagatcgcatctagaatgacagagtgggtgtttagcgcatgtttgaactcgtcgaccgagcttacgaatgggatgtggaggttcatgcattgcttcttcaggctttcgtagaacgcgttcttccctggcttgggcaggtatactgtgggcctatatccaaagtggactgagagagcgatttgtagaccataagatcctcagccagagcaaacaaaggagggaacaaagaagaatagagaggcgcattagaacgaacagagatgccgggcggcgacgagaccatctccgccttggtttccaggtccacaagcgactagcaccgtcttttccgagggaaacgatcgggcaagagcggtagcttgaatgagtcaagagtctatcgtcagttatctgcgaggatcaaggagcgacatgatcttgagctgtatcgttggatcgcctacgaaccacaagccaacccggctaattccatcagttgactttatcagatcaagagaatgagcgcggtcagtcttctctgtttccgttctgacagtcgtattcagatcgggtcagctcaatcattagaaggacacactcgagagagaatccgccggcttcggacatgagccgtttatcgatctgatgttcaaagcaagcgtgaggtgtgcgtgtgtgagatcagagctgagaacctcgtagcctacacggatgagatttgattagaaagcagaaaaaaaatagatcgcaaacatgccaacctcctgtgctacactaggcgatatatacttcatccttcagagatgtccaacagaactcaaattgatgacaacgttgctgacgatggtgatgatggtcgtctacaagaagccaacggaacttctgtggggaacgatgacgatttgggatttaaccctaacattcgcattttacctgcactcttcattttctcactcttcccggccgatcaaccaaccatccatcatccaccttgttgtctgtactcctatcacacacaaacatacacacacacacatacgcaacatgatctctagctccttcttccgatcggtcgctcgctccactcaggcagcctccctcgcacgcccgttctccaggtcaatccccgctctcggacctccgcttcgaccgcactcacctaccgagtccgctctgagagacaagttgatggaccgacttgaggccgaggagtgcgatgtggaagatacatcgggtacgtcttgtgttcctctctctcttctccgtgtgcaatatagtctcaggcagaggaggggagctagccgattggtacaatcctgaaacgtgcccccatggttcaaaatgaaactgaccaatccccttttgctcaatttttttcttattccttttctccttgttcttgcttcgcttgtcctgctcttctcttcctgggacatatgtgtgtgcgcgttcatgggcttgacttaatcaggtggctgtggaacgttctacgctatcaacgtcgcttccccagcattcatcggaatctctaaggtcaagcagcaccgactggtgaatgagattctgaaggaggagatcgccggtatccacggtctcacggttagtattggctttcttccactgctctctactcgctcgttccgttccgttcgctcatgcttctctctatctctctacagttgtcgacaaaaccgtgcgatcctgtatccaagtaacagatttaataagaccgtcaatcctattatttcttcataataaaaattgtatataatgtttcctatatcgtaagcacagtcggcctgcctgctctttcaacactttatgagtacgctccgcctttggcatgtccgaacctggatcccaaaccctgagcgtccaggatcttggccgtccggtccttgtcgtccatcagctttccaccgacggacatgtgtagatcccgatcccagatcggaggaggaccaccgtccttgcctttctttttcgcgtcctcgacggatttgccgtggatatcaagcagagaactacctcggtgttttttctttttgcaagattaattcgtatccggttgtaaagaaaacaaggtcggtcacacgacagaacgcaagaacagaagagtgaacaaatctctgggcacatacgttgtggtagtcgatctcggcctgaagctccgcgtcccgaatctttcgtcttctgatctcgtcagcctcttcgtcgttcggcactcgcacagagttttccgctcgcttcctctttcctgatacctcatccgccagtcgttgtttacgctgtttgtgatcaaatggatcgcagttgtatctagtcagagagagggactcggagcgcaacattagagactttagagaatcttgttctgctcacttcggcaggagtctcggtccagagactttgatcttccttcttgataggagcagcagacgtccgactgaacgccgtttgtcctctcggtattttggttggatccagatctggttggaacgggaaagtaaaccgtgcgatgtatatcagagtccatcaatagggttgatccatcgttcatccactggtatggtcatctgtagaatggatatggagagcagacatagagggacaaactcgataggaaatcactggcctcgggaggtttcaacatccattcctcccgtttcatttcttttggcttggccgcttcctgcagatatcaattagatacatatgttaagctattgttcttacaagaaagggatgaaaaaaaagaagaaaaaaaaaggaggaagaagaagaagaagtaggagagttacaagaaaaagaaagacaaacctctctctgttcagcccaccttcgttgtctctcctcgaagtctcttaacgcagatgatccatcatcttgtgctccctctggaacaggaaccggaccgacgagatcatcgtcgctatcgtcatcatatccgtagctctgagctgacgtggagggaggcgaaggagcctgatagtttgacggaggaagcgtcggaccgactctcggttgaggcttggagactgaaggtcctgcttgacgtcgcgcttgaaggtgaggaggtaaagctggaccgatcgagccgctctcctcgtcgtcgtcgtcgccagaatcttctttgttggatccaggctgtacaggttgctgtgttcgagctagcgaaggcggaagagagggtccaatagaagaggaggcggatgaggaaacagccggacgagaagggagtgacggtccgtaagcatcgtcttcgtcttcctcgtcgtcgggtgagtccggtcgaggtagttggagatgtggagggagagaaggtccgataggcatattgataatcaaacgctacaacagccagcgtttacactaaagcctgatagatcaagggaggcagcagagacaagaacgaaggtagatggtatgattgatggtgaggacgaggacgatgatgatgatggtcaaaagttgaaagaacagaaacgggattctcattatttgatcgatcaaccttcatcatctaacatcaactcgctgtccttcttcttctctcctcatcctgttcgttgaagtctatcccatacattctggtagaccatgtcgtccaaacaagaatatctcgcttcaaagtatgtccaagttgtcttctgcttcttcttaaggcttttccgataatgccaccatcactgatctgttcgttctctttacgcctttactcgaccaacccgtcggatgatcaacgaaccaaatggaatagatacatgtctggtcctaaagcagatgcaatcctcgctcgatcagaagacaaaaagctcaagaaaaagaagcgaaagcgagcggatgagccaaatggaggaggggacacgtcgttgagaagtgggaacttgatgattgaggatgaagacggtccggctggctgggcgccggtagctggtgatcatccatccgatgatgaacgccccagtaagtctcgtcttcttctcgcctttctttctgtgtttctctcttggtctttgcaagaaagaacagagtgatgactacaacgacggaaagaaggcgaagcgacttggaactgactttggaacgaaaacaatctatatctgttgcgttctcctgattctaaacgaacacattgtacgttctgaaaagccgtccagacatctacgagcaacttcaagtcagcaaaccgatcgggttggacagcagtccgaaccggcgaaaccccttcgccgccatcccctccacctcaagatattccggctgatgaacaacccgtggtgttagctgataccgaatctgttccctctgctcctgcccctcgacgaggaggactgatgacggctgcagagatgcgagccgaagaagcagaggtagaagcggccaagcaggccgctcaacaggccgccgaggccagacagaccgaagaggacagagaggcggagagacgatcgagagagacggtctatcgagattcgacaggacaaaagattgatctaaagaaggaaaaggcagaagaacggagaagggcaaaggagagagaggagaaggaggcggcaaagatggaatggggaaaaggaattgtccaacggggcgagaaagaggagagagcgagaagggagcaggaagaaaagagtagagacctcgctaggtgagggcatatccttcatctttttctttgctattctgactattctgactatggaggacatcccatgttgaccaaaccctcctggcttgatcgtgtaaagatatgcaaacgatgcgtcccttaatgctgagcagaaagagactgccagatggaatgatccagccgctaatttcctcacggttcgtccgctccctctccttctccttctcctctttgttccctcgtctgtctcgcttgggagggctgtctctaatcgagcttcgtccgccttttgtttcttcttgatacagaacaaacgatcgacaggcaagacatatccgaaatgtaaattcgcaggaacgcctaatcgatttgggattcctccaggttaccgatgggatggtgtcggttcgtgcacctttcctttgtctcttctctcttgccatgtctcgtactctcgaactcactttctctcctgtccaacggatgatacaatctggattggtagaccgaggcacagggtttgaaacaaaatacttccaagcacaaaactcgaagaaacgaagagagacggaagcgtacgcttggtcggttgatgatatgtaatctctcgccccggtcttatctctggaagaacgattgacgtgaaggatctcgggagaactaaacgaacgccctattaccaaatccagagacaactcataagatagggaagacacaacgacaaaaagactcggagataaacctacagaaaggtgcctatcagagaaaggaagagagaaagaaagagcgagaggaagaaagagagaagagagggtgaggcctcaaagccacagaagatgtatacaactttctgtttcaaagctactttattgattgtatcctaaattttttgttactataacagactactcattcgatatgtaagtttcgtaaaggattcatcatcataagaggaggagttacctttgattcccatgttatcctctctctcagcccgaaccaaccgaaaatacccagactaaaaaaattgaaagaagaagaacgatataaaagaagaggaaagatggatcattcaagcattctagaatcgtcggttgttgttgttgttgttgttgttgttattgttgttgttgaagaactaagaagcatcaagaatagattgggataaaattgtcagttcaagacaaacaaattggacggatcgctcgcgaggagtaagaatgaacggaatacaaaccgtgtttcgaccaagagctttgtcctgcttagcctctgcgaaaagaaagggcaaggatagaagaagaagaagaagagggagaggccagaggtcagcaggagataaagaacgagaaagacgagcataggtatacgcactctcttcgagtcgcctgaggacactggaagcctcctcgaaatcggagcaaccgtctggggataacaaggaaggatagagggttaactaagccagccatttgatacgaaacaagaaaagggcaagagcaagagacatacggaggaatccaggctcgtggaaagctcggtccatgttctcgctcaagatttccttgctagagggaaaaaatttaaagtgagggtgaagatgaaggtgaagacgaaggtgggagaggagaggttaattctgaaaggtcatctgcaagcagaaaggagaaccaaaggacgaacaactcgggagcctcccaagccttgttaataaggtatcctcgaacggtggagatcgcgtaggactttccaagactaaaataataacgcaagacaagaagaaaaaagaagaagagaggttctgttagcgaccgtccatattttcccctctcaaattgtgaaaatatcgacgtcaagggctgatctgatgcttcttcagataggttgaccatcagcctcgggaagcggagaggaaaataaaaagacaaggatgaaaacaccggcatgtgcccttccacatcctttcagagtgaaccagaaaaggagctacaatctaccgacaaagacaacacatatacaaacacaccaacacacacacacacaca

SEQ ID NO: 1750 - DNA, 26001 bp, Xanthophyllomyces dendrorhous
acacacacacacacacacacacacaccaatacagaaccgacagaaaacacacacgaaagaaacactcactcaagcttctcggtgatctccccgggaaggataccactcgagaacatctcggctgccttctcgattcggttaagcctatcaagcttggcctgggcaaacttggggtccacagacccggaccgtcgctcctgaccggcaaatcggacgagaacgggagcggcctgaacgggagctctgactctgagagcgggaaggagagagctgagagaaagcatgatggatggatagatgttctatacaatgctggtggttgttagatcgacggtggggatttctacacggcaagagacgagacccgtgttgtccgtagcaggaggtgtaaccaaatgtaaccaacgcctgccaggtgtcaggaatacgggttaagtatcacgtgttctcttacgtgggttacccctacaggctattcgttccctccatcccttatgcctcttcgcccattttccatcatgctctagtttgcatggttcatgcttcatctttttagttctcgtgatctcgagcctctctaggctcgtcatatgtatatctttagtggcagaccaaatgcgcgaggggtcctgatataaaacggggacgccctcgcgccttcttggataagagttttcctcaagctgagattcttgttgaaacctcttatccaaagtatattgttaatagtttggtctgcttcagatatattaatcgccagagcctaagtgtcaccccgcgaaccaagtgattacacttggttaccttcttaacaaccgagccttacaccaggttcgcccttggttacggccatcgctcaacgcccatcggctggcctggctcgctccgttgggtgtgatgagccaccaaccatcagacatcagccgtcggattctcactctctcactctgtatacatcacaaatggtcgcgttctcactcgcagcagctgcttctaggtcggtcggtccggccaggaagacgttcggtcaggctcacaggtcaatcgcccagtcgatcgctagaaagagcgaccatctcttcgtcgtacgtcctatttttttttccttgttcctctgccttctttttccttccttctttcctttatttctctcgttctcttctacgggtagacagcggtcgttctgtctgctgatcttgaactgcttaatcgtatattctaaatgtagcatcgagataccgactacaacaatgcctcggtacgttccgattcccgtctggagccccctctctccgcgatcaccgttctgaccaatacgcagcgtttcgttttgattgaccatccttctcctttctgttcggacaatcttacatccagatcccatttgaattctctgccgagaaccagaagacggtcaaagagatcatcgctcgttaccctccgcaatacaaaaagtttgtttgcgcttcttctcttctcgttttcccatcgtctactgacacttggcttgtttcttcgaccaatcaacaatcgacaggggagcatgtattcctttgctcgatctcggacagaggcagaacggaggatggactagtctaagcgtgatgaatcgtaggccgccttgctcatctttgtccgggttccttcttcttttgactgaagatctttcctttcttctgcttccaattggacagacgtcgccgagcttttggagcttagacctatgcgagtatacgaggtcgccacgttctataccatgttcaaccggttcgtccgttcatttttccttgagtccctacctcgactgacttctctcactccttttggtttcttcgaaaataaaaacgaaaaaaaagatctccgatcggcaagaactttgtccagttgtgcacgactactccatgcatgctcggtggttgcggctcaacctccatcctcgagaccatccaaggtcacctcaagatccagcccggccagactactccggatggaaagtttacactcgtcgaggtcgaatgtctcggtgcttgttcgaacgcgccaatgatggccgtcggcgatgacttttacgtacggccctctcttctcgttacctcttccgcattcaccatcatctcagacttcaagcagaaactgaccaggtagtccttctttcgtcttcttcttcttcttctttaccacgaaaacaggaggacctaaccccagagacaaccatcaaggtcttggaatcgttcgcaaacggccagactcctgcgcctgggcctcaatctggtaggaagcagagtgagaactcggccggactgaccgcgttgacggagaaggtacgtctggctctctccctcaatcccgtcccacccgggtgatgactgatcttcgattatcgtcatctgctgaacagccttacggacccggtcaacattgtcaacccgagttcgcataaacctacccattatcttcttgcctcctcctcctcctcctcctttttccttgttctctttgttttatcatttgtaagacctgatcttttatcggcttcctccctcccccgttgtactttccttcttattctattttcatgttttattttcatgttgtcttcttactttaactttccttttcgctttcctcttcttgccacattgtttctgttgccctctatccttttcttaatcttcttacgcaatgataatagggaaaacatcatcgttcgatatcgaaaacagaccaggctattcctaaatcagagtgacaagaaaggtcaagagggggtggtccaaggaagaagggtgtataaggtttacataaatatatctaggtcgataagtgggtatatagattttgatggattagacagctcttagctatctttgaaagagaattcagaaaacagaggaaattgctggcctacacgatagagcagaacaaaaaagtcaatcgggaaacctctttttctcaaagataatagtcgtaagacacatacaaattagcagccgcagtccttgctcttgggctcggcaagctacaatgaacagatcaagctccgggacgatcagcttctaagcgcaaaaaacaagcaagagcaggtggacgtacttggaagaatccagagctgttcaacaaagtcttgacgtccacagagacgtcagcctgagcattgaggttggcatcaacattggcattgatgtcagcatcaacatcagcgtcgacatcagcggagaggccaaggttgacgtcagcgttggcttgaagagcaacgaagatggtggcggatacgtcgaggacgccggcggcggtagtaccagtgggaacagcagtggaagcgacatcacaagcggaagaaggagtggcgacagcggctttggtggcaggagcggcaggagcggctgggacaaggtatccgcactgaagtaggcggtgggaagaaacaccatcagcgatgaagagcgtgcatcacagagtcagaatttggaacaaacttttcctttgttttgagtgttgtctcctgtgggaaggatcgcagcgttaacattggcatgggcgaagagatccaaagagcctgaaatgtcaagctgagcacgagagaaaatagaagatcagattggattgattcgaaatagagcaaaggatgagactacatacgtgagcgtatcctaggccctgcaaataggtctggacctgagcctggtcgtcgacccaagctcccgtatccacatcctttgaaaataacggaacgaatgttagagaaatagaaggccattacccatatgttgcataaaagaaaacacaactcacaaagtaaccaaagttgtactgagcaggaggagcccattgcttgtcggggcactggtaggctaacgtattatctggagtcttaaacaacccatcgacggacaattgagcctttatgttggcagagatgtcatcgctgtcgagaacattcttcaagacatcttcaagcccatcaagaccatcaagacctcgagccgaagcacgacttcgtcgaacataggtcatgcctcctccgtgggactacccggtgtataacgatagaagtcagttgacatagctcaattctgtaccctctatacaggcaagcatgaactcactcctccgtatccacctccagaaacgtgaactcgatgatcatcgtcgacattgacggaacccccaccataggcggaccctcctccagccgcaccctgtgaattcataaccgataaaaggcacacatgagctaggttccgtatgggtctaagatgacagtcactcacagagtaggaagaaggagcccggacgtgaacaccagcgccgacctaaatgggggaaagaagagaagagaacaaccagacaaggggtcaatgcctatgtaagtgtctattccagagcactcaactcactttagcgccgagaccagcaccaccaacagcggcaccagccttgagaccaatcttcgaagagaaaaaaaaagttgtcgtaacaacaacacatcgttaaagaaaagggtcttcaccagaacatgttgaaagaacacacttacgacggcagcagaagcctgggaagcagaaacaagggcggcgagacccaaaacgatgacgggagtagagatcatgttgtttagttaaaatgtaaaggtaatcaaagaagacggaggggattctctaaggctgatgagcggaagtaggagaagaagaggatgaggaagatgaggagaggaagaagaagaagaacaaaccaacaaacaaaagaccaacctttatacattctcaaccagctgaaagtgaagcaaagagaacgaagaatgtcacaaaagaacaggcacacccacacaccaaacaaagggtcaggtcaggcacagggaacttccgggatcggacggtcaacataacagcgccctccatcgatcgagagtcagtcttcgttcagcagggcatggctgttgattgttctcgatctattcaggacgtacatccagatcagcctgggcagtgatagcttctccgatcatccagggcgtcagtgagaagatcatcggatgcaccaaggactgtcaggttgggaacagacggacagaacacacaagtcatctacattcaagtcccctttgctacagtgaacccaggaggaatacgcaaacaagagaaaccctagaagtatagacgagatggacaaaaatattcgagggtaggattcaaaggagatcaagggaaaatagaagagaaggagaacgttggcagacggaacataaaccggtttacatagcgtacctgttttgagagagaacaagccacaaataaaagttgagcgactatatttcaacaaacctgaggcacagatacgtacttcctggtccactctcgagcagtagcctcgtaacgagcccgatcggtcttgtacgtatgagcaatcctatttttaagaaaggacaaaagtgtgttagatttgaagaaaggagcaggtgtcaactctcagattgaaggatagcgtactcgggaaccaaaggatcatcagggttggggtccgtcaacatggagcaaatcgaaagcaacactgcatacgaggacgaacatacacgcaaacacacacaaatgattcagacttttatagatgaagcgttgcaaagaactgaaaattgaacaaacctttcgagatggtcaaagcgggactccattgatctcgaagaatatcgagacagatggatccgttggagttgatgttcgggtggctgagaaacaaataagcaaggtaagtgaagtacctatatgcagaaggcttctaagataaatttgaacatactaaatcttagtggtgaaagccaccttggggggcttgaaagggtaatctatagacacaaaggccaaaccaaccaatgaagttgaacatcatcccaaccaagagcgatacttgaggtaagaacaagagtggctgaccagtagggaaggataattggctgtaacaaaggtcatgttcgttaagtttgatctagaggattactaaagtacacatgccacttacaggaagaagacaccaccggcgtagggggagtcaccctaagaacacagcgggatagaacgatggagtgtcaggtttgaaaacaccatcgggacaatcaacaagtaccatgtttccatactaatctctacaaaacgttgaatacattacttacagggcccatgatagtggcctgccacgagaacatgttatctccggtaggtccagcagagcacgacgagggtggatctcgtccgagatcaattaattcctaagaggttgaagaggcatcgagaggaagagagaaacatgataagcatttgcaagcgacagcctgaaacgaacaacagaaggcgaagcgtccgaaggataaggggaaagaagagatgggggtttgagcctccagtccaatgtacaccgacacagcctatcatactccgtcgggaacacctagtctacagttcttgatctctttcaagaatcgtctcggtctttctggagcagttggttttgatacagcagcagaaggaaacgcaaaagataggatacaaagcatgtctaaaaagacgtcccccaatgaaacaaacaatttctactctacaggcgtcacacatcagaaatccgagctcaccttgttaattcgcttgagagccatgtctgcaaatctacaagcggaagataaaattcgagaataacaagaacgataccgttacggacacaaggcaagtggcgaaagagtgatggaaaagaattatcgattccgggtcaggcgagcaggcaaagttcgacggatggagagaaaaatcccggtggggtgaaaatagtgagaacaaatggcaggtaagaattttcttccatgcggtcagtcaaacctagcatacaaagatgtatataacgaagtccaaactggaagagaagggactgaaggcgtacctgtacgatgtgaagtagtggtggttaggaggaaagccttcgtcagctaagagttttgcttgtgcttgagtctactttagcttcgcttagtcagctgggtttctactcgattctctgcccttctttttgtctcctcacttcgttctttgttacaataattcaaagctaatactagttcaggtagttgggttctctcagaacttcattacatttgtgaaaatacagatatgcctctgattttgtatagcgatcaccaatagatatccttataatttactctaccttgttggcttgctgtaacttctcagctttctcagcctcattgagcgcaaactcgaaccactgcttgagcacctcagtctcctccatacctacactgattcggatcaagtttctctccactccgaagctctctgcccagtccaattctagatagtgagccaagataacatatggggacgctaaagtgaagtttgttcccagactagggccttttgcgcaaggcagcgaattaaagaatgcctttgctgcaacatcactagtaagcgtcaccgagaagagaccaccgaaccgaccggtctggtcaacatcggtaggcaggattggtcgtcgacattgagagtactccgtagcggatgaccatttgggatagtagacatccttgatgaccgagctcggaggatgagacggatcgaccagggaccgtgaacggaggagatcacaaagaatctcagtgttggcgttaatgaggtggattctggatcggaagtctcgggagtttcgttccatgaaaatagcatcttcacccaagtaggtatcttcatagttggcgtcaaggacagctcgtaagtccgtgtaatgcttggactgggagttgagtaccaaactgatacacgaagttgcagaaaatgagccgttgtcacataaccgctcatgcaaaagatttgaaagatgcaaagaatgagagaacttggagagaagagacaaaccttccacccatgacgttgacatcaccactgaatatcttggtcagactactgacaacgatatccgcccactccaatacctccacattcacaaagtttccgatagtctcatcgacaacgatgtaaaatccatactcatcggccaactttcgaatggctcgaagatcgggtgatcggagaagagggttaccaggaaattcgcagaagagtgcttgaatcggtcgaggattctcgggcgttcgagactcagccaaaagagttgccaaggattctatatcctcagatgaaccttttccgaagaaatggcttccaggcccgaacttctggagcaccttgagagtgtctgtgtaggggaagcttcaagtgtagaaaaacaaacaaacaaacaaacaaacaaacagatgaacgattaacacccaggaatgcatagatatgtgagacgacttcaacgacgaacccaaagcagacactttttttttcgtcgccaggcctcgtcctcatagatgtcaaatgagcattataaatggcgctcattccggtggaaaacaaccagacatcatcctccgagacttttctaccctccacctcctctcccttaaagccacctgcgatccttcgtctcagcgcttgtttggcaagcgcagccgacgcaagaggtaggtttcgtccgtatcgttgctcgacgtacaccgaatggtcagcagtcagatcctcatgggcagtgaccagggatgacgatgaagataccccggtggttggaagtgtgggagtagaggcacctcctctagaatagtgtctgtttcgagagtaggaaattggccggacaggagcttgctgcgtagagttgagcgcggcaggaactggaagagtcattttgagttgatcccccgaaccaccgttcacgagtttgacctcgcttaccggcgctgtgttctctcctagcgagatcagacacctttctgcccgcctggagctaattccctctccggtgtgttgccagaaagacttcgcaagtgggaaaatggcttcagggaagagaataatctgaagttcaatacaactactgtcttccgacgtagctgaggtgagatcggctgggttgctccctcggctttggtcctgagcgcagatgacaaaatcgacgattcgagtagcgatcggctcgggagagtgttgacagaggaaggagcggcattgctgagcaatgctaggatgaggaagaagaagacagagctcattgggctgaccgaacttcttcaggcagattgaggcaagctgatgtgatcccaaacattcggtgtcagctctttagtgcagaagatgccatccacttgagaagaaagacattggctgaccttttgaatgctcttgtgaatgaagaatctagggtatccggtttgcatcgcttctttgatccacggctcaccctcctcgtacgcaacgttatcctcccacgtcggaagcgagaccgaaacagcatgaggcaggtcgcgcgggatgggacacccaaccggaatctgactcttttgagcagtgatataagacatatgaagcaatatcgtgtactttttatgcgagtgaaacagcagtagattgtattatgtatgttgaggaaaaaagagaggactgaataaatgattatggggtgtaaagatgatggcgactttccctgatgtcggttattcgaaatagatgattatcttgttcgccacaatcatcattccatgtcgtcacgtgaatcaaagctatgccgcacggctgcgtaaccacgatcggcagacacggcatccagctcgacggagaatgagcgagcttcacgttctattcaatcccaccacctattgtttcatcatctattctcttcttcccaccttcatcaccatcaaacatgtctgccggtctcatcaatctcgctagcaggctcgccggtaagtttttgtgctaggttttgcaaaataaagaacctataagggaagcaattgatatgtgacctgatttattcatccttcttcctccactatttcttcctttttcttctttctctattctgatcgaaatctctagttcctgccatctttggagctgccatcgtccagtcctcaatttacgatgtgcctggaggctacagagccgtcatgttcgacagattctcgggagtcaagaatgaggtgcgtcgaccttcttcttttgcagatgcgatcatacatggttgcgatcatcagcgtcacgtgaggctgatgggagatcgagagggcgaaggggaacgcatcgacaaccacatgtctctatatttgcttactttatcaattaccttttgttctatgcgacaggccactggagaggggactcacttcatgattccttggttacagcgagctatcttgtatgatgttcgaatcaagccccgagttcgtgacgctgccgttgatctaactgttatgtgtacacatgctgaatctatcaataccttttatccagaacatcaacacgactactgggtccaagggtaagacatctgctccgctcctttctgattgactccaatgtatccatagagctgaccgatctcctccctcaagacttgcaaatggtgtctataacacttcgaattctctcccgacctgatgtcgatcatcttcccaaaatctaccaaaacctcggacaggattatgatgagcgtgtgcttccttccattgggaatgaggttctcaaggccattgttgctcagcataatgctgccgagcttatcgaagagagggagcttgtgagtggttatctatttatttattttggatgcagtaccagtacaaccggcatgtgagctgatgctctataaaccttcatacaggtctctgctcgaatccgagccgatctactgaagagagcggctgagttcaacatcaagctagaggatgtttccatcgtgagtgcttttgtctctgtagtttgactgcagccttgctttctctatcagagtaccactgagcaatacttcataatcctcctcagacccacatgaccttcggtaaagaattcactactgccgtcgagcaaaagcagattgctcagcaagatgctgagcgtgcaaagttcattgttgagatggtacgtacaacactggccgtttcttctttctttgtcttgtagacaacttatcaattactcgccttactctctctataaactatctttaaggccgagcacgagcgacaggccggtgttattcgagccgaaggagaggccgaggctgcgaccaccatcggtcgatctctcgataaggccggagcggctttcgtcaaccttcgacgaatcgaaaccgccagggaagttgccactacacttgcttcttctaggaacgtgacctaccttccttcgagtaatggcaacatgttgctgaatgtaaacgctcagtaaacggctttgcctggacggagcgagtgaacggaataacttcagaaaaatcttgttgcatgtataatcaatgaatcatacctatctagtctcatcacagctctaccctcagcacacatatataaaccaagctctctatgagatatcttccaatggacagactgattgcgtttgatcaaccttgccgagcatcatagaaagtggggtgtgtggttatgtaaccggactgtaacctttttttacccagcagaaaaagttccagcagactttcccttcgctcgtccaactccccgccacgacttcttccgatacccacccatcttccatctttgcctctcaaccagactcatccaagtctttctctctttctctcttctcttctctctctctctcttctctttctctctctcctctctctttctctatctcctttctcttctctctatctccgttcttttcatccacctttcttgtctgcttttgtccagcgaaaaagcactcgacctatctcttctttcgcaaggtgagttttgcatcctgatcccattcctcaggttcaacatccgtcgtataacctatccggatcatgacggatccgactgaaactgattttgaaatctgtttcttcatgactctgttgttttcatcctgtcttgttcgaaatcttacctcttgtggtatttttttccttgccgtttgctggatctctcaaaccgaccgcgattttcttgtctgctgccatatcaatatcaatcgctatctcctttgttacctggctcatggatcctgatggtattcctttaatcgacacccagcagtcacccttttccttgatatctttcccaccctttcggatcgatttctgccttcacaatggacgcccagcagcagcaacagccccagcccgctttcgacgccaacgcccctgctaacgtcgagggagaggctcccgtacgttcaccttacccttttgtattatcatatgagcaacccgttctttggtgtttcacaattgactcgaatcacaccttcgcttcaaaaactcgaccgtctaccttggggcgtttttttctttgtacacacagcggtaagctttttcttttttgttcgccgcgtatattcctctcgcttcttttttccccttggaccaatctgtcagtttgaaagcttacattaagcaaacctctgcactgtttcctttgtcagacgagctcatctctacgtcggaaacctttcccctcgagttactggtgagtacgcctcattgtaattgcgtttaatatgctcaggatgtggaaaggatgctgatgtgcgttactttttcttgctcttccagagtacatgcttaccgagattttcgccgtcgctggacctgtccagaatgtcaagatcatccctgacagaaactaccagcacggtggtctcaactacggtttcgttgagtagtgagtgttcacgcgattctttttttatatttcattgttatcatcatcacagtcgatgacaggtgttgaccctgatctcatctcatcaaagcatggatatgcgagccgctgagactgctctccagaccctcaacggccgaaagatcttcgacactgagatcaaagtcaactgggcttaccagggacagcagaacaaggaggtcagtgctcctgaacgccttgggccgtttggattcaagctgaacgcatatatcgtatgtctcttctcttttgccacaatgtaggatactcagggccacttccacgtctttgttggagatctttcccctgaggtcaacgacgagatcctcaacaaggccttcggtgctttcggaaccctctctgacgctcgagtcatgtgggatatgagctccggtaagtttatcgttgtgtcgtgcctattcattaagagtgagacactgacgttatctgccgtccatacaggcaagagccgaggttacggtttccttgctttccgagacaagaccgatgccgaacaggctatcgccaccatgaacggagagtggctcggatcccgagctattcgagtcaactgggccaaccaggtttgtcctctgtcaatgattatgtcatcgacattgggcccttgtcgctgaactcgacaatgatttcgactttcttgggcacagaaaactcagaccggaggtcaggctggagccggcgggcagaaccagcagccccgaatgggtggtgctggaggtgctcccgcccccatcaacttccagggtggacccctcagctacgaggttgtagttggacagacccccgctttcaacaccaccgtctacgttggaaacttgattccatacaccacccaagccgatcttatccctctcttccaggttcgtttccttcgagcttggctgattgtttgtttcgacgcataggatgatactgatattctagccgatgattttgacttcagggctacggttacattgttgagatcaggatgcaggctgatcgaggattcgctttcgtcaagcttgactctcacgagaatgctgccatggctatcgttcagctccagggccagcttgttcacggccgacccgtcaagtgtagctggggtaaggacaggtgagcattcgcttcatactttaatctgagcatgtgtatgtcatgacattaacaacgccttggttcgtaggatgcccggtgagggaggagctcagcccggagctggtgctatgggtggacagcccggaggaggtattcctcagtacggcatgcagcctccccagatgtacggcatgcctcccaacgcctatggacagtatcccttcgctggctaccccgcttacggacagcagcccggagctcccgctgcgggagctatccccggacagggtgagcaggctcaggaccctgccactcttgccgctcagcaggcttactaccaacaggctctggctgctcagtccatgcaggcccccgctgctgccggaggagcacagtccggttggggagatttctacaaccaggccggtgctgctccccagaactagattagtggtttgttagggtatgatgcgtagatcctcttctttgcttgagagggtcaaccctacgtctcgtttcaatattctccaatttctttaatctatcgtttctgtttgactcttactatgttcctgttttctctcgatcttccctcgttctcgtttttttggggtcctggcatgttctttttctccttcccctctactgatctggttttccggctcccctgcatcctatgggttgatctaaatttctttttgctcagtttctttttatctcttctcacaatctataaaaccattttgattgttcattcctctgtgcctcatcttgtgtggactgaccattgtacatctagcaagcaaaagtgatgaagtatttctctatcagctgaattacattgtcgagatcagcagacgtcatcatgacatacagccagttcagttcagcccattgagcgtctcttatcttcacccaatcttcctttctatcttatatccctccgctctgttcagcatagttccttctctcgctcattcataccactagagaaccgaaataaacatgacatcttccttgaacggcagctgcttctgccaacagactcggtacacactccatccgacgtcgcttaccgatgggtcaacaaacttgacgatgtctgcctattgccattgcacaggctgccaacgaatgaatggaacgccgttcgtacataccactcactggaaagaacaagcgatctcgttcgaaggagccgagcctgcaaggtatgaacagaaggaaggaaagttcaagctgagatgcgagaagtgtgggagtccgataggtacatggtcgtccaagacagatgagtgagtcattcaatggtataatctcggtacttacgaactccttctttttgctcatgcgcactgtctatgactccgcgcaactttagatattccatttggccgtccaccctcaaccgagatcgctctgggaagcctatcggcctggatctcatgaaacccactggccatatcttctacgatacacgcgtgatcgatatagatgatggtctgcctaagtgggatgagtacgagatcaaagcggaaggcaagctcgagaaatgaacctgtgatgagctttgagggcagttactgaaagaaaaggggagaggacgaagctttctcatttgtggaatgttgatagatgctatgtgacattgatgatgttatgtgacattaatgatgatgttcattctgtcggttcttcaggacatgtatcgtcgttagcgtcattgaagttggacgcagagagactggacacgttcgtttacttcaaagtgcagactcttaagaatcttggtttcactaaaatgatacatcttgttccaagagcatgtatttgggcttctgtactctgcccatcttgtcggatcgatggatggtagagaggagcgaaatctggagcgacgactaggtcgaaagaaaataagaggagcagtgaccacatatcacgaactaccaactctcaccctctctacacgatcaataccgatacacatatggctctcgaaatagaatcaagcactctggctagaaactctctcaagcttatcaaagactatcagggttcgtgaccaatcatccgacgaacacagtggtgcaaatcaagggatgatgtcaggggcgaagagctgatcgtattcacactcttccgacaagaagacatgaatggaacttcttatgagactctatctgcacctcccacgcctcttcagtttagcaaaattgtccaacttgggcggccggtcgtcatcaaaggtgagaggacgatagacgcttttctagattgcgtttctgacgccggactggatcatcgacagggtacggtcggtcgatccctgcttttggaaaatggtcggcctcttacctctcagacaccatgggcgagcaattgatcagcgtggccgtaactcctgatgggtaagttatctcgactaccctgccagtcttcggttccggaagacttagctcaataattgtctgttagaaacgcagatgctttgtatgaccatccgcctgaggatcttgaacattcaaccgcctactttgttgagcctcacgcggagaaaatgactatgcagtctttcctgaacaaactgagtgagctcgacaatatccgtatccctcaaaagtatcctcagacctcaatagtattgatcccccctcttccttctgcaatcttctgttgactcagcatcgccctcgaataccacggagattgtctatctgcaatcgcagaacggaaatctttataacccttacagcgaggacacggagtacgccgctttacttgatgatgtccctcaggatgttccatgggcaaacgaggccttgggttagttgcttagcccatcgtatcttctatttgtctcatcacacggttggctgtacatcatgctgaaggaggtatcctgtattcacttttgacgaaggtcaagagcatccggatgcaacaaacatctggatcggcacctccgcaagcgctacttctttgcacaaagacccttacgagaatatctatgccgtcatcagaggctcgaaaacatttacagtcttgcctccgactgaaggattgttagtaggaagtaggtcgatcttacaactaaaactgttccggatcgtcatatcttattgactggattttactctgacgaatttgtagccaaactatatccgcacgccaagtggcatcggtctagcgagtcttcctccctgtctcttttgccttcgtcaccagttcaagatgacaaacaaaccggtcaaattccgtgggcgtcggtgaatccgactcttcctccttcgacggcgcctactccgttattcagacatgcccgtcctatgtctatcaatgtcgatgaaggggacgcactctatcttccctcgggctggtggcactatgtcacccagaccgagggcgacgaaggattctgtgcagcggtgaattggtggtttgactctgatttcactggcgaaagatgggtgatgagaacgtttctagaacgagccggaagagaactaaattggatcgaggacggagctgtggatagcgacgaggaggaggaggaggaggaagaggatgttgaagatatatgattttcctgtgaccgattctatctggttgtcttcttgctctagagagacatcgaacggcttgctgttctgccatgcctaagcgtacatagtccccaatatgaacacatcctgagtccagatcaaagctcgacattctaaccggccagacgttgctattcaaagatcagtctgtttgcttacataagccaacagcgtctgacgcaacgacttggcttgttcgcccacggtgtccctacctgattcgaatcctccatcatcaccattatcattatcgccacatatggcagaagtacgtgtagacctatggtatattagcctgttatctcttgtctgacgtgtgatgcttctgttgtcattgaaataggactactccttccttggagatctcgccctcgaggccgttctcgccgaagtcggagaaggagctgaagggttgagcaacgtcggactgggtggatcgaaacgagctctgggcaaagacgatatctacaacgacaactgggaagatgatgaggacaacttgggtgcgggaaagggaaaggattgggagaaggaaatcgatgaagagatgaaaacgtccgtatgctaccagacttcatgcttgtttccatgtatgttctctttgaacctaacagtttgggattctcttacacacatacagccaaccggatacctatgcctttccctctacttcttcgacagacaaatactaccttcagggtctagccatgctcaataaaactaattcgaacgccatctcaaccgcatccccttcggcctcgccatcctcttcggcggtatcgtcaccagcaccggcagcgacagccagtctgatggatgtaaagtcagaaccagtggaggtttccttgccgcctgtatcacctatcaaacctcctgtacgggtggagagaacgatcgaggagatgtttcctgatttcagaaagggagagactctaaactttgtcgatatgttctcaaatccaagtagattcgctaaaatccccaaaggaaagccgaagaagagatatcgggaacacagttcgtagtctcttcgagtattgtttctctctatgtttcgctaccatccgcgtcttgctcagctgtttctttgattttctagtcaagccgctctctcctcctagagtggggtttcccagtctgttggaatcaccgcctgcccctcgcgtcaagacattaagtagaatccttccaaagccacccaatctggatgctgaaaacgtctgggaagacacagaaggagttgaggacgatgagttgttagagaaggctcgagctgtgagtgtacctctctactcatgattttatcacagccaaactttgataatccatctgatacacagtatgtattctttgccagcgggtgcattcgtgcacagattggtattgggacattggggtgaatgatccccgaagctatgacatggtaaacatgatggaatgggaaacccaaatcatgtttgatagttccggaccgtgagtcacattctttccctcgcatcgcgtcctcaacattctgtgtggctaaccatgtctggttggctatgcgctagacctctcaacaagcgacgccggccggacacgcttacgcctttcaatcgggagttggatgaaggaagctgggctaatcttatcatgttcgatagcacaaaatcacctcggccagagttcttaagacctatagaagaagaggagagtgtggacggtcagtaggagattttgtctcttgattattcagttccgtctgactgaaattttatgttaaactgcctacaaaagcaacaaacgtcgtcaagaagccgtcctctccaaaacaggttgtctctgcacgactggcgccaacaaacctcgatccgtataatatctccaacgaccatcactatgagggtatgaagcatcgagttcgacagacatttgggtcgattattgtccagcactcttaccccgctctcaagctccaactaccctacgtaagactatctttaacgaattatgccagtactatcttttgatttacgtttgttcaacaaattgatctacacagtacaagacatgcatatcgaagaacgacgctcggtcttggcatcgtcctgctctgcagttcccatccaacataaaactgactttcgagccggtcaagagtgcaaaaacgtttaaagacaaggtcggcagaaagcttgggaagggtggagatatcgcagagggcttaagaaaacctggagacttgactctgaaggacacgagttctttcgtcctctgggagttttcggtatgtttctcttcgatgttcaatatggcttatatgattactggaacagccattcgattttatgttgcataggaggagcaccctcctatcatgtcaggtttcggaatgggtagtgtgcttgtcaattactatcgtaaaaccgatgataacgacgaatttgttcctagggttagttttgttgcctgactttatatcgatagaatttctaatttctcaactgctaaaccgtgccttgttgagactcaaagttggatttaggagaaccgtttgtgctggacccgaaggacgagccaccgtatagtacatttgcacccatcgagcacggtcaaacacaaccaacactctacaacaacctcatcaaagcacctttgtttcgtcataacgccgagcctacggatttccttgtcattcggtgagttcataccgggttctacaacggtttgtcgtgatccctgtctaacgtttcgagcgatctttccgtcctgatagaaacaccgttaaaggagaaccaaaatactacatccgagagatcaaaaacctcttcgttataggacagactatcccttccgttcagattcctggtccacatgctcgattggtttctggaacggccaagcatcgaactcaccaagtagctttccgactcctgcagaaggctaagggaaatcgaatgaagctctctcgtctgatgaagtacttcccggatacgcacgagcttcagatgagacagcgtttaaaggtgtgtacttgtcttgatatcaccagctgaaaaaaaaaaacttgatgctaactcccgttgtgttcttggtttcttgattctctgaaaaggatttcttggaattccatcgaaggggacctcatcaacaaagttggcgtctcaagactggtataaagttccccgatccgacagagctcatcaagatggttgctcctgaatccgtcatgatgattgaatcgatgcaagtcggtctccgtgtcctccaagatgcaggttatggcgtttcggaaaaagaagagaaggatgaggatgaggcaaagatggacaccgagcaaaagctggctccgtggattatgactaagacctacgttcactctcagagagacaaggcttgggttcagctatatggagagggagatccaacaggtcgaggagaaggttttagtttcatccgtgtctcgatgaaggacatattcttgcgagaaggagaaactgtagaggatagaaaaggtacgtgatacagtcttgcaaggaatcgttgaggactacatgatctgacatatatatatatatccttgtagccttcgttgcatcccttccaaaagggcaacaaaagcaaggtcatgtcgttcaagaacgagtcttccgagaagaagcaaaacggatctgggatcttcaacactcgtccctgagcaatcctattcctccggaactctcggatgacgaggctgacggtcaaggtcagaatcgacgccgtagtatttctagtaaacctccagctgtaggaaatcgggacgacgaaggctacccttacggtggttcatcaccagcacagtactccccgttcccaggtgcctctagaggaagatcgccctcggcgatgagtagagcttcctctgtcgaccgtgatgatgcaataagtgttggcagcaagggctatggggcaggaggaggagggaaagcattgaagatcaagaggctggttcgttcattctatctaaagtagtacaatcaatgtttctggcattcgctgatacacagagttctttggttcttcttcctccctttcaatcttttatagattaaaggagagtggaagactgagatcgtgcgagacatcaacgtcatcaacgcctatgttcggaagcgacagcttatcgaggagaaggagaccgctgcagaagccgtcatgccgacaggtgatgtggagagagataagagaatgaagcgattgtgagtgtttcaacaagaccccactttgtttctgagctgttcttattccttctgacgctcttttttcgacacctccgatccagtattcaagacgagttggacaagctcaagaagaaccagactcgacgaatcaatcgaaagaaggctttggccggagacgagaacggaaataccaagcaaacaacctcagttcgccgatttcttctttcgtattcgatttcacctttttgcatattgttgaccatgttgtggcggttgtctggtgatctctctaacagagaaaatgtgccaactgtggtgtcatcggacatatgagtatgttttctcctttccttcttccttctttaaagaagaatgagatttaagctgtcatctctccggttatcaatctgaccactcttcttgttccaaacttcgtcttttagaaaccaaccgaaagtgtcctcgatgggcagagttcaaccaaactcaagaagccgaaccccagagctcgttatccgcgtctggcctaccactcggtatctcttctgctgttgatcatctgcctagctccttgtcagtcaacgtccctttctcctttttctttctgtctcgtgtattataacggagatacatcagtgctgactagtttcttttgtctcttttcttctcttttctttgcttcttacagctttgcgatccctgaagctgagctcccgaaattgaaactcaatctgggaaaaaagaaatagcctccgatatcctgggcatctatctttttgcgtcttttcctttccattctgcctactcggacgtgcgtaagaagaacaagaaacagggtcggagcagagagacaggatgggaaggactaagggggagaaatagtatctcgatatatgtacatacgtcaacgaagagaaagaggtcctgatggatgtatttctcttgtcacttacactctctttctttcttttcttacatcactcgaggtgattgtttctgtttgctccattctccaggagaacaaagtaaggggggggggaggatgtgacagaaacttgaattgtaacatagtgcatagatagaacattcagagggacccatctcgtaagcttacgagctcctcaacgagcttggtcgaggacatactctgaaagcatcctcaagaaaggcgtgcatgaggaggagtagagaaagaagagtgaaacgtgcagggatgtagagaaaggccttaactaacacggccgacagagaccgtgtctgtccaacttttccttgtttcgaaccaatcaaaagatagatgggctcatctagtagagtttatgatgttcaaagcttgtcgcagaaggcaatctatcgtccctcttgcgctttcgtcgattttggctagagatgttcacactatggagccaaaaaagacgatgtcgtcgtgtttgctattgttgctaacattgtttaaggagatagaaacattcataaaagacaactctgacacctcgaaacacattcgacaactcttctcttaagcagccaactccttagcctgggcagcagccttggccttgacatcagcgatgtcaccaaccatgtagaaagcagactcagggaggtggtcgcaggctccggaaagaagctccttaaaggactccaaagtagtcttcaagggaacaagctttccctcgataccagtgaagacctgagcgacagcgaaaggctgcgacatgaatcgctggatctttcgggctcgctcgacggtcaacttgtcctcctcagacaactcatccataccaagaatggcaatgatatcctggagggacttgtagtcctggaggatcttctgggtcttggtggcgatgtcgtagtgctcctgtccgacaattcgggggtcgagcattcgggacttagaatcaaggggatcgacagcggggtagatacccaactcagcgatacctcgagacaacacagtggtggcgtccaagtgggcgaaggtggtggcgggggcaggatcggtcactgtttagttggaaagagtgaaagttagcgaggcggaaagatggcttgtagatcagaaaacaggacgaacaatcatcagcaggcacgtagacggcctggacggaagtgatggatcccttcttggtggtggtaattcgctcctgcatacctcccatatcggtggaaagagtgggctggtatccgacggcggagggaattcgaccaagcaaggcagacacctcagaaccggcctgggtgaatctgttatgggtagagaaaagagaggaagattgtcagtgacaagaaaagggaaacccctcgaaaaacgaggagaagaaaaaggataaagatgaacgtaccggaaaatgttgtcgatgaaaagcaagacatcctgtccttcctcgtctcggaagtactcggcgatggtcaaaccagtcaaagcgactcgggctcgagcacccgggggctcgttcatctgtccgaagacaagagcgaccttggagtcaccctcaaggctaaaaaagaaggaagaaaaaaggaagagacaacgaggtcaatcaacgaggtctgtggtaaaaggaataggtgaaactcttacttgatgacaccggtctcgatcatctcgtggtaaagatcgtttccctctcgggttcgctctccgacaccagtgaagacggagtaacctccgtgggccttggcgacgttgttgatgagctcctgaatcaagacggtcttaccgactccggctccaccgaaaagtccgatctttcctcctcgggcgtaaggagcgaggagatcgacgaccttgataccggtctcgagcacctcagcggtggtggactggtcaacgaaagaaggggcatcggcgtggatgggggatcgcttgacaccgacgatggctaagagtgatgtaaaggggatgcaggcattgtcagccaactggtgcaacgatctagcaaatcggtatgaccgacttacgtcctcgctcgtcgacgggctctccaatgacgttcatgattcgaccaagagcaccaggtccaacggggatggtgatgggggctccagtgtcgacgaccttggatcctcgaacctggttggtagaaaatcgatggggtgagtaccatcatctaaagaggataattatctaggggcggagaataacgtacgagaccctcagttccgtccatagcaatggttcggacagtgttctctccgaggtgttgggagacctcaaggacaagtcgtcctccgacgaagtcctggacctcaagggcgttgaggatgggaggaaggttctacatgtggaaagaaaaagaggtttgaatcagtgatctgaaggatggaatcgggtggatcgaaaggagtgaaaaatagatgtaaaaaaaagctcacatcagagtcgaactggacatcgacgacggctccgatgacggtcttgacggcaccgacctgggccttaccctcggtggcgtaggatcggactggaagagaggaacccaaaggtatcagcattgattgagaggaaccgagtgaaggctgaaagttgccagtagatgggttttaacggaacggaggggaaaggaaggagagggaaaaaaagtggagaggaaaaaaaaacacgacccatccatctgatcccatctccagtacagatggatgagatggaagatacgtctccgtgatctggtactgtctctaattgatccaacgcccttgccttcgtccttcaacttttttttcgccgcctacctgagcaatctcaccaccgacgaatccgatctctccgtggcccatcgctgtcttttttctcgcatcaacgaccaccactctcgattggtttgcaaaaaaaagacagtagcaggccgacggaggatatatgacaacaagtgcctaaaggcaacggaagagaaagaagaaaaggaagaaagaactacactaaccggcctgggtgacgggaccctgtcgtcgggcaatcatcggggtggtgaaagcggggacggtaggcctgacgaacctgggagcggcggcgagggtagaaaggagagccttctgagcctgcttggccttagcggcctgcttagaaaggcggatggcgcctcgagtggggtgcatggtgagtgtgtgtgagatgaacggggggaggttggtgagggtgaaggttcgacggaagggagatgaaaaagagtaggcaagagaaaaggcagaaaaaaaagggcgagagggcgttacattttttaattacgtaagctgttcctggtcctggtcctggccctgttcctggccctggtttttttctagttctgttcttagccttgttcctaac

SEQ ID NO: 1751 - DNA, 39496 bp, Xanthophyllomyces dendrorhous
ctcccattcgcctcgcccatcggtttctctccggcatctctggcggtccacgcgcacatagctatctctgtcctgccatcggcatggcccatcgaatggatgtatgtccgctgggtgtacagctcattcattaagattaaacaagtaagagagaaagacagagacagacggagacaggcagagacagagatagagaaagataaaggatagaggaacagatagattatataatgagctacgggatagaggaaaaataaaatgaaatagaaaacaaaccctttccacaaagtctttcactgtatttggttacttctactttccctttcaaacatgatgcacccacccgttgagccccgtccttcgcatcgtcgcttcctcttcttcctctagagatcgttggcctcggaagaagagacaccattggtggcaagcaaccgggtggaccgtctgggcgaactcgtgctcgatctatcacgccgaccgtcctttcggaccgaggctgtcaacgaccgtcgaggactcccggatgatcttgacaccggagatgcgttcagcttggtcgggctctccttcttgacctcgtccgattcagcagcgcttcggccttgtcggaccagatcgatggatgacgctgaaggtgacacgggtgacaacagtgatgagtccggaacgtcggaggtgtcgtacgtagtagaatagtatcgtgctccctgtagtgtagccgttttttatataaaatccccgttcattgtctcagcataccatcacatatacaagtcacggacacgaatgaagaaggagagaatatagctgacctgcatgatcagtacgccggtcaaggcgacagcggtaatggcgtgactagcggcaagatctcggatggcgacgatgagctccggtcgagtctcgaggtatttggaagggagtggtgacggaatagatcgcgggatctgctggtagcctattcgaagagagggggagatgagaatgaaaaggtcagatcgacgtatgtattcgccagacattgacatgtatgcacaagaacaactaatcaagaccgatacatacttgggttgatggactcgatgtgagtgaagagcacatagacaaacaagactgaggagaacaagacagaacatcagcccatcattgtaagagaccgaccaaaaacaaagacagagaaagagatctcacaaagactagccccatcaaacaagaattcaccgcttcggcctctaccaccgacacccttccatccaagaaggactctaacagtgatcgcggtcactgcgatgaagcatgcagacgaccaggtatagaatacgatgggtggggcggagacgaagctagagtagtaggttaacgctgccagcaaagcttcgttcgtcactggggatctgattacaagcgagcggacgaatttatagataaagcggatgggtgagcactctttcttctttctttcttgcctttataaaacattggcggtacacatgaaagccagaacaatagacagaagaagaattagagacgaagcccggagctcacctccataacgtccccccatccgcaatccaatggacagatgtcgtgcctacatcgattatacaacaaggacatcagagaccatgtcatcgcttgagatcgtcttggttcatcgtagacgcatcgatatatatacttacctaaaaggaaggcggtggatgtaatgatacacgtcgtccaggataccatatttgagcaagcgttgaattctctacttttagatagtcgccgtcgatgatcatcacgtggagcatcgggttgaaagaggtaggcatgccattaatacgactgatccaatgctataaatccactgaaacaaccacatacacaatagattctcaacagaggatgttttcaccacgagatccttccaatgatggtcctaccgaatgtcttctcaaacgaaaaagatagcggagggaaaaggaaagcactcgattgggaatgagcacccaaagagatcttactgcgcatacgagggtaagatagctgttagggttaaatttacatgcgattcccagaggtttcttcttgcctcttcaattgcatcggccactttatccgagtcagcgcggatgaacgtaatttcttatgatccctttttttttttgaccatctttaacatacaatcactcactcactcattcgtttacacacacacacacacacacacacacatagcatgtcatcgtcgcaacagaaaattaaggtcggaatcttgggaaccaccggaacggtcggacagaggttcatcaccctcctcgcctcacacccgttcttcgagatccacgccctaggagcctctccccggtcggccggtcaggcttaccctaaggctaccaagtggaagcagtcggttcctatccctgaggctgtcaagcagatgaccgtgaggaagtgtgacccggaggacggcttccaggagtgcaagatcatcttttctggtcttgatgctgacgccgccggagatatcggttcgttgcgcctttctctatctgtctctttttttcttttcttttttccttccttccctgttcttcctacgtcattctcacaagttccttggttttccaattcctcctcctacagaacaagccttccgaaaggccgagtttgctgtcttttcaaacgcaaagaactacagacaggatccgcttgtccccctcatcgttcccaccgtcaacccttcgcatatccaggtcatccctgcccagcaggcttccttgtcgccacctcttcagaagggtttcattgtcactaacgccaactgctccaccaccggtctcgtcgttcccttgaaggcgctcgaagatgcgttcggacctcttgacaaatgcatggtgaccaccatgcaggcaatctccggcggtggataccctggtgttccttccatggacatcctcgacaacgtcgtcccttacattggaggtgaggaggagaagatcgagtgggaagcttccaagatccttggaggagtccttcctgaaggcaaagggttcgatctccactcggagagcccccttaaggtcagcgcctcgtgcaaccgagtcgccgttctcgatggtcacacgttagtttctccttttattcctgaaatttctgtgcgttgcacagtgtttccttttagctgacaaccatgacctgatactccttttcttcacatctctccgcccggcgatccttcttcaacagcgagtgtgtgtctgtgtcgttcaagaatcgacctgcgcccagcccggaagccgtcgcggaggccatgaggtcgtacagctgtctcacccagtctctcggtccgtccaaggtcccgtcggctgctcctactcctttggtcgtgctcgaggagcaagatcgaccccagcctcgacttgacaggaaccttcacgacggagcgaccgtggtcgttggccgaatcagagagtgccctgtgctggacatcaagtttgtctgcctcagcgacaacgtccgaatcggagctgctacctcttccatcatcaacgccgagttggtcagtggctaaatcttctttaaaatcttcatttccattgatgtcttgatccaagtatactcactcgatccatctccttgcctctgttctctttaggccgtcgcccagggtgttgtctctttggagtaagaagagtacgagaaccgacaaggaaaagctcatgtaaaaagaccaaagttttccgaggagaacatccagacagaaatgaatatagaatgaaccatggttgtaaagagaacgaagagtcatgagaacatgctggacgattccgcagtcgaccagataagctaaatctttggaggcccgcataaaaagtgaattacattcgggacagtcaaatagcaacggcggcagcagcagcagcaacagcagcagcaacagcagcaacagcaacgacgacggtagccaccactgctcggacagatacaacacagttcgatccgtagaccatactctcctaagctccgaatacatccatctcaaacgaaggacgcttgggaaaacgttgccttcagaaatctcctccttgcccagatggcaacatctctgattccttcccggatcgcaaaggtccaagcagagaccccgttgttgttcgactcgttcttccttcttgtccttcggctcatcttcttctttgcctgtcgaaagtttcttaagagaacactgagtcctgcgctgagaagagtgagcaagccagagtacttgattcccacatcgagcgacactgtctgttcggccaacgatgatgaaggttcgtaaggctctcgaattgtctaggtctgtcacagcacagtacactctccggctctttgtttgactctccttggtgcatatgatctctccacacggcttcttctcttccccatagacttgaccacaccctttctcactcccgaaccgacaaggcatccgtcaaccaccagcttggctacgcttccctactcccccagggatggatacgctcgtcaagattccaacttagacctctcaacggaaacattcatgctctcggtaaagtctccctcgccgaccggcggagggcgcgggagattccccaggagcgttgctcatgttgaaaacgaggacgatgcttcaatgaaggaggtcaccggaaagaggtcggctcatcacggaggtctcgccaggtgagacttgtttcccgtcatgtggatcacgccttaaccttcccgtccatgctcgacacatgctgacgttgagccatgtcgattctgaacgagctagaacgatattctcatgctgcttctcagagagttgtatgcttctatgcttggtcttcatgcaatcagttggatttctccatccgaggtatgtttcgcgcacttgtatttactctaaaagtcaatagtccactctctgacgtgtatgaccctcttcggcaaaccatgtagatcacgcaagatcaactggaacatctccatcaactttcttctcgttctcttgcttctagccatcccgttctttcaatccatgcttctcactcgatatcgtcgatcaggttagtcccggatcatatgttttccgctcgcccatccatcccttttttctcctcaccctcacctttcggttcccgtatactatctgcacgaaaaacaccagcaaacacatcgagtagaccgacaaagagaggcctgagtagacggtatatccttgcaatggttcccttctcgggctgtctattcctttttgcctgtattcctgttccggctggaatgaaagaacaaggaacaggtgagttctctctgttttgcttgccttcgaatccggcagaacaagcccttcttctagctctcaatactcaagcgcgctcgtcattctgtgcttggtgtgacaggcctgttcaactttgcgatcatgagagcatctgtccttggtgttctcatcctgggtggactttctgggttcggatcgatcacaacggctttgagctttttggaaaacatgagtcgtggccactggttcgtcctctcctctccacgtcatttttttttgtttccgggagggtatcatctttcgacatccttatctctctctattggacttgaaacaacaacaaacaaaacgaacaggcaagcgatcagctccgaagatctgttgaacgctgagcgatctctctatcatgttagaagagatctctcaatcaaaaaagaagagcttcgaaggaccggggccaaccaggttcgtctgttattgatcgtcttgcatgctactcaggccccgaacagagcattctaataattcatcgaggcattgtgtatgggcataggtggatcctgggtggttgagacgcacattaaaaacgattgctggaggttcggatggtgcgttggctgagttcatcacccttacgagaaatcgatcactaggatggagagaacaacgccgctgatgtccttctctcttgtagaaagatcgtctttgaacaaggagattgccgggctagagatgatggagatacagatctcaaaaaatttgggcgcgatgaaaatccgaaaggtagtattcctctttccttgatcagacggcgtatctccaccggatacaggttaacagtttgcgcttctttttcttattatttgtgtggatctcaatccagtcaacgatggagttttcatctactctatatggaagagtctggaacagtataggttgtgagtctagcgtgcttcgtttcgcgagtagaaattgcgtcagtagaccataggctaaccgacaacgacaaaaccggtcatactttgtgtacggtacagatttatttgctgcttgtgagctggcatgcccctcttcttcttcttcttcttcttcttatatttcagttggagcgagatatgggctgttttgaccaacagaacgttatcttcgatatcgggattagactgcgtctgtcgaatcatcatggcgatcgtgaatctgtttatcctccctcaaatctttctttccgatccctcgttgtcgttgtcaagtccccttgccaactcgaccagatccgcatccatcctgccgtcaacgatgggcaccatgccccataattcgtcttcaactttgctttcttcctcatcctcctcagcttcatccaaccttcatcagaaccacacatccgattggatctcttacttgatcgccctcgcattgagtcatctcccgttcgaggtggacgtgccgctctggtcgagacagatctcgttgggtctcgtgggagtgatcatcttgtcaagcattcagtatgtgatgaggtcgatatcgagagcgttaaagttgggcagcgcgagtgtaggcggagtcgttttattattggggttggctcaactcatggtccgtttgtttattctgatcatttattattataaataatgatacgtcgtgcgatcgcttactgttgtgtcctatccgtttccgtcctgaggggacaacagacgctctacttgttgtcgctactgatccaactccgaacatcattacctccaccggacgaggacgatccagacccagagaacagtctgctcgtttcatccttgccacctttcgtggcgttcaacagtctgtttgatctgacgtatctgatatcggctctgttgacgttggtcatcagctgggtggatagtaaagtgaacagagcggacggtggggtagatgtctggaggatgggggaagtttagatttggggttctttgtctttgtttcattataaatctcatcttaatcatccgtccatctgtttggggaggctgaatctataacaatgatcagcttcctctatctctctcttcttccttattcacatgtattgcctcagaggggtcacacagaatcttgaacaaaacagaaaagatatatatatgtatgtgtgtatgtgcatatgcgtcagatactccctaagtccctgtgagactgacgatctcgtcatcgttatagactgagtacaatgcaagagtcatagatcagtcgtcagcgttcacacgattggatggcaagaagaaaagggagaagaagaaagggttcgttgcttcccggctggctccctgcgaactcctgacacgatggacgaagagagataacatctggaaataaaaacgaacctgcagccagaccggaccggtcttccttgatgagataattgattccgtctgtttctactatcccacgccatccgggtggactcgaggagaacggccctccttcgacatactgttcaaaagtgcccatagatgcatccgagaaagatctttataaggtttgactctgtgccggaaggagaaggagaacaaagggaaggaagagaagaaagagaagaaagagaagaaagagaggagagaggcatctgttacctgggcaggaatgacctgaaccttttcaacgacgccagtggagacttcagaattatctggaccggtcaattggtccgagttagacgagtctcgacgtttttctcgggtgcaaggagtggacacctgttgaggtttggtcgacggaatagttcgtggtgatgctgatgacgagcagggttgatgatgtgactcttccggctgtgaagggtgagggtagaagaggactcggtcgcctacattgtatttcgaaaacacaggagggcttgtagaaattttgtacattgacctgagtctgaaagataaagagataagaagatgaagagatggatgatggatcaggaaggagatggtaggttctaaaacgttagcagagagatagatgcagagcgaaacaaaagagacgaccacccagagggagtgagatggagaacgacgttgaccgagtgaggtgggtggggtgggttaggtgagtgggtgagtgggtgagtgggcgagtgggcgagtgagcaaacaacagatccaaggaagtgagcgggtaagtgcatctcagagaaagaacggaaggagaaagtcttctgatcaaaagagttaagtctggcgttagggtgtgtgagtaagtgggcggagaagatgtttcattcatgtatggtgcatcgttagcggcgacgacgaggttaacaacagcatcagcatcagcaccatcagcaacggcaccgtcaccgtcaccatcaccggcaacattgggtttagcaggtttagtgagtgttagcattcaacacggtcgagtccgccgggtggggcagttaaatgagtcttacgtaattgtatcacgtgtcatcggatgacgcgacagaacgcgacctgacgcgttcaggcacagttcatttacgcgtcacaccgttccatcacgcgacgcgtcgtcacacgcgtttcgccacgcacatcggtgaacatacgtctcctctttttttctctctctctttctatcttccacctcattcagctcactcgtcttccgtcatacattcctagttgtcatacccacttgatctcagccatgtcatcatcagtccttgctaaagatgcagcatggaatttcatctttgcaaaccctcctcccgatccagctaccttccatcctgttctccaggtcatcaacatcaaacgggtcgcccctatgggtgagcagtcagaccgttatcggctgatcctctcggacgcaaactactacatccagggaatgcttgccactcagttcaaccagatgatcgacgatggctcccttcagagatattcgatcatcaagctcaccaactttgccatcaacatggtccattctcgaaggttcgtcccaaacatcccatcgtacttttccttccacctgagatgtacgataacacttgctgaaccataagaaacctttcgctgtaatcaaacacagacttgtcatcgttctcggaatggaggtcgttcagtctgtggctgagaagcttggagagacggagaacattgaaaaggtcgagaacccgatcggacctgccaacgcaggcgccggcgccgccacgcctgctcctgccgctcctgctcctgccgcccccgctcgagctgcccctgtcactcgaggagggtttactaatgctggcgccgctcgagcaccagccgctcgaccacctcagagcaaagggtccgaccatggacctctctatcctatcgaggctctcagtccttatcagaacaagtacgtccttcgtgttctgaactctgcaagggagtgcgagagaaagattgagacagactattgacctcgtgtttttttttccgggtagatggacgatcaaggctcgagttctccaaaagtcagatgtcaaggtttggtcaaatgctcgtggggagggcaagctgttctcagtcacttttatggatgactctgtaagtcttcaagtttattcacctctcgatataatctcagcttttggcttacagtcatcaactgctatttgatatttccatcaatagggagaaatccgagccactggtttcaacgaggcagtggattcattctacgatctcctccaggagggcaaggtttgtgtctttattcttcccatcacagctgccgacgtccacctagcctggcatacttgctaacacgagcctatactcaggtttattttgtctccaaggccagaatcaacattgccaagaagcagttctccaacgtgaacaatgattatgagatcatgttcgatggaaagactgagatcgagcctgtacgtacaacttccttctcgtctccaagaatcagctggtaattcgttatccggtctaattacgtccctcattttcatcatctatgacaggctggagacgatggcgctgttccccaaatcaagtacagcttcgtcgatctttctgcgctcgaacagatggaaaaggatcagacctgtggtaagcgttctttataggccgaacatgtcatggaaaggattacagatcgcttggcattgaccaacctcttgcttctctttggccggctcttacagatattctggccgttgtcaaggatgttggggaccttacgcaaatcgtcggaaaagcttctcagaagcaggttcgttgacctccacccattcaaatctgtttccttctcccttcggagagcccgtcattccccttaggctggctaacaacctatctccacgtttggtatgatagattgccaaacgagagctcactgtcgttgatcaatccgagtacagctgccgactcactctctggggaaagacggcagagagcttttcggctggcgaccaacctatcatagccttcaagggccttaaagtcggcgacttcggaggtttgtgtctctatcttctgaacattggtgttactttgcagatcacctgctgtgtgatgtttgtgcgcgattctaacttgatcgactgacttgattatataggaagaaccttgtcgatgtttagttcgagtacgatgacggtcaccccagacattcccgaggcccacagtctacgaggatggtgcgcatatttccttctaccctgtcccaagaatgttggtcttcttttcttaccgtcttaccctcctgctgcatttccattttcccctcaggttcgattcccaagacagttcgcgatcgtacaagtcctactctggttccctagtaagcggcgctggcgctggcaccggcagcgtctcttccggtcttcgagatacctacaaaacgatcggcgagatccgtgacgagaacgttgggatgaatgataagccagattatgtgaccattcgagcgacgattatctatgtcaagaaggagaatatctcgtaccctggttgtcccggagagggatgtcagaagaaggttacggatgagggcgatcagtggaggtgtgaaaagtgtcagagaagttaccctgccccagagtatcggttcgttttaggcttctcttgctcccttttactgtaaaaaagcggttcattaagacagtctcgttctctacctttttccctgtctccccttgatgatccgaacagatacatcatgacaatgtctatcgtggaccataccgggcagatgtggctcaccggatttaatgaaatcggagagcttctccttggaatgaacgccactgctctccaagctatcaaggtacatcttcatcttcatcttcttcaactctggaaaccacgtctgacagctcctatctaccttgtcttgacgtccgtcgtgtttgccctgtaggaggaagatgacacacagtatgaagctatcgttaatgccgctgccaacaagacgttcaactttgcctgtgttggcaagatggacacattcggtgtacgtcccctctttgcttcttctggcctaacaattctgacttttttgtgttatacacatattgaatcatacacttttcttgtttgcgctgtcgaatgaataggagcaaacccgagctcgattctcgatcagacaagctgccacgctcgactacaagcgggaagcgaagtcactcatcgaaaagattaaagagtacggcgtggtctgttaaaaaggaaggtataagtcttgaaggaagtctctttttcttctttttctttttcttcagaaatctaaaagtttcatcgatagaccagttttgttccattcggccgttctttccttgagatctaaatgttgtatcataaataatcgtcctctcttctttgtttcctcttctattctattaccttcgataccgcttctccttctctccttcttttctcccgcttccctgctggcctgttcttagttttcaatcaaccatatacacatgcttttcgatattcccaaactatccacgtatgcttcatgagtttttccaaaagaagaaaagggaacagatagaaattgagatgtcattcatccacttaagtacgttcgctctccctcgtttcctctcttgcaccattcctccccggctcgtcgaatctcaggggggcatttcccctttttgatttattcctcatctttcttctcttcctcagcagcgacctgctccaactcttcatccaaatcagccactgcctctggctcgctctccttcgactcgtcgactgggttcaactcggaaggaagcgtctcgctctgagacttgctgatgtccttgacggcaggagtgtggaaaggctctttgagaccgctcactggcttctcaacatcatcgacgtctgctgcggatcgaccttcgagccttcgaatctctttttcggcctaacacgaaaagagggaggagcaagggacggatcaattcatgcaaacgagagagaagagaaggaagaaaaaaaaaggagaagaaaaaaggaagcctaaaggagaaagaaagcaatcgaacaaaaaaaaaactaaccttggcaacgttctccttagtaactcgatcgttgttgacttcgaaccaggtcttttttgtcttcaagtcctcgattgccctgggcacatccgaagtggaagtcggcgcgggaattgaaagctcaaggatggcagcaaggatgtgaaggggcaagttgagcttggcgtccaccttggtcgcagccgaagcatcagccggagcagcagcagcagcggcagtggcggttcccttcttctgttgaccaccgttcttcttcttctttcctccgccgacaaagaatgtctcatcatcacctttcttcttctgaaccaccaagttctcatccacagctactttcctaccctcgagcgctgccacaccttcgatcgtcttcttctcttgaagagctcggctggtcttggcagatgtgtttcccaaaagatagtcaatgatagtctggcagtcttcgatctgagcctggaacgcagaaatcttggcttcatcccgaagtcgagtggctgtctcgagtcgtcgggcatcctcagttgccttgcgctctgccttggctcgctcggcctttcgagctcgctccctttttcaacaagcgcagacatcatcagttcaacgatcaacgtttccctttgcagaaatcatggaaggacactcactcctgaaccttggtccagtaaacatcctgggcgtccttgtaagctgcggccttctcttttctccttccgtgaacctcatccaacttggccgagatttccctcctctcattgtagagcttgttccggctctcgtacaaggcatctccctccttctgcaattcgttgagctctgccttgaggctgtcgaacttttccgaggcggccttgagctcaggatcatcgagcttagccgaaagtccgtctgccgttgccttgagatcgtcgatcgactgctggacatcaccaaacgactcgacggaccgtcgggatcgcttaagctgggaaatctcggctagcttgcgcttctcgttggcgattgttagagctccagactctacttccctctcaagagacctggtaaacgaaaagaaagagaaaaaagcataaaaaaaatacaatttcgaaagaacagcataggatgagctacgctcagtctgaagataaaaatgcactggagagaacgacgaacttgatctgagagtcaacctcatcgacagttcggtacgggagctttgccttggcggcctgcatgtccttgatctacaggttcgaagttgaacaaaacctccagtcagtcagtctcttcgatcgcccatctccgttctacttttgaggtttaaatacccaattgtgacggtcagattgaaagaagaacaagggaagaaaacagatcgcaccttcttgttcatctcatcccgaactttcttgagctcatcaagaatctttcctcgcttgcccttggcctcagcctggacacccttcagactgtcgagctcggccttgagctggtttcgcctggaaggctcagatgaggcgttgggagagttggttgccaagctgatcttgttcttgacctcgttctggaatgaaaagttgaagagttcgaaagacccagagagacaacgcatgaagaggtaaacgaggaagcagtcagcgaatggttctattcaagtagctttttttttctcacccctccgattggagattcaaagacattcttccttagagtcttccttctgacctaacagctacccacgcggctatatctacacttgagaagaaacggctcttctctcggtacaactgaacaagaagcctggaaagaagaaatgaacaagcacacgcacgagttgggtttggagagcatcaatctcggaccgaatagcgtcctgctcagcctggtaggcggcttgatcgggctttacagccatctcctctttcggtcgtcgctctttaggagtggacgtgccggaagcattggtggtggtagtcttttttgacggaggaggagccatgtgggagagactagaaaagaaagaggatataggacgagtgattgttgtagaatcagaggaaagagaaagaagtccaaagatgggacagcgcacggatctcgttgcatctggcgtggttacggccacgtgcatacatacctaggtgattgtcaaaagtgtgggctgtgcagatgcgagggggattactagacacgtaaccgatacaggaacgagcgcagaagcgctagttcaggctcatagactgggactggtgtaggattcaggcgcgaagtagcaaggtatataggtcgaaagtaaaagggctgtgagcaagaacaataggtaggattaacaaaggatgaacaggaaaagatagggataataaaggatttggcgaaaggtccaggcttgtgagaccatgctatctatggcagagggagcctatcttgtatatgattctcagactccgatgatagtgcatagataagtagaccttagggtgcgatagaaacgcctgcgctagaaggctacatacctgcagatgaatgtcttgagtgagcaagagaaacagaaaagaagttgaggtaggagaacgaatcgtaggttacagcaatgtaacactcatattacgcccctgatgccacagcaccgcaatcacgtgtcgtgccatccatcgtcattcctccttcatagccggcctttcttaactttccccttctcctcttattactccatccagcattctaccttcccttaaacctcgatcggcacctaggagttcatccaagatgccttcctatttgatctctcgtttcgcagaccccatgcttggattcgctacaggtatcgttctctacccctttcttctcttctttttctctgccgcctccgctgcctcccttcttctcgtcttgttagatatccgttcttcatccgctcaacccccgacatcttatcccacacaggtttgcttgcgttcacactcaacgagacatctcctcgaacaagtccggcacctggatactcaatgcgcgagttgatcagctggaaaatggacaaagttcgaccggctcgaccgccgaaacttcgcagaaacagtgggacggacgaggtcgatgtggacgcactggcgaagatgcttcaagaggccgagaagatagagaggaaatagctgaagaaaacaaaaacaaaaaggaaatgctttggccatctagctttgatttgtccttcttctttccgtctacttatgcttttccctaccagccgcgtgttgtacttgtatctcctgcctaccactgtgtttataatggatttgctgttgatcatttccgtgtaccgaaggtgatgacacggatgatgttctgcgtacagaaaagacgggttcatatatctacgggtccacacatatggagcgtcaaaaagaatacaacggcaaaatacatcatagagcgaccggcctatatttatagaggtatctgagctccatgtagggatatcaattcaaaaagtgatcatcaagttcactaaacttatgacaagggaaatatacagcaatttacagaagaagggcagactgtgggctccgacatatgttcaaaaagataggctcaagagacataaaagcttagacatcagatacaacaaggtagaaagatgggtaaaatgtactcacgaagaatctcacaggccttcacttatctacgtatcattaatcaaactcactatcggagccatcatcaccatcattatcgttactgctgtcggtgtctccttctctctcaacagaaaagatcgaaaacgtgtaaggtgcacccaaccgcgacagctctgtatcgtctgaggaaggaaccgatagggagccagccgatagagtaggaagctgatccaggcgagtcgatagggtatttctagacggctcgaagatctgtcgaggtgcaggcgaaaacgtgatatcgtactctacgcgcgcgtccatatttccactctcttcgtgttcgttctgctcctcgtcgtcgtcactatcggtatccattggttcggctgcagttccaatatccccgtgtccaactctacccagttctggatcctcttgtggccttatagcctcgataatctctctagccaacatcgcatatctgttcagcacagggtccaacactctctccaccacaacatccggatcttccggatcaaatgggtcgtcctccgaatcatagtcagagtcaacaaatggaataggtggaggccgtccatttgttgacgacgagtcttcaaccaaattgaccgaacgaatatacgagcgcgaatgagaacgtagatgattgagggagtgagagtagtaagccgacagaatggaatgttcctcagaggagggtgaacatggtttgaattcgaggtaagggttctcaggtgaaggggcagaggtgcatgcacacatggcagaagagtccaatgggtccatttggaatgcaatcgaatagaggtatgatcgagtcggtcggcccatcttcaatagggaaagaacaaaagttctctatcacgtatatgcgtgtgtatgcgtctcgggaatgtgtaggaggagcggttgaaatgatctatcttgttccgtttagaaacgtaacaatgggatattcaaggaaaagttctgacacgtgtgcttgaaccatagaatgtgttgaaactagagttcttaccagcaatgagataccgatggtgatggtgatgttgagggatagatcagagttggcgagaggtgaaacagacattttacatctccacaacctcttcaccttcacctctccttcccaatggtaaagctcattttagccatctgtctttcttacgagcaaatactaagccgctataaacaagcacatcgatgatgataggtttgactgaacttgtcggtacacccactcaaaccatgctagtttcgttttccagcgccatcggatagccgagctcctgaggctgtcccttcttcagacaggatacgtccgggcgattctcaagtcttttcaaagtttttgacagccgaggaagaatctcgcttggttgttgcattgttgggagcacaattattctctcgaggacagataccgatgttggttctattctgtactcgtgcagcctttgtccatctcttgaagtgctgaatgtattcgctaagaccacgctgaaaggaccctcttaggacattacaacagttaatgaaacaaccaacagactcttctacggccacggcagttggtgcttcagcttcttccaagcgcaaaccggatcctgcatcatccttcccggcactcatcgttgccttgcaacattccttgaaagatgcattgtcgaatctggcctcggccagttcgcaggacggacgtgtggtccctattcgtccactcgtcctcttctcgtcagggccaagcttgctcatgcctaaatgcgtactgggacttcgtctaccatccctagagaacgatttgaacactgaagaaggtcaaaggacaagggatccgggtctgctagaacgagcgacattaagagaattcttcaagaaagaacttggaaattcaataggtgcgcttcgtttccttcgaatcttatcaatacgtgcgctcaatttatattgtgtttcgggaatatatttgccgtgatcttcatatgactacatgaacaaataaacaaaagctcggactcagacgactgtccttctgcttgctcctcggtcgttctctcaacccggttggctcccacgaactaatatatcccataggctctcttctctcgtcgcggatgaagaacctgtttcatcttccattccaacccgatgcaaacccttaccgaaactgatcgtagagcgattcgcagtcactctgactcagcagggagttgctaccggaaacaggctcgaagtgtcagaacaagatgatattcagaccggcattgagggtgacagtagagactgggtttggttcatgtgggaaggaggcgtggtcgagggatggaaagggtgaccgggcccgatctaagagcaagatttcatgggatttctgttcaaaccgttacgatatcaataaacattcaatgagcacactgaaaccgtgatccattccggacgtttctaagctcccgatgtagaatgtttggtttgatccacgtggattgtttgagaaattgcttttcccggggatttttctttttgaaaaagtcacgtcgagttccggcctaaacccgggtgatgctccggatgagtttccccaatgctctgagtgatttcttcttcttgccatcgtcccaaacgccaatccgaggactggaaacatccatggcccagtcaacatactcgagctcgcttcctttgctaccgtacccggcgtcctctcccaggccaacatcgcctgatggtggctttcgggcatatgccgatgaccaggatgacgccgggccgtcagccacttctagatatcgacctcctctgcactacgcctcgcgttcatcttctcctctagcaaacttctgttatgagagtcttgatctcgtcaggtcttcagcctggtttgggctggcagcggtcggtgtggtattccttcttggagcaggcataggatcttcctttggctcttcatcaagcacagcctcaacaccctctgtatcctcgccgactatgtcgaccccggccaaaagagactacaatccctggattctgcctgggttaatcagaaatagacctatcatctctccagccgaccagcttcggatgggattcgatatctttcctttcggaacatatgactcggttcgttgggagcctatcccgggtaagaacggctcagaaggagagaggacagagagtcttttggaggatttgagaaaggcgcttgatataaatcaggctccagaaggatgggattgggcgcagaataagacgttggtggtctctctttctctcctcctgtgacatgatccatcagctttcgctcacacaatacgacggacacagcattttgggtatcggagactcgttaatgaggaacaatgtcgacacctttacaaaacacgtccgttctctaatgtcttttcttgattcattcaggacgtgcagttgctgacatccctctctcgtgctgatctagattggaaacatgacgataggtaggcaaccacaccaattcacagatcctcaaggatcgaaatggtccggctcccaacaaatgtatctcatacatgttccgcatgtgaatcttacggtgtacgtccttccctatccttcttgatatctgaactcttcttggccagcagttaacacggtagcttgtactgctatgtgtcgcttcttttgtggctcagagcgaactggtttcataatggaatgattgaacatgaagttgtatgttcctttttcttttttaaattcccatatacgttcgtggacccttgaacgttctggactagctaacgcggccttttttccgttgatttggcttgcgccatcttcttttcttctgatcaaataggatggattctttacgaatgagagcacgccccaagttttcgaacaaaagttcaacaatgtcttcctcccaacgctctacgaggaaggagggctgaatggtcgtgttcccgacatgattattttcgagaggtgcgtgtcgaacacgaggaacataagcatgtggctagagttcactagtagtctctgatcagggtcgacaagctgacaccctctgctgtcaatctttgacttcagcctctcatgggatctcgttttgttggctcggctggctaacgacgcaggcgatacacgatatgctgggagaccatttgtacgcccctatttcttggtcttcgaatcacatctttgttttgttgtcgatgccaacatagctttgttctcttctctccaatcttcgactttttatcctaggacgacatcgaactcgattggtacagaggccgaatgattgaagtccttgcgttgctcagaaagacattccccaggacgaagattgttatgcaaactcctcatattgggatcaggtacgcacctcctcatctctgtcctccatggataattcttctgataaaactctacctgtgtcttgcctcctttccagacaacctcagagcgccttcgctccgataagaaagttccaacaagttcgtttcgtcttgactatttgcacatccaaaacttcacactcattgaaatcaatgtgtttgtcttttatcactccatgtacctgctgccactttcaaaagggtcaaatggtctcctcgattgctctcgaaaccgggtatgatctgtttgactggggacgaatcgtgtctacgctcgacaacgagcttaccgatggtgtatgtctatttctgtgttcttttcatcagcgtacctcttcgtgttttgttagttcttcgatttggatagctaaagctttgtcatatgcgacctatagctacatttctcagctggtgtcaactcatggctctgggtgagtcgtccttcctgttctctacggtttcaatgatttttcttggctcatatagctaatgctcgtttgttgaattcctaatgattcgtccatgtcatcaaccgacgcatgcagggagaaatggttcgtcgaactctgctctcttttctctcttctctgagcagacataatcttaccagtgttctccaccttttatcagctgctgtattacctccgaagagcgtcaactcacccacacaataccccgccgatcgactttcaccccccgaggtttactcaggacgagctcatcgagtcgtataaggagccgaagatccaataccctgccgatggaaagatggaccatcggaaacgggctgagttggttgatgctcggaagcgtcaactgaatctggacgccgaactgctaagcaggtgatcaatagctgttcatcggtagtcttcctgaaaccgacatatgtgcccatgtgaatcatgaaactcgttctcttgcttgtgtgcttgattttctctctattttctctctgtgtatgaactgttcatagccatcgttttacatatcatgtttgggatcgtttctttaggctcttttcatctcgttccagtactgcttaatttccttggactcttctcagcttctcttgattcttgattctttcctcttatctcgcaatttctgctctgcacttaaatctatcttgacttctttctataacttgatccctctgtagagattcatgaatgcgtagaatattgtgaataagacgtcagcagagagactgatcgttcttgagtgcccgctgtggcaaacacaggcagatctgggcggaatggaaaaacgcccaaagacgttttcgtcgtctgatctacatttccaccctaacaacatcaacatcaacatcaccatctctgatcatcatctatctctcattcttcctcgctgagcaaacaaataaaagtcctttcaggaagatacctctgaaaagacatgtcggcaactacttcggtgcctttgagctcatctcctccttcgccacacgcacctccggcacaccctccatccaagcgagagatcgaacggagactgagtttgagtgttccagcacctccaaagatgagcagggtgagtgattggctttttgttctgtttacatgatctcatatcgttctgtccagtttgatgtttgaggaccaatcgttctgatctttctctctctctacctttggtattcattatgttcacctcgctggattgacaccttctctactttctcgcgtgcctggattcaccatagaaaaagtcggttgcctcatcctctggagtaccaggtagcccaacagtcgagtcattacctcctctgttgtctcctggactttcatcctcctttcaaacgtccttcatgtcttctccaccttcgggcacgccaatcccgatacaatctcccccggctggccttcaccctgctccaccatcgcataacctgctgtccatcatcgagggccccccgcgcggcgctggtgtgactggtagaacgttctcggattcggagaacgaggccggagatgaggaagaggacgaagaagatgatgaagaggaagggatggaagaggatgaggaaatgagaaagaaggttgaaggagaacgcatcctcaagtcaggatacctggaaaagaaaggagaaaaacgaaaggtgaatacatttcggcagatattgctagacttctcgttcgatgtctgacagagactgttcttttcatgctcgtggggcgaccttatagagctggaagaaacgttggttcgtcttaagaacaggcaggctttcgtactataaggataatcgggtaaggatttgcgtttcaattttggtcactttaaaggcttcgccttgactcactcgggatcactttcatatgtcatctaggagtataaacttctcaaattgattgatcttcgcgagatccactcgacatctcttgtccaactcaagaaacatattgctgccctgggaatcgtgacccagtcccggacattctacgtcaaagcttcatcctcaattgatgctgagaactgggtagaagccatcaatgccgcctgcagggatttaaaacagatggatgagatggagcacgagatgaagactggaatgaatatggcggactcatcaacaggcaatcagaggaaacagtctagaagcggaagtagtggcgtcatggccccgcctattcctattgcgacttcgtcacatcaacggtcaccttcgctgtccggatcatctctcccgacggttggcatccttaaaggtccttctcctgtcttaactgcgagctttcttggccctgtcgtcggtcagcccactcagcccaatggacctccgacgcctcttcggttgaacaccaaccagccatcttggggtgatgtccaaacgccccatgcggggtctctagtgacatcaccgatggagagacaggccgctcaatcccctacaagaatgggcgcgacgtcgtcttctgaagatgaagactttgaggaaccgatgacacctgctcaaggttcgcctgtgatggctccccctactgtcagttcatccagctcagcagtgaatccgaataaggtcattttgaaggcgtatcttatgaagatgggtaagcgaaagaactggagaaagagatggttcgtattgactagtgggagtctgatgtattcgtcaagccacatggtgagcctttctatttaatagaatgaacgaatgtattatcttcccgatctgttcttctgatctgatgtcaattatatgctatctaggacacaaaaccacatcgaatcattccattaatcaaggtcctcgatgcgttggagtacgaaccggttggatcgaaagatagcggggctcgaacggacaagctgtatccaacctcgtcctctaattacgatcttgccggagtagctgaatctctttcgtcctcacctctcaaagcgggtctccatactgctgcttcagctgttggcgttggtagcggcgatcgagcggctcgaaatatcaaccatgcattcaagatcataactccaaagaaagtctttatcgtctgcgcaccatccgaggaggaagagatccagtggcttagcgcattacaagctctcatcgctagacgagtcgccggtaaccaggcggctgccgtgttgggcggaaaactcaactcgcctatccctcctgttcaatccagaagcttgtctccaacgtcgatctcaacagccctaccgtccgctggggcgagttctatcgcacaggcacacatacctacaattctggagcagccgccctcaccaccatcgtcgacgatgatttattctcttccatcaccggcgttaacaacgtcgaccgttggacaaaacgcagggtcgatatcaacatacccgacgagaacaccttcgccctctgccagtcgaagtgccccttccgatttagctcagcaccatctgccgtcgattgcctcgcaaatgtcaggctctgtggttaaacctggatccagggccagagggtcagacgatttggatgaacgtgggcggtcggttgggatgacgagagagcacaacgacgaagcccgcctttgtaagttcttttcttgttgcctcttccttacagcgagctaggtcttgacggctaagatgtgcttcattgtacttgtgttatttctgaagcatcttgagctttgatgaaacaaaataaaataacaaatacccccctcgtcagcttgatatcgatctgatgtgtattctggaagcttcaagtctaataacgcctcggcctcctctaccatgtatattctttagctctttctcatgacttcatgttttcatccctctacttcttttcttcaacgctgcttcatcatccgctactcttgctgtgacggtattgcccgtgtgccgattctccttcctcctctattctgctgtccggtccgcgctttttctccttgttcgtctttgatttatatacctttctgtctatctgtttgcatttctttgccccttccttttttcttcccgccttttcgttgtgcttgcaatcaatctcttttgatatagaagagaaatctctgttgtcttaaactccctcgtcttactgatcgtcgagcaaatcctcccgtgcgccaagacctaaaacaagccaaaggaggctttggtcgttctcacccttttagggactggctactatcgagctgatgatgctaggcgtcgatttcatcccgaacatcttgagataagccgtcatggttgatggactagacgatcagatttgagatactagcggcgcgatgcttggtcttcttgcgtgtgaaagccggtctttcctccctccttttctctctattctttttctcgtcttggatggcttagcagaaggatgatgtcttcttgctcatgtcagtgtcaacgctagttccgccagatagagccggccggtcgggttgaacgccaagaaggatctcatccagtatcgaacctatctttcgattgctcgacattgtttttcggggtcgtttctgggcgagagtagaatcgaggttgttgggtttcatgcccatggtagacaggtggcttcgtttcttacttgttgagcaagacagcttggcaggatcaccattggccttagatggaccaggggaagaggttggactgatcgtcctgaccaacacacagtcgtcctcttttcgttcgttgagtgccgggcgccgtcgagaccggttaactcgatgagagtcagctgttgagttgaccgactggatgtgtaaggagacataagacgattcgtggggagacgggccgagccgagtaggtgttgagtgaagtatcgtttggagaagtgaggggtgggctgaagaagatccaagcgcgggtgacattttccagcgatcgggagaaggtgaggaggagtaaagagagaggtgtcggttcaggatgcgaagataagttgggaagacacaggctgtctgacggagatctgagaaggcagagcagagtcaactttcctcttgccggacaagaaaaaaccaaggagaagagagagagaggaggaggagaaacaactaaccgagataattgagacggtcccattcgacaagccgtttagtcgagcgatccgttacacccttacagccgttcaagctccaggcagcaagtctatacagacctctccgttcctcagttcccggcggctgatactgataatgtgttgatacacaatagtatccatcgttcaaggtaaggtgagttgagaagaaaggactaggaaccaacaggagtcgacgtacaagcgcggatgcgagctggtgaattcccaagtctgttatgtttgtcctaagtaaatgtgagagatacagtagtaaagttcgatagtattaagctcggccagaacaaaggatagaatcagaggaaaaacaaacctctcaatttctaggacagtcaagaacttcaactccttcagggctagcgcgtgagaatctccaaacattgtgtcggataaacatagactagagatcaattcggttgactgggcgttgagtttaagcagagggcaggaggaggggttcgcaagcaggctgttgatgagctctttatacaagatctgggcaactcgatggcgagcggtacttgaccggtaaggatctgaccccggactataagggcgagcgaaaggtgatggctggcaaggtggtttgcctgaggagcaagagtcagcccaaagaggagagttaaggatcccttgaagatgaatacgtcgatactcaacaggtttctagcttgctcatatcagcttccaatagcttcatagaaagagcgccaaactgagaagcgaaacgtgcccaattaccgagcgcgacatggccatctgtcgatgccctcagccggcggatgatgagtgctgccatgccgaaggaaaggtagtcgggcgttaggacctgtggatcgtagcgttccagattctgagcgatcacctgagcggatagatcggttagcgaccgaataggtatagcgacatcttgttcaactatatctaaagctggatcctgacaagaagataccgaaagggaacgtatggtctccatcatggtccgtggttggcggatggttgtcgaaaggtgttgaggattgttttgtcaacatccggcggagaccgacgaagtttccatctgcctctagccttgacaccaatcgtccaaacatgtagagccgaaactgttggcgctctcgatgtcgttgtatttccctgagagagtatagatcgacttgtatatgactccagacccatgcgatcaggcagggaggacactgaccaaagctggagcaagagcacaagcggaagaactatgggcgaaaatataatagagaattccctaatggctttttgacaagatattagagaaaaaatgagaatacgtgccagagcttgtttcctcccgctttcctccgctcatcaccacgaccgacgtcccgagcagacacagactcactctttcggacacacacacacactctttctctctctaccggcatcccttctgtggttaaaggcagtcatgatcttccagatctcacgccggacaatcctcctcacggtcgtcccgttgttcgggatcacctcgttgattctcctctatcaaacaagctcaacaccaaactcggaggcctggtggtcaaatctttcgctccctagttcttgtccgactcccgtcgctacagcccctagcactggtctctctttggccgatcagaagaagatgactgctggtcagacgtgtctccactcggtcgccaccggtgcccttgttgatatcggaagtgaagacgccaaggtttgggagtcgtacaaaatcggtaacagcactggtgctaccaccttcagagacgactgggttagagcaggcagaggtggagaatggcatggaaaggagaccaggttcctcagaggaattcccggctactgtatgcaaccgttcttctctcatggatggcatcacatgctgaccgtcgtttttcttattccgatcacagctatgtttcaaaatctctatgttcagaacggaacgatgagtatgtgtttgttcatctcttgaacttactctttctcaaggcgcctaactttctggtctctatcccatttttatctattcactctcagttgccgtttcgtctgatccgacaacattgccggaagtatctagggttctctcagatatgtccagaggaacgcccgagaacaagttccctgtggcggatgagactagatggctcgtcatctctcccgaagaagccgctgccagatttgatggtggtcattctgccagattaatcggtagcacgatcttcctcaatgatggtccaggagcagaaggctaccttggttcgcatatttctcgcctttctctctcgtttcttttgcttgcggcttgtcagatcgtttgtttacgcgtcaactctcatccttccgtttcactcagcgcactacttgtcagtagacgttgttccttagatctgtccataaaattacgaattgactggtctcaccgttcctacctttcagccatcttgcagcagagttgttctttggcgcatggagagtcctctctgcctctccggccgtcgtcgctgctaacacggcgatgggacttgaattccctcgacgaactattctcgctaaaggaccagattggaaggacgtgccgtaagtctcacagaagagacccttctttttgacctgaggaaagcttgagatgctgatctcataacttttccgccttgtatccttcaacgtccgatagaggactcaacgcgtgagttcttattctccttgtctcgatgtgctttgcttagtgcaatgctcccaaggagaaacacattaaccacatatgaaattcatatatcctggttctgtagctggttcttgacgacaatgttcccaatgatgtccatcgaggacaacattcaatggaccggtaagcctttctatctcttgttttgacagatatcatcgccgagcacacccttctcaaacaccttttatccccattcaacatagaccgagcaatctcgacgaacttgtatttgtttgacgagatcgttattctcgaccgatgggcttcccaccgacacaacccgacggctcaacagtggaacaagatgaacgctggtttgtccgatatctctctctgtcctgctcttcggtctgatctctgaacattgctggcaagcttacttcatttaacattgggttcacgcatcagacgtgttcagagaaattcattccccatccgattggtgggcgcctgtgagagagagcatgatgatgactctcggtatcgagaacatccacgtcaaagagaaagccaccgtcgtttatatcagtcggtctgtactttttttctcttcgttctcccttctttttcttgtcttcattggcttttctctcattcagttttaccttgtatctccttctgacagacaaggagcttctaaaaggcgattgaccgaggcatcccacaacgcgctcgtgaaagagctctcgacactccctatcgatctccacgtcgcccagatggagacgatgtcaaagaaggatcagatggagctcgtctccaaggcagacatcatcctcggcgtccacggaaacggaatgacaaacgaactctggatgaagcccggtggagctgtgatcgagatctttgacgtcggtggtttcaccagggactatcaactacttgccgaacctctcaaacacgagtatttcccgatttggaacgacaaggtttatgcctgggcggacgacgtgcccgggttcaagttatctgacaactttatgggaaccaaccttcaggtatcggcaacgttgatcaaagagttggttgagaagctgttgggaccaggtgggtcggttgacataaatagaaagtgggaaggtggggataccatccctgatgatgcttagaaagtagtttcctttgaatctgtcatctctatttctctatatctttctttctctttgatcgtctgttctctcttgttaccttttcgtttctactcggttctctgtgttggtcctttgtgtcgattgcaacttagaaatcccttggatttttgtttgatcagagtatgtttcgcgctgcgagaatttagaaagacaaccacaaaaggatgacattcatcaagttgacgtacaagaagatttacagaacattgaggaatcgagaagaggtaaaagaacacgataacaaggctacaaaattgggacgggagggaggtaggttgaacacaaaacgagaagaagaatcctgaaacacatgcgcccaagaagacaaaagaaagtgcaaaaagaaaagaagagtacagatacttgtggcaaagaaagtggaatgaatttgtcctttaaatagattgcagtttggaagattcaatgcatttcgctttggattgaccctctacttgtagaatgagatcaggtcgttgacgtcatctttactacccaagaagacaggacatcgctcgtgaatcgacttgggctggatgtcgaggattcgaccagttccagtagttgcaacacctccggcctgttcgatcaacatagccatcgctaaatgacgccaacgtaacagtgaaaagggggaaaagtaaagattagtcaaaagattgaaagaaagggaatcaaagagaatagaacgaacggaaagcctcgtagaggagtctgagcttgccagatttagtctttttatcaccagggtatccgaagatacctccatataggagtgttcgatgcacatcggccacctaatgtagcgcgaacggattcgtttaagtgcgcaaactcatgaagtaggaaggaacagaaagtaagcgcaccatggaaccaatgtatcgggcagaatacggtttctttccactctcctctgaagggtacttgattgagtcgaggtagttcctcgtgggctcatggaagtagagggagtttccctcgttgaacgagtagatctttcctctgtcaggcagcttaatctgtggatagtgcgcccaaaaaacatggacaagagagtgagacagattcaaagataccgcctacgatggagaaagattagcgacatacgttggggtgggtaagaataaactctccgagggaactgtccaaagtgtatccgttgactccctggccggtggtcaagaccaagttggcggaagaaccgtacctggatcgatataggaatacgtcagtcttacgcatttccagaagacgtattgataaccttgttgtaagaagcagaagacaaacattgtgtatccggcagcgaccatctcggaaccaggtcgcaatacatcttcaaccgttcccttggatccctcttgctgtttatcggaagaaatagatttggtagagatcagttctgtgatgttctagttttcttcgtcatgagaacgctgcctattctagcgaaggtaaagctggacgaaccactcggtagattccaaagatagtaccgatgttaacaccggcatcgatgttgctgcttccatcaagaggatcaaacacaacacagtatgttcccttctggttgccctcagggacaatgatggcatcgtctcgctcctcggatacgaggacggcgcactttccggatgcgatcaatgaggagaccatgatgtcgtccgaaactaattttgcatgccagaagggaagggtctctatcagggatgcgctctttatttaccaatagaagaagagcagcgaaggatagggactcacgaatatcgagcttcttctgctcctctccttgcacgttggtagctccggccagaccgactctgcgattcggaagacaagtatattctgatgtcagtattctggaacgaataacagaaacctgacaacgtatactgacaaattgatcagcccagctttccggacgttgctagcgataaactttgaggtaagctggatagcgatcaagagcaacgtcagatctccagatgcggcagttccaaggttctgctgctgagtgagcacatgactacgaagaaacgtaaggagatggatgtcagtcggaagaactctcgagcgatcatcatatgcactctctttgtgctcgcacccgagcaagacgactgatggcaagaacttaccgggtaagcgtcatgatctctgtctggatcggagtatcctgaggagcttgagctttggacatgatggatatgatctgtgtggtctgagtagaaagagatgaggtcaatgatagatgatagatgatagatgtacgtggaggtctgaagcgaaagaacgaaagagagagttgacaggatggatgttccttcttaaacagggccgggtgagtgcggagcgatgcggagctccatcggctttccacggggcatctccaaattatcccggtgctcggcccggccgacccccgggtaaggttcagtttgttatcaccttttatcctaatacagactatacgttttttgtagtgcctgtttgtagtcgttccgtctttctcctttgctcggtgagcgatacggacaccgatcgtagtctcggctcccttgggagggttgagtatcaaacagttctccggtatcaccgtcatcggttgcatcatcactatcacctttcattagtgtgttctccaagatgaggaaaagaagtctaaataagcatcagcggcagtagctgcttggccgggacatgttcatttcatcatgatcagtttgaaaaagaaaggtctgagtaatcgtcctaagtgaatcaacgtattcttgagcagaagaggataggcacaaccacggctgtgcattagagtacaggccgctcgtcctacgtatattcaatatagactagaagaaagatggtattgagatgatcgacaaagatctgattggttttcactttctctactaagactagatatctatcacagaccacgtattcacaaatttcgaccgttcgcggagtatcgataacctatctctaacctatcccaatacccccctcatcccgtgtgttattctactggatttgcgttgaagacagaaaatctcaacttgatagccagactgaattagatcgacacatcagttctatattcgtatttgatacaaagaaaaaagagagaaaaaatgaacatactcgcttcagagtctgatcatgtatacgatcagttgaagtacctggaccatcaaagccgagaaaacttcaccacacgagtcaaccagagggaaagcatataactagccttcaaggcaatatgctttccacacatatctccaactggaagaagaggtttgcctaagcgtaagccgatgagacgacaacgtaagagcaagagcatcatgtcgtccgagaggtcaactcacgaaattcgtctactggcatattcctacgttcatgcccaatacgtagacggatatctacctccatcggatctaggtcgagtcgaagaggctcagttgacgccactcagaaaaacagaccggctccgccaccatcacctattctttctcgccagctccgtttgtcctccttctctatctctgcagatgtcacgtacttccatggaatcatcacctagcaagtttagacccaaaagagagtaataaaacggaagaaagaagtcagcatggcaaccaaacattcaggatctacagtctccctgctggtctgatcgatgagagaaaaaacactcaccatcccaacatctctctcaaacctcggtccctgatcccctgcagtaggcttactctctgtcgtctgatctaggatgatgttttttgtcttgtccgtacagatgaatgttccggtaaatgtccggccatcttgaatagagattcggaaagttttgttaagcgattctcgaagcgcctggatagctggggtgtctggtctatctgatggcatgggttccaagagtttgctgtaaatgtgatctgcagaagaaagggtgtcttcattcaaacctatcaagaagatggagcattccggttgattttgccacatgggtcgttcacgtgtttgaagttcaggctgtcctgtgtagatgctcgtccaacattatccatccgaagtgtatttgatacactcgatacccttcatatctcgttcaatcatagaagagcgcatgtcatctttcgttagtttgaatcttggagatcactatttctcacccgagtatctgttgacatctcaacacatatgcacccatgcgcgcgcgcgccggcttgatacatcaatcctataaagccttttgctcctctagatggcctctctcagagcattcatcaagagattcggccatactctggtgcacccttgatcagccgagaattcatcttcagatcaatctccaagcaagacatcggatgggttgttcaagttctggagatgaacaacgaggaagatgagttggtctgttgggaaggaggatatcgcgtcggaaagccgctggatgaactcgtgagtccgtgtctcgagtgttgcttgatatcgtcaaaatgcaaaactataaaaacagcagaccgatgctgattcactctagttttgggggtaaactctgatggaatctcaacaaccaccgacaatagtcagagaaaattccggattataacgctgccgccttgtgagtttcaatcctggatagagtctggatgtaacgacgcgcccatttaagtcgatccgaggactccgcgtagaagggaatggctgacgttctaagcccttcctgttcaaaatacctttctaaacgttggacgacagctcagaacgaatggcttcgcttatacgagccgggtatgtgcatttgactggccttcacctttctaaagagaatacattcgaggtctgtcggttctgtctccgtcatattcgcctcgccctgtgggcgtcaaactgacaagaagtgtacatgaaccaagtagctccgtatatcagaccctcagagaggctttagagactttgtgatagacctcaatcgaaaactttctggagtatcagccattgctttcgaattcttagccgatgtaagctttcgcaatcgagcacggtatcacgaaagcaagagaacacatcgattgagtgtctttgtttgatgtataaaatttgaactgacctctttccatgtgggatatgttagtcaatccgtttcctctctcagcttgggccaaaatcctgtgtcaacggttgcgcgccagatatcttaacgaagcccatgatccgttctagtcctacgccagagagtatgtactcatattttctctagatcttcgagctgatacaattttcaaatctcttatcaataccttgatgtttcaatcttagtttcctccattccaacatcccctacacaatacaagatactccaggaagagctagtgaggtcaaaagcgaccattgctagatatcagcagtcaatcgccgagagctcaggcatggtggcaagcgcaggaattgattcaaggacgcgcaaaccgctcaagagagctcaacagttggtagctcatcctcattctaaaaggtatcgtattgatgtatcaaacacaagacttttcattcaagtttcctctgaatacaaaccagcccacttatcgaatcaaatcaactttgtatttatttagatccagggccttaccaccgccttcgtcatcgtccgctaggagtaatcccagttctaaatcaagccaacaagtctttcagccatttgatacagacactagtgaagatatcgatattgaggttgatagttcacgtgccataggtagttcgcgcaagcgcgcgtcaagagtcaagagagaagaggatgaaaatctctcatccgcgatatatacatctaggtcgcacgtaatcaagacgtctcgggcgttacctaaagcaagtcatccagcgtttgattcggccggctccagcgctgatgatagcgacacgatcttcggaaaaccagcccagacatccagcaagatactcaccccttctgtgaaacgaccttgctttggttcgttttctttagattctcttttttcttcaaattaattcagtctttgttcttctgtctccacaacggaaacttgactaaccggtaggctgtcttttctcgttctcactggacgacaaaagatgaaacaaagcggacgaaatcaatggaagctcgaaagatcaaaccgggcgcttcagacgatagttgtacagaaggttcagattcggaacagacgatacctacctcgtcgctcttgatccgttcgtcttttttttttccttttctcaccttctctacttgcaatgaagaaaaagagagattcttgtcgattggttcgtgatcttcatagatagatgtaaggctgactatatcattttctcttgatttatgtgatcgcactcgctctcagctactcaaacgtcagacttcgatcctcagtcaatagcccagacctcggataaagtgttgctgtcgagcgcagagcattcgtgagttgtgtttttgtgatttgccctctactgaagagataataggatttggatctgatacctcaggtcaacgtttggtttcatcgtggtaacacattaggcggttagatagcgacacggacttggatatctaatactttgcataaccgctctctttctctctcccttctctctttgatcctcagctggtctgactcctgtactatcgaaccaacgccgcacttgttcttctacacatcttctttgataagttcattgattagatataggttgtgtctctatcacagactgtatccattatgttatgtgctccccttgagtaatcatgcttctttcaaaacatggtctattcaagttcggtacatacatgcatatgtattcaccgataccgtttcttagctcgtctggattgaaaccgatccccccctccctaccgacctaccaacttttcttttgcctttccggatccatccgaggcaatccacccatcggcttggcctaatcggagttcatccaacctccaagcgtcctgccatgtctctagatccatcttagtttgacctctgctaagagcaagagatcgagcgaatttcatacggagccctaattcttcccctgagagggattgtgggccgtggatctgacgatggttaacaaagtgggattggattgcctggtgggaaaaggaagaaacggatagtagacaagaagaaggaggaaagtcagcgctggaacagagatgtatggtcttggttctggatatataccacatgtacacatgtgttgtgcgtgaatgaagaaagaagaaagagagaaagaaaaaatgaacctccgagacatcaggcggcacaacgagcgtgccttctctggctctagcaatcaacgctcggaactgattcattcgttcagatcctggcaatgcagcctcaacttcctcttcggtcgcatatgatttggaagggctttggaggggaatcttgacgtcaacctattttttgaggaaggaagagtagttcagaggaggtagagatgaaaaatgaaactgataacaaagaagaaagtcgagagcatactggcaagagagttcctcctttcgcatcaccgataactaatacgttaacatcctgatgagaaaagagaagaatagatgaatcataaacagtcagattagcgatgatctatacacaaagaaggatgaagagtggtgaagaatataatacgacacgaaccatagggaaccagaaacttgagaaggggaagctaaactcgattttctgctcacccattacctttttgattgcttcaaaatttcctagccctctttctccaagaacacctccctcgcctagaccggcctcctctatccataacgtacctcctttaggtagctggagtgcgcccgcttggagatcttcgttttttgttgaagacgggtgaaagtgagatttattaagggtagagatggagataggtatagagtggaatgttgggagaaggtgagggagtaggtaccgaagaggaaggggtgtggattggggaggaagaagagaagcggtcaacggatgaagaggcggttggcttatcaaatgaattcagaagaggcacacataagttatggttggatattggagcttatctctatcaacttgaaaaaaagacaagatatcttgacgaccaagcttactttcgttggcaaatcaagcccaatacccattctccgacccacgcttcctcgccacccaatccaatctgacagatcagattcctcagctctgttcggatagcgtgccattcctttcctggctctatcaagggaagtttatcgaccggaacgagagagtcggtgtgggaagtcgttttgagaacatgtatcgtaggaagtagtggcagagaagagtcaggggacaaagaaggaccggatgaaagtagaggaaacgctgaaggatcttcagacctgctcagtcgaaaggaagagaggattagtagaggagcaacgtataaggagacgtgtcagagcaaattgaagggacggacggagcaaaggtaaggagtccaataacagtatgtatggtgagcggtgaatgagtcgagtcatcgtagaactaattcgacagccaggaaagaggaaacagtatgagataagactggcaaccattgcctgtttcattcgtacttctaccagtacaaagcttaccttgatgaacgcgcctgctctttcggcctcggagccttcacctgactgcacacaaggaaacttgtgggcaatcgatgggtgaatctcaatgggtttcgggctggcagagagcgagcgagcgttgggaacaagagtcttatatttgtggattgattgatggatgagagaccagaggttgagcttattgatggcaagcgagacagacaattcaaaactgagagagatatcctcacatcctgcacccaactagattctcccgggacaccaactgcccaaacgacggccctctctttcaatcgcgagtagtcgatgtcctccccttgaccggtagacccagactcgggttcatctgtttcaagcacaggcatgaacacttctggctgagatgtggtatcctggagcatacatctgaatgagacgatcgaattgggagcagactctgttggacgaaacgaaggaatggagtgtatgtcctggagagcagagagaagagcaggaatgtctgcggccgtttctgctgacagaggcaacacgtatcagacaaattccaaggaatacaatcaccagta

SEQ ID NO: 1752 - DNA, 7682 bp, Xanthophyllomyces dendrorhous
caatcaccagtatatatgagcatacacaccctcttgagccggaagctctgcgagagctgttctgaggatgtctgtggtaccaagtgcgctcatgatggatgatgggaagaaaggacgaaaaacagggaagacgcgtcggatttcatttagtttgagacgcgtcgacgcgacttgatgatgtacttaagtaataatcatatatatcaaacattcacttagataatcgtcatcggatcgatcgaacttccctcctccggctgacgttccgttttagccacaaacgaccatccaaagactttgaccctttctgaccatctcaacaatgtcggccgctcctgcgactccacctgaaggatctccaaacgttaggccgccttacaatgaacggtaccatcccttctttgacgaggcgatgaaggaacagtctaatgaggaacaacttagagaagctaggctgaagtggtggaacaacggattggcaaagtgcaagcaaaacccattcgtgcccatcggttcgttcgttctttctcttcccatcttcatcgccgtctccttatctatagacccgtaacccttattccatgtcgtgcttgggaacaccatggctcatctggccgagtggctgatgggatcggttacggacaacgattagaaaggcagatgagttaatatcgcgaatccttttcttccttcccttcttccaggtatcgctgctacgtgttatgccatgtacggtgccgttcgatctatgcgagcgggaaacagtgcccagcttcaaaaattctttagacttcgagtagggtacgtttcgctttgattgtttctgttctcgttccccgttaagctttgtcctaatttccctcatgtttcgtccacctttctttcctgtcggttttctttagagctcaagcgttcgcaattttggccatgcttggaggaggaatgtactttgatggagcagaccccctcaagagcttgggcacgatcccagacactgtcaagcggtcccgtggttcgtagttactatcctgtctactcattagtcgtttgactaaaccgtctgatttgtttcgatgtgaacccattttccttcaaaacctctgcgacgtcctttccgatcttcaatcgtcttgttgtccgtttcatttatgcgcaacgtagcgaaacctgaagagaagaaacaggccaaggaaacagtctacgaagctcctggagagcatgctgaagctacagacgagcccgtgaagaaggcgcttcccaaactgtcacctacgaaattcactcctcctcggttgaacgtctctaacaactcgacatcggcgaacgacccggcaagcaacaactgggcaggcgagacgaaggaggaacgggtggtgaggatgacggaggcgctcgaggccaaacgaaaggatgctcttagggagaacgagagacagagagaaagactgacgggcaaagtcagggtggctgttgatgacatttaaatcgagatttcttctgtgttcgaacgaagatcgaagactaggaaaaaaaacgaaacgtagttgattattaaaaagagagtatgcgatgacttgactgtgagttctctttccttcaattccctctctcttctatcttgcgcttgacagacttggttgtactaacttgtcactcagcatgttcttgcctttcctttttgtctataccctcccccatagatccttctcttcttttttcatattttctttctctgatttttggttggcttcttcgacatccatgccaacttttatccagcctatctcgctcgcctgccagctaggtctattacccaattaaattcttctcaattgcttcccatttatcttttaaaattatacaagagaatgtcggtcatctttgtttctcatatccatgaacccatcttatctgtttgcctcttcgcttcttctctcttcgatcttcttcctctttaaccgtcctttttgttttcgcatatcatgttcattcctgcactgcaagagatgtcgctcgaaaaggaaagcaggaaccccactgtttgcatctcctcgctgtaacacagttatttcaaacctttcctacatgtatcaagaagaagccatatccctcaactagacacatacgtatcggaccgagcaagatggtcaaagaatggttaggatcatgttcctccggatgagacgagaaagatagaaaaagagacagagaggtgaatcaaggaaaggagacgtacgaatcgtctgaagacttcgtgtcctctccgtaagtttaataatctgatccgctcgtttgccaaatgagctaatttcgaccaccaccaccatcacgagaaggaagaaagaaaggaaaaagtttgcgcacaaacacaatgtcagtcatcgcttttcttgctctgtgtctgtccgttctttgtgttttcatcatggctcccttggaccgagaaggagatcgagaatcaatagccacaagcagacgaacgaaccgttgtcagacgcttgacccaacgggacgtgcacagcgttcgctccaaacaccttctccaacatccgaatccccgggaccgagccgccctctctgatccgtagaacgttgggcacaccccacacgtcggcaatacaacgttccataagaaggtgttctggcgaagaaaggtcgcctagccagtaatctgctttatgagggattttgatctgtatcaagaaaataaaataaagtacaaaaggatttccatgaatcagattgtactcgcaagatgaatgctcagctttggaatagcaagaaaaatcaagcgagagatccggcggtaagagaaagagaaatggactcacgtcgatatgattaagagattgcaagcttgagaacgagctctgcaaaaactggacgatgttgctcgcgatggattctaagtcttggtccgggacgattcggaaagaaaccgacgcttggacctgtgatggaatgacggttgaaccttaagtaaccaagaaagatgagtcgagttgaccaagagaaaatacgatcaaagaagagtttgattccagaatcagcccagacgatgatcgacagaagccaaggccacaagacggtgaaagaaccaagtattccaacagcacatagactcgacctctcggcgactgagaggaaagaagaagaaagaacgctcacctgccatgctacacgccgttccctttccgatctgagcgatcgagaaactcggctcgcagaacctagaccgcaagttctgaggtgtcctccctgtgagctctgccagtttctcgtaaagcgctctttccggttcgtccacagcacggacggattcatctagagggggaaaacacaagggaggccacccggatttaaatttgatatacatcaagtcgaccgggcaatagagacaaagagcttacaaaagtctgggatggcaattcgctcgttgtccgatatcgtcgccagcagacgaaccctgatagaacgcaagaaggacagtgtgttaatacagagaagctgacggaaggaaaggagcaaacatacatatcaagcatcggctcgttgcctgctcctccttcaacaccagaatgctggtcggcctatgataggtgttaagtgtaatgaagagaagggcaggaagaaagattgagcatgtcagtgaacaatacagaggacactaaaaagagtcacgtaccttatcactagtgatctacaagcatatttaggcaaagaagaaagggaagtagcagtaagatactagatcgtgataaggataggcacatagagagagagagaaagaaaaaacacacctgaatgctgacatggacgactcctcggagaccgtacaagatacaaggattgacttcgtctatccagcttgaattcgacaccaagattacatcgacatctccgatctcattctacgcaaccaatgtcatcgagccataatgatcgtgtggagggagagagaacaagagcacccggaggtcagtgtatgtattctgggctatctcataaagcgagaaggaaagggaagcaacctacccgatggctttgagtggcttctaggagaccagcactgcctgtctcctcctctccttcaatcaacatgacgagatcgacctcgagcgagcgttgttccaacaacgtcgacgccgccgttgccattgccagaatcggaccctgttgcaatggggaatgtagatcgaataagagatgaggaggaacgttcgtattcggtcaaataaacggaacaagtaatgatcaggacggaccttgttgtcggccactcctcgtccatagaggtatccgtttcgggcatctaacgtccaagggttcgaatcccaactctcccggaccgcactcacgacatcataatggccttttaggaagaccggttgggaaggcaaacatgtaagctactcgagagtaagtctcttgtcgtagcggaagttgacctaccatagaacagcactcgcttctttgcgggtctatcggtctttccggtgaatcttgctagcaccaaaggattcttgcctagagcaacaatgaatgagggagttctcccagagatgtttagttcgatgtcaacacaggccatgacacgaagactcaagctcttctcggagtagtttgatgttgtcttggataaactcaccggcagctccggtaataagctcggcttcggcccctagttgggtcaatgtgtttttgaggaaaattgcgccttgtcgacagctgtgccaaccaaacagagattagtaagaaaaaagggaagtcgctccaaacgtgaaggcgaatggagaagaggactgactgttgtctgtcagcattcctggagactgtgcggtaggagaccatttttgatagagaatagattaatgtatctgtaaagcgaacgataggaaattagtctactttctcggaacacactcttcgggctggaagaggaaacaccctatcatctgcaagcttaccaccatgggcctcatcatcatctttgtcgacatctatgagcccatccatccgcgctttgacgccatcccagacgtgtacgccttctgaaccaccggtaactagctgtgccctgccagacatatctggcgcagtggccatagagagaatggaggatttatgggcttggaagcaggctgtacactccaagctagtgttccatcgctgagggaaagaaagtcactcccgagtcaacgctatacattcatctcgaaggatatcactcgaacatggacacatacacagataacaccatccaaagaagcgctgtagagatcggtgtctaccggtgaaagatgcaatactggagcctaggtgaagagacaagggaggaaatttcgatggtcaaggtctgaatttgccagaaactccgaatatcgtgcggctaacctcgtgtcctaggagaagcctgatgattgagccagtctccagatcgatcactttaattcctccgtcctgcatccctacaaagagagttgtctcgatacatgctagagaaagtacggcgctatcgtacgagcctctgtagtgaaagggaaaggaaaagaaaagagaggtggtgcatgcgaatagacgagtgggcggacagaggcagtgtacgatcagcttgatgataatttgtgtaggaaaagaacagatgaacgcgcgcgcacttaaagtcatagacaaggctcagcgagcagtcgtcctgctgttcccaaatctttcaaacaaccaaagaaaggaacagagagtcagtttggttggtcgggtctaatttttcttgactcttttgctcaggacgtactctgacgtcaccggcaccgctagcactggcaagccagcttttctgattactaggatctttgacccaggttaacgtgtacacataaccatgatgagcggtaacagagtttctactgtccactgtgagctgcgggactgggattttgttcaaaggtggcgagggtggagcggatggttgtggactggacgcaaagaatcgggcagatgtcggattggcatgcatgggttttatgctagagaagtccggacgggagggttggggcaagtttggtggtagcatgacccactaagaagcgaaggtacgaggtaacaagcatgaacgagtggagaagggagacagggacgagaaggaatcaaaaggacatgagaagtcctgcttgtcagcccaaaggatgtacattgctcggaaagagtcccagaaagatactcacttgaatcgaggtggactgacagcccatgtagagaaccgagttctgtggggaccagaccacagagaatattcttcctggtgtgagaggatggataacgagaagaagttggtttgtgcgcaaacaccagacctgtaggatttaaaaaggatttgcgtgggtgattctttcttgtgtatccagaaatgatctctgctcactttcactgttccatcgcctaagggagagacagcagaggaagagatttgattgtttagcttgatatgattaaggcttgcaagacgaatagtgacgtttgataggagagggaccgacctccgctactgatgagccagttcctggagtcatcttctacaatcaagagagctgtgagtcctcctggttggatttacgttcgtattcgagaagggagagataagcatcacgcttgaatgagtgcacagctgcacggtgaagcatagacaagtacgacaaagctgaagcgtaccggtatgaccaggaagggtacatatccgttcgtaagtcgatctgtcccacacatggatctctggtgcttcgcagcccgaaaagatacgatccttggatacgcctggaaagtgtatatgcgtgtgcgtgtgtgtgtatgtgagaagaagacagaaagatagagaggcagaaggacgggagagcagagaagtgcatacaaagtgactggacagcttggttgttgaattgaagggagtgagctttggtcggtagatgaagattatcttttgggccttttctacgagatatcgaggctggaatgagcagaaggtgaatggaagaaaagaagtcaccaacccacaaggttgtgtgagctatgtgtttgaaaggaagcaagccaaggctgaacaagttgtgagcaaaggattaaacgtcagagtacggacactctgggagttctatctgttccatggggactgataaacttggagatatccacaggatgagtgtcgaccaactgcagggtcgagaaagcgtaggctgatggaggtgacccaaaggcgtcattgtggtgcatgcggtgttagggttaggattaggattggctgcgtcttttctggctctcatacagatgtgctcttgagcaagcgcgctttgctgtgatagtatggcagtctctaccagattgacttggtctcttcacggacgacgaaaaacaagacgagcaagaaaacatccggtcgatcgacgagtgtgagagagaaggaagaaaaaaaaaaaacaaagaagggagagagaatccatcggactctgtgcatcagaaatgtttgattcttctttactgcttcctctactttctctggctacagccatccctagaatacccttatccgacgaaagccggccggtgtttgggctgaaccgagctcttgtgtgggatgcgtgtgggtgtgtatgtacatatgtgtgtgtatgtatgtatctgtgtgtgtgtgtgtg

SEQ ID NO: 1753 - DNA, 1353 bp, Xanthophyllomyces dendrorhous
tgtgtgtgtgtgtgtgtgtgtgtgtgtgtgtgtgtgtgtgtgtgtgtgtggatctgtctgatggcagagtgcggtgtctctgtgtccctctaaccgatgggatcgaaacacaagcaaagcatcactgagccggctcgtttgaacgccgccgtcccggccaccgaaagaagcagcaaaagcagccatgacggcaatcaaagctgtagcgttcgtttctctcggtggtcacaaggcgaacgagagacgcgtcgggggtgcggtacctgttgaacgacgcgtagacgcggatcaaacgcgtcaggcacacgttcatattcgggcgattgcggagtgggcgaacatatacacacataagacagcgaggcaccattcaaatttcgctttcataaatgtcatctgacccgacccgacctgcacctttctgcttctgccgcctgccgcctactgctcgccgccaggataaccgtccgatcgacctcgtggcccttaagcatcaaagattcttcttaaaaagccatcgtgtttgtgttcccccatcgagttcccgacgtcgttcttgctttgatccatagcttaatccttgttctcattgtccaatccatagttttataccttcttaccaacacatcacatctttcttcccaatgtctcacatcccagacgtcgagaaagccaactctgctcatctgaacggcggctccggaggtagcagcgttccgttgggtgaacaccaaggtcaacagtactacaatcccaacctcatcaacagagctatcactccgtgagtcaaagcaggccatcagagtgatctcaagaatggtatgaagcgcttgtgctcacctctgtgttcccgttttttttccttccccgctctcgctctctcttttctcagtggtggacatccttgtttgtctcactttcttctttcttccgccttgccgtctcaattggtatttggacctcatgcaacggcttggaacagagttcactgactatgcttcttccgactgatcacttgacaccgatgcccacactcttccttgggatggtatcgctttgctgtgctctcttttgacaaatttcttcctgcctcatagtggatacctcccagcctgctttccccagttagtctcgtttcttgtgtaataacctaaattttaccgatcgtctctaatcccgcgcgtacctgtgttcttcttctcaactccttcttactctcatagtctaccaccgaaagctcggtaacccagcgtacgaatcaatccatatttctcttctcccttggtctcattcatctgtttgatgttcattcttcttattggttccataattttccctttttttttttttttt

SEQ ID NO: 1754 - DNA, 42530 bp, Xanthophyllomyces dendrorhous
cttccccacagtcctctaggactcttggctttcgcctctacgacgtgagtagagaatttcacaaaattaaatagaataaaaaaccctcctagactttctcctaattggcgcgcttaccctctcggtcatttgttctcgatcctttaatctcatcttttcctttcgccgtccctgtcttcgttcccatcgccgtcaccgcccgcagtttcatcctatcctggttcaatgtcggaatccgaaacattgacacccctaatattatcctcagtatggctttcgcctatggaggtctctgccagttgcttgctggtatgtgggaggtaagtctacaattccttcatctggttggtacccgatcctcttacccttgttctgacaatcggtaccctctttcagtttgccgccggaaacacctttggtgccaccgctttctccagttacggaggtttctggatctctttcggttttatcgtacgtcctgctcacagaaaatcgtcaatcttatctcgtacctttcgcctcttatttgctcacctggcgatctttctaacttaatccagtactggcctagctccggtatccttactgctacttatgctccaggagagcttgcttccgttttgggaatctatttgatcgcctggttcatctttaccttccgtacgtacggatcttgaggtttgtaatatcaaaagtgaacctcacttagcttaccctgttgatctcgcccatccagtcatgatgctcggcaccctccgatcctcccttgctctcttcctcgtattcttcttccttacctggaccttccttctgcttgctattgggtcagttcgaaggtctcctccattcctatgtgtcccaactcatttcatacgctaatctctttccttgtcctgccctgaatcaccaaccaacagagagttccaggcgagcgccaactgccacaaggccggcggagcgttgggtatcatcaccgcctttatcgcgttctacacgtacgcattctttctcaagagtcaagcgtctctttcttttattgtgccaagctgacgactcacacatccttccttttttactcttttcaaagcggtatctctggtatctacactgccgacactactttcttcacgctccccacctacagcttggccagggtacgttctgtgatttctctctggtccttcaattcattttcttgttttgctgaacctggacctccttttcatttatgagcaggaggctgataaggcgaagaaccagtaaatctcgttattgtttcacccggggcttgacgttgcgcagctttcggtcgtctctcgaccactctccaacaattctacccatttctcctctccgtttcttcttctctctaatcgcttctccttctagcatctctaattcgggcttctcgacataccatcactcaaaactgcttaccttctgacctccctcccaatttgttccattctctccccccattctctcatctggatcctctcaaaccgaacacgcgcaagtgttttcttgagttcatcctcatttcttctctcttctccctatattctatttgcagtttgggtagtcgtcgttggtttatgtaacagtattcatccccttcttctcctcgccccgtccttaatcattcgctgtacatcctatggttcctcctttatgtgttctccattctttttacatcgtatagtttgggtccgccttctttcagttctcgatgctctggatatccgctctgatctgttctgagggaaaaaagaagagaaaatggaaaaggagtgcaaggagcgcaaatggactttcccgatttcttcttcttggctgactaatcaaactcccatcaactaaatgaccgtaatcaagagatcaacgattagacatcatctcttctcttgcaatccaatccgtcatcccattatatcccgtcctatctgaacgaccactcagtcccgatatctttgtatattccttatcagaaccggctaatcaagcttgatcgctcgttgtaataatggttgaccttccgaaacgaatcatcaaggttcgttatgtcaaccgatgtctactttcctctagcggtcttttcttcttctcttctagcttgggaaccgaagttgaactacctcgatatactcacttatgatgaacctgtatctgtcggtctcgtctgatctctactctctgctctctgttctgttctgttctgtcatgttctgttctgttttgtttcatgttgttggctggtcttgtcgatctttcctacggcaacaacctctgctccaacttgaacttaaactctcatgaaaaaaaactctttatctctatggacctgctgtctcgcttctactcgaaaactttatcggagataggaaacccaaaggttgatgtccgatccagctcctgggataacagcggtgccacacgaggacaaccttcggtatttcgatgtgatgatcaccgggcctgagggcagtccttttgctggttcgttaacgggttcctctcctctcctcttcactatccttcttggtttccttcttctcgatcctactcaagtagctgagctgggcttaaatagaaagcggagatagtgaagtgggtgttagatgtgcaaacaggttgggatgatatgatgacatcccggcacagcattctaatcagaggacggccacgataggataccatgttttcctcttgcttctctatcttcatttggcccaaccaaaagacggcgaacaccaaactgatgaacgaacttattctaccgtttgtcttgtcttcttccttatcttgtcctcccttcgtataggtggaaagtttaaattggagcttttcttgccggatggatatcccatggaagcccctaaagttcggttcctcacaaagatctaccatcctaacattggtgggtctctctttctcttcttgtcgtatcgttctccatccattctgactgtttcggcttgctaatggtgtatatctgtcgcttttgatgtccttctcaaaagacaaacttggccgaatctgtttggatattttgaagggtatgtgaacatattctctactaaacgcaacgcctagaaagattcatttgttcatatatactaaacacctattcgatttcctcttccttcaaacatactccaacaaacgaataatgcattgttgtcaaatcagacaaatggtcaccggcccttcaaatcaggacagttctgctttccgtccaggctcttctcagcgcgcctaaccctgacgatcctcttgccgttagttcatttcgttctcaacctctcatttacgaggtcataccagactcacacatccatatacatccacctgcgtacactcggcgctgtctctgttctgatatcataacaattcataaaaatatcgaaaccggaaaaacttacgcagaacgacgtggccgagcattacaagtctgacgagaaggcggctcaccaagtctcgagagaatggaccgcaaagtatgcgatctaaagggggctctggtagagtgaagcggactgggtgatatatacgcatctctttaatttgcctggatcgaggttctcttcttttctcttcgtcagtctttcgtgttcttcgttcttcttcgtcgtcttggtttcttcccgttcggtccggacacgaacaccatccttctcaaacgttctcatcctctctttccttcctttccttcctttccttcctttccttcctttccttcctttccttcctttccttcctttccttcctttccttccttgaaagttcttgatattcttgattctcgatacagtttccgaacgtgcatctctctctctcctttgccttttcttttgttcatgatcgaggtcgacagatggctcgttgggttggagaagatgtatgaaccaatcaaaacaccaagatatcggaacccggatattgaagccaaatcgccagaacgacacaaacgaaaagcaaagagacggccaaaggggaaaaagaaagaaaatgggttatgtgcatattcataacattcatgatttatttaccggtctcgtctctgatggcacctccgtcttgaaagttgagaatacctgcttcgctcatcagaccgaccttttgatatcatagcatgtagatgatgacaaagaagcaagaaaaaagaaggaaaagatccgttgagtctgtgctttacatcgactgaatcacggagggacaagagagaaggaggaaactaaccactttctccgcctcatcgagtttcatcgaacccaacaccttgttgacctcatccaaactctccttcttgagcgcgtccttcatcttgttctcaaacgaatcaaagatctcccactgctgcatcagataagccctgacctggacaggatcgaggccctcagttccctcaccctccaaacggatttcttcaggtggaggtccttcagggatattgaacgacacactggcacctccctcggcgaccaactggatctgttcctcaccttctccaccggcggacgaggacgctttctcagcggccatctctttcacccgagtggccattcgttggtaggtcgcttcgacgtccgactggaagaggtgtaatgcttttttgccagcttctcccggttggttcatcctgagaaagtgtgttggtgaaagagagaagaagaaaaagagatgaaccaagtatagacgtaagaatgtggcctgcccgtaaagagaatgagagatacaaaggaagataaagactgagacaaacctttggaagaagagtctgacaccgtctcgacctaatttcctacagtactggatcaacagccccttttccacacaaacctttgccttgactttctttccgtcgatttctgagttgaaggcttccagcaaaagagaatccgtgttcgactcggccatgatcgatgggttcgactgaataaatcgaagggcaccatcaaagtctccgtatcggatgttggtaaactccttggcgataggagtcgccatcgggagatcctcatcatcatcagattcaaccgttgccgacttctaaagatagaagaacgggttgagtaatatacacacgtgaattagcaagatatctgaaaagcgatactaacagatgattcagggttcaggacttcgatggtagtctccttctttttactgctcgccggcttcggcttctcttccagaatgttttctccggccttgttgacaaactatgtacgcgcgattgaaaacaatgtgtcagctgagtaattgctcaacagaatagacaaaaaaagggagaaaaaggaaagatcgatttactccagagctgaaaccttcatgaatgtgttcactggtgatcttgctcttctcttccttctcttcctgctcgatcaacgtcccgcactcttctgtcctgtgatcgagctttccgttatggaactcgagcctctccgtcagcctgcttgctagcctgtccgtatcctctccgtcttttgcgccgtctttggcttccttggcgacttgctcgagcaaatggaggagcatcacatcatatgtcggttggtttggtgcaccggtgttgggcttatcaggagagggctcgtttgtcagttgagagacgagagaagagaatttggaagtagcctctttaggaggaagcgtcttgagagagtcgagcagagagacgatccttggtcgaagggtctcattcaatgagatctctgctcgaagtttcgcaatccgctgttgtcgctcttgtcgtttctgatgaatcgactgctgcttccatctagaaagtgataagaacacgaccggtttggttgatgagcctgacagatcaagatcaaagacttctatcaatcaggaaacagcttaccgaatcatactctttttgtcgatgttgggatgctcttcgatatcagagtcatccgagagctggcaacgaagaacgaacggccagatcagcaagtgtacgtcaagcctaactgaacgacgaccaaataaccgagggaagatacctctagcatatcccatttggagtagttcaaaggcatgatggaaaaacgagatgtgtcggtgatggacagggtgaaggtaaacggtcgaaggaactagaaaagaaggatggagatgacgggcacaaggttcaaaaaagagtattagagatcttgctgcgcgtttgtagttatccactagaggaaatctgtattattcgggattggtatttaaggcgggcaattcagatatgtattcaattatctatctatctatctatccctttctccgccttcgccctcgacattttctgcttctctcttcctaacctcctactttcatcgtccagctctactttgacaagatgcatcgcacttgcagatctcttggggctctgtccacccgagctaccgtccaggtcagatcatcgaacttgatcgtctcctcgtcccgttcttttcacagctcttatacacgctctcaggagacagcctccgcctcggcctcatcttcgtggactcctccggtaactcctggccgaaacaaaaactatgatgccgctctggcgtatattcaatcgagcatggagaatatgaacaagaagttagaagagttaaagccccgtatagagcagctgcgggagaaggttgaggcctctaagaaggcggctgagaacggaaaggagctcgactttgctgcgtttgacgatttggcaaggctggagctggaaaaggagaggatcgagaacttgggagagttccacaacccaaagaccagatgggagtctgagaacggcctccgtaagtgtttccaaggggtttcctcacggtgacgatggcgatgaggttatcgagaggtgcaagagagacaagcatgcttgtccctctttttctgttccttcttttttcctattcttgtctactgacgtcaagtatgttcgtttgcgtcgatttcaaacatgacagttgacccgacaactccggtcgctcgataccttgccagagagcgattcgagttgaaaggctcgctcgacgcccacgtatgtacacttttcgccgtcttcctcttcttcctttgccttcttgtctgatatacctcgctatctcctttttttttctttttcttacttcaaacagactaacgcgttgaacgagatgtacgtgattcctgatctgatcggtcctccttccaaaggcctccgggtggatatcgctctgcgatacccggtgtctgctccacctccgcctcccaagccggatcagtttggttatgtgaaaaaggtccggaaggtcgagacgagggatccaaaggatggaaaccgggtgatcgttggacgaatgttgcctgtggaggagacattgaaggaacccgaattggagatcaggtactttggcgagaaggacacgtttggaaccttgttcatgatcgatcttggtacgtgtgtctacagttttctcttcgtttctttcgtcttgtaagctcgtgaagcccggtggctgaattgaagatgcttcacagacgtccctgatgtggaaaaccacacgttcaagtctcaactgcactggctggtgccgaacatcccattgtcggcaaagtcccaggtgttcccgtcttcggacccgtcggtggtcggttcgtcgagcgctttcaagtcgcaacttcctccggcggttgtgccttatctggctcctcacccccacaagggcacgccttaccaccggtatgtgtttgtgctcgtccagcacgacgaaccagtgatattcgggccaaaagccgggaagggtgtgatcaagacgccaaagagagaaaacttcaagctacgaacgttcctgagggtgaactggaagatgcaggatatcgtcggaatgtcattcattcgagagatttatgactcaaaggtctgcccgaagatctggaaggacatcattcgtgagtattgtgtgctatcgacaggactctttctttagagcgcaagctgctgacggaattggactatgatctttcttctcttgtactgaactatatctagaacaaccagaggtcaagtactttgtcggtcaaccccaatcgatgttctggacgccggagaagaagaaccgggccgaggtgtacaaccaaaagctcgggatcgtctcttccggacctgatcttaaccagcgattcgttaggacgcccggctgggagggtgaattcaagaggttggaggacagtgtggattcgaacggaaacccggtggttgttgtcgacagagtgcccaatgaggtgactggaaccaaggcgtgagatagtgtatgaccaaagtgatcgacatgaaacacaaaagtaaagacaaaaccaggcaaccgaaatgacgataaaggaaacgagccaaagaaaggagacagttgacagagagcgtcaaaccacgtgacattgcactgcattgagcacggtacttatcacgagagatgagcgccatactcagggccattcgccggttaatcacccatctcgccaatccggccaaggtacaccggccgatttgaaatttatttgaccaggtgccttgccgatggccgcctcttccgccctgtcccttctttttcgttcttgttgactcattcaaggggatttttttttcttctgttcctctttcgaccatacaccttcactcaacctgggctttgtgttctctctcgctaccaccaacaccaacaccacatccttctttccgcttcatccgcttggttggatcttatatgatctacacagaacgcgtatcagacgacgtacggttatctttctttctgttagcttaatctacagagacaagaatgagaaaaagcttatcaggtttttttctcccttgttcttcctgttctctttctcctttgccttccgtctatcatctcatccattcctatcggtctgggttcccaataccaatcgacagtacatctccgaacaggttttctctgctctcgatcaataaatcatctccaacaacatcttccagcatatacctatcttccctctttcttatccgctactcttccaacccttagaaaaaaaaagttccctaagaagaaaattaaaagccgaaaaacatgcttcgatctatcagacaacctctggttcgactctccaaccagaccggtcgatcgttcacatcttcgcccctccgagcgttcatccgaccgacaaacccgctcaaggctgtcgccgctcctgccgtcggaaactaccacgaaggccagggagagcccacgttgaactctccatctgagctcgcccgaaagatctcggctaaggtcttgcccaagatccccaagcctgatgttaaacgagttatggtcgtcgggtcaggaggactcagcatcggtcaagccggtgaattcgactactcaggtgggtccccgcttttcatctagtctcttcatctctatattgtactcttcacttcttccatcttatctatttaaccgactgggcctaattcccaattgtctatttaaattcaaataatccgatttcaccatactaaacttttttccccttcatctcttcttatcctcatcacatctcaggttcccaggccatcaaggctctcaaggagtccaacattgagaccatcctcgtgaaccccaacattgcgaccattcagacctcccacgaccttgcgtccgaggtctactttttgcccatcaccccagactatgtcgcctccatcctcgagaaggagcgaccggacggtatcctcctcaccttcggaggacaatctgcgttgaacgtcggtgtccagcttgacaagatgggtgtcctcgaccgactcggcgtcaaggtgctcggtacccctatccgaaccctcgaggtatccgaggaccgagatcttttcgtccaggctttgaacggttcgtatactatctttgtgctcttactgctccttcatatcttctgactttcgggccgccctcatgtactcttgacttctcacagagattgacattcctgccgcccagtcgaccgccgtttcgaccgttgacggtgccctcgaggcagccgctaccatcggttaccccatcatcctccgatctgccttctccctcggaggtcttggatctggattcgccaacaacgaggacgagctcagagatctttccgcgaagtccctttctctcagtcctcaagtgctcatcgaaaagtccctcaagggatggaaagaggtcgaatacgaggttgttcgagatgctgccgacgttagtatttccatcagacagaccggtcttcgtttgttcacatctcagaccctgacttttctttgtccttccctctctccctcacacttgtagaacaccatcatctgctgcaacatggaaaactttgatcctctcggaacacacactggtgactccatcgtcgttgctccgtctcagacgttgacagatgatgagtaccacatgctccgaaccgctgccatcaagatcgttcgacatgtcggtgtcgttggagaatgcaacgtgcagtatgctcttaaccccgtcagcagggagtacatggtcatcggtacgtctcttgggttctttccctcgtttcaatagatctttttgctcatcaacatttctttttcttcctttttttccttcccacagagatgaacgctcgattgtcccgatccagtgcgttggcctccaaggccaccggttatccccttgcgtacaccgctgcaaagattgccctgggccacactcttcctgagttgcccaacgccgtcacgaagactaccacggcctgcttcgagccttcgcttgactacattgtctgcaagatccctaagtgggatctggcaaagttccagtacgtcgagcgaaacgtcggatcggccatgaagtctgtcggtgaggttatggctgtcggtcgaacgttcgaggaggccctccagaaggctatccgacaggtcgacccgagatacaatggtttccttccttactggaagcctgaggatcttgagaccgcgctgtcggcaaacaacgaccgacgactcttcgccatcgctcacgccatgctcaacgaggcctacaccgtcgacaggttgcacgacatcaccaagatcgacaaatggttcctttacaagctcgagaacatcgtcgccgttcaccgagcgctcgagtcgacctcgcttgaccagatcgatgccgagttgatgcgaacggccaagaagactggattcagtgatccccagatcgccgagcttgtcaagtcgaccgaggacaaggtccgagcgcaccgaaagtctttgggcgtcactcccttcgtcaagcgaatcgataccctggccgcagagttccctgcgcacaccaattacttgtacaccacctacaacgccaccacccatgatctcgagtttgatgataagggtaccatggtccttggttccggtgtttaccgaatcggttcctctgtcgagttcgattggtgtgcagtcacctgcgctcgatcggtccgagagatgggcaagaagactatcatgatcaactacaacccggagaccgtgtcgaccgatttcgacgaggccgaccgattgtactttgaggagctcggcttcgagcgagtcatggacatttacgagttggagaacgccgacggtgtgatcgtctctgtcggtggccagcttccccagaacatcgctctccgattgaaggagactggtgtgaaagttctcggaaccgaccctgacatgattgacaatgctgaggaccgacacaagttctcttctatcctcgattccattggggttgaccagcccgactgggttgaggtcacctcgttagaggccgccaaggagtttgccaacaaggtcacctaccctgtgttgatccgtccgtcctatgtgctctctggagcggccatgaacgtggtgtgggacgagtcgatgctcgaccacttcctttcaatggcgactgatgtctcgcccgatcaccctgtcgtcatcacgaagttcatcgataatgcccaagagatcgacgtcgacgccgtcgcccacaagggaaagcttcttgtccacgccgtgtccgagcacgtggaaaacgccggagtccactctggagatgccaccttggtccttcctccgttctcgttagtcgatcaggatcttgctcgattgaaggagatcgccgagaaggtcgccgccgcttttgagatctctggaccgttcaacatgcagatcatccgaaagcccggatcggacgacgaggagcctgcgctcaaggtgattgagtgcaacttgcgagcctctaggtccttccccttcgtgtccaaagtcctcggtcacaacttcatcgagaccgcgacggccgccattatggataccaacgtacctgagcctattgatctgatgaaggagaagagggattacgttgccatcaaggttcctcagttctcgtggactcgattgggaggagccgatccgttcttgggtgtcgagatggcttcgaccggagagatcgcctcgttcggtacagacattcacgaggcctactgggctgctttgctttctaccaacggtttcaggatcccttctttgaactctggtgtgttgatcggtggtgacatcaccaagccagagatgaagacggtcgccaaggggttgatcgatcttgggttcaagctgtactgctcctctcccaaggtcgaagagttcctcaactcgatcccttacgtcaaggcgaagaagatcttcttcccgttgaaggacaagagaaagttgaacgaggtgtttgagcagtatgagattcagactgttatcaacttggcccgacagcgaggtgcggacacggtcgacgaagactacgttgcccgacgaaacgccgtcgatttcggaattcctttgatcaacaacgccaggtgtgctcaactctgggtcgagtcgctcgccaagaagattcctcagggtggtctggacggttaccaggagggtcagatccctagtgaggtcaagtcctggcacgagtgggtcgggcccaactgttagaaggccgtagagttcttttctttgttctatctctaccttccttgttccttccctctctatttctcttcctaattttcccctcttgtcaaggcttccctggcctgaaacgcgtttggaaaagaggataaaaaaaagatgtgtttcatgttgacacaatcttatacatatcgtttctctacaaagttttgtctaaacatatttatatatgaatgctctatctgctatctcgggttcgtcttttcaagcattgatcatattaggaccagtgaaaccaaaaaaacaaaaacatggtataaacacatttgatcaaacaggggttcagaagagaatttgcaaatatatgtattggaacaaagacaaggaatataacaacatggggaaagaagcattacttgtgggaagggaggagggggaggaccatgaattctgttttgtcaagtcgggagacgagatcaaacaacgcgctcgaacaaacaagacgctagaccgtcgagatgcagtcggttattcataatggtaggcagagagtacacacggcgaagagaacgagtggaggaaagaagattgagagaaaaagaaggaacgggagcgaggaacgagaacgggacgtagaaaggtttagttgatagccttcttgacgtcagctttgacctgcccgactttatccttggcttcttcgaccttttcacctgctcgatccttaagagccgttgcctgtcgttttcatttatttatttgtatacccccaataaatcatatcatgataatttggtttcgcgcaaaaaaaaaagttcgtcagtacaaaatgcaaatcggacggaaggaagacaagaggaagcacaaagagaaaagtagaagaagaaaagatcgaggaagataccgacccggagttgagcctcctctttcatcatctttggatcgtcgttcgctggccagaagtaatacgccagaacggcagctccaccgatggcgacgtaggttgatgtgtctgttgatccgtcagatttggacgaaacatattttgagaaatctgggagcagtccgattagatcggcaaaaagagaagatgcacatactagactttgcggccttcctgcctaattgctctcccttggctttcaacgtctctatcgtatccgactgtggcgtaggcgatgaaggaggaggaggagaaggggatccatcgcctctaaatgacctggtctgctgtttcagtatagacactcggccgattgactgctcgccgttgtgttcacaaccaaaaagtaatcaaaccaaactgatcgagttgagcaaacagacagagtgcagggaagaagtaaggcgatcgaacgcatgaatgaacggacagctggctggacgatgggctttcgaagaatcgcctgtttgataagtgtggacgacaacatgggtttgctctctttcttctttcttttcctgttgttaccgagtaagaatgcaagatttatgaggatgggggttgatatgaagagatgcagactggacgaatggacgagcgaacatcgttgaatttatatagcgtacataacgtcgagggtaagactgagagcgcgcagagagaagacgagagaacaggcgagcagagagatcacgagagacggcttgccgctgttgctaccatcatcatcatcgacatcatcgtcgacatcatcattctgtgaaatcgatcgatttcaacagattgtgtaaagcttccatgagtgcgtgtgcgttgcgctctgaacgaacggaatattggctcgaaacctttccgatcgactcctcaacgtgggaagatagggttgatcgccgatctcatgatcaaaattgtccgtctttttggagcgtcttcatcttcatcagcaccggcactgacacaatgagttcatcacccgcattcccaatgctcatgatcagattcacacttatcctcatgcattcatgcgccagctaatttgatggtgtcacaaaaacagagaaaagatggaggtaaagaaggaggaatttccctatgctcagtcagaatatcgacatgattgcccatgtaaattcgccccttagagcatttagcattcgtgcagatggtttcatcgatcgactttgaccaccggcttgaccaactctatgccttcgcttgcaccaacatcagctccgaccggaccctcaacccgttctccattcggcggcgttaggatgtggaccccatccgggtcatgtccaccttcgatcgaccgaacaaccttggcggctataccctcaaatagtttgtagctcaacgtggactgatatctctccagtaagtcaaaaccggtggtggccgcgggtatggtttgccctcctgtagggacagcagtttccctcaactcgacctcgtctgctgctcctcgacgacgactactcgcgtccagcagctcaaccagctcactctctacagggactctaccaagaaaggtcaaagactctctccgacacatttcttcacctccaccctgtccgaacaggtacgtcacatcgttacaacatggacatttgtacccagacatgttttcaatcagccctaccacaggaagagagacctttcgcgtgaacgagagagactttgatgtgtcgagtagggcgacagcttgaggcgtcgtgatgatgaccgaggtaagcttgtaagcgattggattcagatgagtcaggagtgagagatgttcgtcggatgttcctaaaaatcgagcgagcaggtaagagagagcattggcaaaggtaaagcggataaaaaaaaaacgagtcgtgggcacggctcaaactatgcaaacaactatacaagacgtacctggtggtgtgtcgattaagagataatctagctcgccccaccgaacgtcgcccaagaattgtttgatcattccttccttcttcggccctctccaaaccacagagtctctcgagctcttcagcagaaacccgacgctcatcactcccaaccgtcgagtctctccgtcggcataaacaggaacccaaccgtctgtgctttggtgtacgccttgaccgtcgagaccaagcatccggggaatcgatggcccggtcaaatcggtatccaatacgccgacgcgtttgcccaacgaatggagtgtaagtgctagctgcacagttgatgatgactttccgactcctcctttcccagaactatgttttatcgtcccccccccggaatcccgacataaaagagacacgagttcagagtctaggtcatgcatgcgttgttggcgggttgcgacaagttgagaaagctcgactcacaggacaagcaagatggatgagaccttagacagacgtcttgttataggagtcgacgtaggaggtgcttcggtcgacatggtggcagaatagatgatgattgataatggtcaatggcttgtgagtcgctcgaccgtcggtttgtcatgatggatggaatgacgcctgaggatgagaagcacaggtatttttacacgtgacttgtacacgggtggcgtcttctacggagctaccgggctgtgcttcatatctgcgctagaattgcccggacgatccattaactgtttggtactcccgcgttgctacaacgtcaaatgaaaggaaaaatagctgtcgctgatcaaacgagagtttcccttgcacagaccgctttctttcttgaatgattggaaaaggaaagacaacgaaaataattgaaaacagatgctgctagctccgagatggaaatcacactaacacgctagtctgtttcgacaacaaaatagttgactatctgctggacgagtgatcgttctgagcgggccggtttttgtcgtcactcttgaagctaaccggatatgggaccatcttgggtggttgcttttctcttggccagcaactcattgcttgattgatcggcctcttcgtttgaatgtgcggtgattaggatactacgtcaaagtcgatacctcgtctcaaacgttgcacgcagcccactctgctttcttatccgtcgtaaccgccagtatttctatctatggactttgatcccgtgtgtgtgtgtgtcgcatatcatgcactcaagataggatatggggtttccttctctgaaaagatttgatccacagtaagagagaagaagaaaaacgaatagaaatgaacaatatcaccgatgggccgaggcgtttcgaagactcaacatccagcctccaagccgcttgcacccggtaattaggcgttcaagtataccgtcctttctttgacgtcgatcgaccaaggtaatccccggcgcttcatgtcgatgtcgctacgacttttccgttcgaaattccgtttcatcctattctccttatctccctctctctgccgatctcctgattcctgtttggtggattgtcccgatcatagcccatcagcgaaagccacagcgataagagaaagaaaatcaataaaggccgtgctctctgttaatctcacggacttttttctctccttctttttaggattcgtgtgttttccttccctttttttatccttctctttctttttacccgctgcatgcttgaattaacaagctccgatgctgaccagtggcttaaagatgtcggtctttcggacaaacacaatcaccataaaactgatcttgtctgatttcttttctgaattctttcctcttccttcctcttcttttctctttcccctcacgatagtgctgacccatctggccattgcttacctgcttcggcgtttgtctctaaagccgattcaacctctgacattgttccttctcttcgtcatcgtttgcaaacaagattgatgaccatggccgagggtctttatccggttgacaacatttctggacaggaagcacctgaagcgtctcacgtaccgtcagttgaaattcccaaacgaaacttgttcaaagcctttcggtcgaataagtcaataatagaatcgacaccgatctcgacggaaccttccgacccacaccatccacccggctctgtcttttcgcagactccgagtcctacctccgagagctctttatcactcaaggcagagaacccacccatcttttccttcagaagtacaaacagtatggtccactcagttctcgtctggtcacctcgtctttctttcgcactgtatacgtcttggacgactaaatccggtgttgttctcttttggcttcatcagaggtcatccggataaaacggtgagaaacacgtaccatcttcttccgactgttcgcctagatttatctccatacagctagctcagatcgcacctcggttggtttgtgtagtgcggaacttcccggacccgcacaagataccgttgataccaaagccggagaaacagggttcagggaagacctcgacgcaacgctagccaacgttgttcctaactggaaccgaagcaacccgacaacccagtcaacctcgtcgctttcccggtctggttctctcgatggatcatataaaccggactcttcgaaaccggtcgttccgccttccccgaaaaattcagtccgttcggacgctgcatcaagtcaagagcttaccgagtcaaagataataagtcgtcagagtagccagatcacaacgacggggagttcaggtagtacagcatccctcacatctagctctgagagagccccaagctctttcaaatgggtatcagtgatgtccactccgtcgaccaaccctcgaatgttaggcccatctcaggtcccaacatttgatcctgatcatcctctcttgccaacttttggctgtcaacgatatgatttgagctcaaccatcctgctggcgactcctttgtggaagaaagaactcaacgattcagcgggcaaggtaactcacaggcagtctatacgtgctcggttttccagtaacaaagtggaatggtcggtccccgtctttctctcttctactcagtattgcctgctgacacacgccatgtcgcgcgtcttttcttgcttaataggaaaaatcgagtgctagtactaacgagctggaccgaagagctcgctgatccctccgcgacgaacaaagtccagaaagttcttctcggatacctacatctcttcaaaacaaatgcttcaacgaccagagagattggccgaatgaaacttgacgcagagtccgaggttggtcctctcgatggcgagaatccttgtgaatccgatacggacgggcggacgaacgttctgaatgttatgctaagcagacggccaaagaaagggacgaagagaacttggggagtcttgggggatacgttgacagtgcagtttgagaccgggtaagtgtcattactcgatgtatcacaggggtttctaccaagtccagacgacaatgctaatcacagccgtcgatatgtagtgctttgcttcagaactggatccacgagataaacagtttcatctttgtaaagaggtgtgtctctctgcttggcttattgaagcgcgccttgcaagtcctgatgtggtttttgtttcattttcatctcgccgctttacagagcggaatcagtcggtctgggcgagactgctcgggaatatagatcaaagcactatcctctgacgggcgatctcagccttgcgctcgccaacatctttgaaaaatcattgaagtctcttcctcggtccggtcacgataccgcagccgaatctttccgcgactctcccatccccccgatgaccagacaactttcttcctctgctgagtcgtctaatgtgtcccgaccactgtatccccaaattgtccaatccccagagttcaacgaattcggatccagaacgtcgtataaacccacaacgacaacagagatcatcactcgacctgtcctcgtcggaagttcaaaccctagagtcagtcatctggctgcctccgctactgctccgacgggtgtatcattgccatcttccaaacaatccaagacatcctgctatctcatgaacgaaccaaagacatcaggttctggttcgacaagagagcggtcttcggcgaatgactcccttgaagggtctttaagacatagtgattctatctgggcgcgcgagctagagattgaaagattgaaacgaacagagtgagttttccttctcgatcatgttggtggagttttagaaacaaccgacagacgctaactggacgcttgacgtgttgacctcagagtggagcttcgtgctgaactcgagctcgaacggttgaagagcgtggagcgacaacttcgagcggaacttatgcaggaacggaagcggaatgaaaaaagcgcgatcatccatccagaagccgtgttagacggttccaaaccgatcgagcagtgtccgtgagttcatctttcacctttctatgacctggaaaaaatacgagttcgttcgcctgctgatgttgtgagcacgcatggatgcatgtgcgccttctttcttctcaaaggtcatctgtgggcgattctgaggatagaacacccaaagtaccctccagtcgacgcgcacccggaagaaaacgatcatcggccattcagagcgaaacatcatcctactatttcgattcccaaggaggaagaagaccgtctgatgggatatcatatacgagtgaagactacgtcccttcgaccgcttcgccttctagctctattcaccgccaaacttccaaaatgtctttgagtacatgttattccggtctatccgctaaaaacacaaccaactttggagtctcgtttccttcccgggatatcgaagaaaacggagggttgccctcgaaggaggagtctctgtatcaggttccatctataagattcgctccgccaacgtctctcatttatctggatagttatagtacctctccgacatccatgggtaacgtggatgcatcatcgacaacagattccccggcacagcttcctatcaagggcctgagtttacctacagatttcaatcatatcgataggccgtacacgactacggggaatcgacagcgttcatcaagtaccaccgccaccgtcgccaggagaggatccgaccatcttggatcttcacctttatcgacaacctcaccatcgtctgctcttccagccagcaatgtcaacggttggaacgatttgtatgatgtccagtcttttccgtatcggcgatttccgtttcctcatgcgagaccgcctcctccacccggtccggcacctatgtgtagcttaccgcccctcccgcctctcctacctctctcagttcccaagacggaatagacagttttcaataaaaaagaagagaaagaaggaaaaagaagagatctaacagagattagatccttcgtactagttgtatatacccccgtttaggtaaggggaaaagattaccatgtcattgtaaatctataaagtagctttgacctctctgaaatatatggaagagacgagctttgagtgtcgaataatcgaaaggagttttaacagaatgtatagaagagaactgaaaggtcgcatgtcgatgatgaatatgagagagtacacgacaggcacaaaagaaaatgaacgtccaccaacgaggcacatcagaggtcacctcagtacgattccaaaccggcgagcttgcgtcctacttccgagagaacgggtcgttcatcgggaacttgacgaacggaccacccaggatcgttaggagcaggttctcttcgaggtcggcaggtaaacatcactggatcatgtgtctactcgtaaaaaccgttgtatgaaagcctaggtcagtctcaacaaaggaggggaaaatcagggtaagtatgagaatcattttttcttaccgaagtgagcatctggtcgatggcttccttcttcttctccctgtactcctctgagataagcgccgcgggtttgtaacaaacatagctagccaccctagggttcgtcgacaacggaatcgaaccatagtggactgttcgcgagtcccagaggatgacggacccagctggagcttcgactttatgccatgtgcaccctttctctttgatcatccactcgagcatctcgggtgtatgatgataagagtcaagtggggtccaaccttcggcaggtcgttgatgggcaaatcgatcgaagcattcgttgtagagctgtgaagaaatgtgtttgtataaaacaatagactgaaatcagatcatggtgagggcagatcacatgttttggtgagagtgacgtacctcctttgatcctctgagaaccatcagaccaccatccaaaggtccattgggagcaaggttggcgatccctgttgataagagtaatctagagatgatgagtccagaatgatgatttcacaaaatagacggaaggacttgccttgaacacagtggaagaaacgcctgttaggagatctaagggaaaagaattacgattgagccgacatcaagataaagagtcagacagtcaagctttgtttgctgaatatgaaacggaatgacaagccatcacgaagaactcactggtcgacgtgtggccagggtgaatcgagtcctttgttctgctcttcttgcaagttcagaggaacagatatattgatgccatctgatgacgtccaatgataattcaaattaccacaatagctcttatcggtcagcttttctagccttgtctgaaagaacgaaaaggagtcgtaccaaaagagacgagtagctctgatgttccccaaactgtagcaaacgtatcgatgagtcccggttcctgtctttatagatgcgccattcattaacgtccataagaagaagatatcaatcagtcattcatgatccgaccgcgtcgcccagtcggagggcaatgaaaagcatcaaaatattcacctgatatcccagagaaactgttgatgaccgactccataagccgaataaagaccgcctttgttgttgtagggtaaactcgagaggttccaagtagacggatcatccctgttgtatcccaggttgaatgattcaaggaaatcatgtgctctcgagacgtactctctcgccctatcgtccgggatgacgttgggtacgacgacccaccctggaaaaccccatcaagttttaacagatcaaccgaccaaaagattaactctcaaatctatcgaggatgtgcatgcgaacagattgatgaaatctagggaaagatgaaaagacgaacctttggagaaaagctggtctctgaaatccccatggtgaacggacgaagaccctaccgaagcggctatgtccgatggaccggcagaccctgtgagcgacaaattaccggccgctgtcccagtgctggtatcggtgttattggtggtagtagccgttgtagtagacgtagacatttcttaacaaaggcaaaccgttcagtggcgatggtcgatgaagcaaagttgtcgaaaggagaaagtggaaagacgataaagaaggacactcgtctttttgtagaagaactgttacatatctatgaatgaagggcacccgggaaaacttcggtagattaaaatttagtaaatgcccgaccgtctcaatcggtttgcttgcgatgctatttcacatcgactccatcccgtcaacatcacagtcgttacctttaatacctcaccgagaaggccgaagggatggccgtatctggatgctgggtactgagttcagcgtataagatgcatgatgtcggtcatcaactcttttggccgatagtataaatcgacagcgaactattcgaggaataaaacacagacaccatgatagacacagacttgtaaatattgaggacagacaagaattccagggagaaacagacagagggggaaaaaagagagaaatgatatttattgaaataaaaaaaatccgatcaacatggcgaggaaagagaaagagataaagaacggaaaccaatgaaagcaaatgacaagagaaaaagacaagagcggacaggaccaaggagacagaagactgctagaccaggacaaaacacgtacaccacagcagacaatacgatcggaagggatgacaaagaataagataacagaattaagtagcgaacggataatggacatgacaaaggacatggcaaggaggtactcttcaaacgtcgcagaaggtgatggtgatgaaattgccaagagaagaaaaagatataaaaaagaaacagtattgacaaccaccttcatactcgaggaagaaggttcaaatacacggcaagaagtaaagagaaagagtcaaaataaccctctagtggcccccatcgtaacggctgtcgtcaaatctcgagccatgtcccaattgggaagttctcaacgccccgcctgcaaagctgttgtacctcaaatttcttccactcccgggggcaacaaactgagcggaaccctgtcgttccctgatcttcaggttttccatctctgtagccaagtcgtgttgacctcgtctgggatgggccgaagcggaagcagctctggtcctgggaggaatttgttgctgctgcccagacagctgctgctgttgaaggtaatctgggttgtttgtcgatccgggagcggttgcagggggcgtgaaagtgccgaagtatgcgctattagccgggtcagccaacgattggattgtcggtcggtagttcggatcaaacgccgaggttggactggcgtcgaccccattaccgacgatagagcctcgaggaccagagatggaagaacccggcactcggaaaccggacgtgggcgatggtccaagaccggctccagtgggggaatggctcgatccagaatacggatccctgccgccaccaacactctgctgctgttggaaagatccaaacgacgagtcatcctctcgctgtctatcgtcgatcgaatggaagctctcctgtcggcgaccgtcggccataccggacgattgactagaagcatacgatccaaagtcaccgccggcaccgttgagcttttgaaggtactgagcatttaggtttgagttgttgaacccagcagaactgtgcccgtttatcgggttgaatccgcctaggcctcccagctgagctagcaaggccgggttaagtccgcctccgtctattccatatgagtgatcatcaatgatgacgtgtcagcatgatttcgtctgaagcaggtataacaaaagaaaacgcactgtgcatggtctgtccaccttgtcccaggccaccgagcgcacctaagccggcgaggccaccaagaccattgccgagaccgttaccaagttgtccattgagagccaataggctttgcagtacttgaggatttagcccagccaaagctcccacattgaggcctcccagaccagcagatggatcattcaacccgaatccaccaccaagtccagttaggccaccgagcgcgcccaacccattcagcgggttttggttcgctccgcgttgattgaatcctgggtttccacccacaccggcagcagcaagctgtcgaagcaaagccgcattcgccgctccccctcctgctcctgccccaactccaaggccctggagggctaaactgagttgggcggcctgcgcgggtgttaaaccgttgatgcctgagaacgcaccgagcccacccattcccagctgaccagaaccctgggtggccttgtctgttttcgttttcatgtagagaaatatatgagcgaatgctcattactcatttgtatcagaagagtgagcatgaagaacgaacattggcttcggccccaacttagtctgattcgaccgccaccaatcgggaaaccctgcatccgatcaatcgccctttcagcatctgcctttcggacgaattggacgaaaccgcatcctttcccaggaggaatcttgacctatttaatattttgtttatgaacagaagattgtcagagctgagattcgcggcgtggaattccaaacatcagaacggtttactcacataggtgatttctccaaagggaacaaagaaagtcttaagagtttcctcagagatcaaactactcagtcctccgacaaacactgttgatgttgactcgacggggacggcaccaatatcttgttgctgctgttgttgttgctgctgctgttgaaactggataaggttttgttcaaagccagagctctgctcggaggctagactctgacttggtgaatagtcttgaccattccctgtcccgtgaatagaatttgaaaaggacgaggttccagggaacgaggctggtccttgaataccactcggggaagtcgtcgacgaactagaaagagtgtgagccgtctggggcggttgttgtgaccgagcagatgtggatggcgataatttctccattgagtgtccgatcgacaaagcaggcatcgccgccggtggagaccggttagaaactggtacaggaagaattgtatccgatggttgagcccgatactcctgagtaacggacggatgagtgaacattggagatccagatgcaggcgcgggagcaggaacagagacaggagcagacaaggtagtggaggacgggacaatagagggcgagttagcagaggtctgtgggaacggaggaagtgtcatgccagggccgaaaggaagagttcctccattggcggcggcaagctgagtgagatattcgatcgtgctgggagacaatctcctctggggcggcggtggtggtggtgggtcggagggagaaccggcctcagcttccgaactctcggctggtcgagaaaggggtgagggtagagggtaatctgacgacgggaactgcggttgctgcggttgctgctgttgctggtaggcgaatgtcgattggtcatgtcccgacagaggaagcacaggagttcctcccctagaaagatcgctaatcgagctgcctctttggctgttactactagtgagggcgagcccaggccggttcttcgcggttgcatgggaaagccgcatcggtcgggaaagacaataaacaccctgcatgtctgcaagtgctcgtagctggtctgcttcctccgcgaatctatgagggaaagtaaacaaaattggcgagcaacgacaaacgtaagtattaaggacgcgcgtatgaacgttgctagttgagactcaccgaacaaaaccataacctctactgccaccgttctttggatccagcataatctttgcgcttctcgtacttaaaaagctctttctgggttcaccgcctgtagcgggggatctgaccggaggattgaggaacagctttacgaggtccgcttctgatacttctggtgcaagatcaccaacaaagatactaaattctttctcaagcggcaagtctgtggcctgagctggattgacagcccctgggttactggacgtggtggaggatgcggcccagttcgctttgaaaggcctgcttgaattgggcatcaagataggcgaactcggaggaacagcggtcaaggactgaagaatcttgcttgccgcttggccagtctggaggaatccacatcaaaagacaagggtgaacgtttgctcgagacaagaaatagagagagagggaaacatacgggaaaggtcaagaagcaataattgtttgcggtcggggtggatcccgactgattggatgtctgtcggatgagctgccagagcgacgacccaagaagtgtatgagtgagcggttgctgcagaaaggagaaaggatatcagacgttgttaaatagagaaacaagagtgcataccttgatagacacaacgtcccaaccgagagatgcgcccattgatctgaggtaggcttcgtccatccaactttccaactgacccaaccaaagtgttctcttctcactaggttcctttgtcaacgatggcgaggaggcggcggagccgctggcgccagaatagctaacggcggaagcagaaggggtgaactgcctgaagtcttgaggaacgaacgcagaatttgtgggagagagcgcggccggttccgatcgaagatgaggcgggagatagggtgagcccggtggcccttccgaagttccgtttgggaacgataccaactgatctttgacttcggtcgaggaggcgatagtattggtaggcaaagaaggcgagggggaagcagaggagggttcgatcgatagccgatgggactgctctttttgttgaaggaatagttgttcctgataggtggcctgttcggccttgtgtctctctaccttgtccttctgttcgtgttcgtcctgttgaggtgttatatctgatggcaaacacgcaccttcagacggggcagatggagaaggactcggttgggtgagtttgacggcgggtgtgtggtggccatcggtcgatgttccggattcaaggttatccgtgacgggtggtttacccggttgagactcttccaagagagtagacatggtgtggatgagcgaagcctctttgtttttgtttttgtgtgtgtgggagtgggtgtgagtgtgtgtatatgcgtatatgctgattatgagtgtgcctgagaagcgaacttgtggggtgtactagcaggactgaaaccaaggaaagcaaacaccgagaggataggctgtgaacaggcaaagatgggggaagcaaatatagaagaatggggacaggagaggagaatggaaaagaaggttcaagacaccaggaaacaagcgatggatatggtaaaaggagaagtattggggaggaaagcaaacgaggaacgggatggaaacagacgagacagagaaggtgaagaacaagaaaaggaggaagaagtgggagaaaaaaggagatggaagaaaagaatcgagacaagaagagaaaaagctgtcaactgaacaagaaaaagacaagaaaccatgttaagtggacaacatgcgcatatacccgacatctaggttagcagcatatacccgatttgcactctcacacatatggacacgttcgtacacacacgcacacacagggtccatccccttccggaatctcactcattcacgcacatacatccgttcgcaacgatacactctatcagatccatcatattgtaaagccccggccgcggtcagatggaaggagtagatactgatacataagaaaacacgcgtcaaaccgtatcactcaacactcgtcgcgttgtcattctcatccggacgcgcccggatccgtcaaggttgtttcacagtttcactccctgggctgaacggtggagtcaattgccgatgtaatcaactgatttttcgttcttccctctcttctttcgtagacgggcggctcttcatttgctcagacttctaatttcatgtttctcagctcttccatgtttgttttagtccgcatgtgggtctgaccttattttcttctgttttatttcattttaaatccgtcgactcgtcctgctcaactttaaaataaacaaacaaccaaagagaatatgggaaccttatcattcacgcaaatccgatctgccgatcgaaatatacgtcttatagctcgtctctcttttgatcggcctctccctggtgagcatgatcactctgctcatattcttctaccatctcactcttctttccgtcccggtcgagcttatcaatctcgaccggtccggaccggataacgctctccttggacaatcgagcggccagagaggcgacctccgagtcgtatacctcccattcgggaattcgtcgcgccctagccagctttggctccttcgtctgtgggtcctgacaaagatcgatcctaggtgtaccaatttatcaccccaagtttccatctctgtcagtgaacatcccctgtcccttttagaaaagaaaaaaggatattcgaaagaaagagaaacctacgtcttggcgtccttcaaggattcggcactacaccatgtcgcacaccacagccaagacttgtcgagcgtgtgaatcctgagctgatcctgcatgctatttggtagatcctggtccaggttggctgtggatttggggatgtgagagtatatgtaaagttagccttgtcaaccatccgatatggtcgatctagatggaatgacttgcccagcgagtttggatcctgagacagtccttgatattgtcctctcagtcgatcaccagccgcaatctgtatttctttcattcatcagttgaattcgttgagagccaaaaaaagtttctctaaagaaagaaaaataatctctcacttggcggaaccgatcgagatcgacggcgtagagcgcgctgatatgatacggtcgtcctctcaacgcttccttccagtaacctatcaagatcaaacatgcaaagatcagcgtgagctctaaactgaacaaactcaaatctgatcgggtcaataaacctctttcttcttcttccttcctctttccccgtttcactcaatcaaactcaccggtcttccagaatcggaacccttcgacttcttctctgtcatctcccatgggcgcatacgcataaggtgcaccgtgaagatcctcatccactaattccttcagatccgtccgtacgatctggtctgattttttttcgtgtgtgttccgtgtcagcctttcggtatagtgtctgtccacattcgagaccttgaagtttggatatgatacagatgtacgaaccagcgtcgacaaagatcactttgttcagatccattgggaacaatacatccaagaacaaaatcttgtaacctaaagccacgaagaaagaaagttcttgcttcatctggtcagaatcttataaaatatttcgaaagatactaaaagcagtctagaagtcaagcagaattgagacgaaccccaaatcaagcgttgcttttctttttgaccagtcaaccaactcggccacttgtaggtcacgagttcgtattcgaacccatactctttcgccaggtgaggaatgaattcctaaagaagacacagctccgaacccaatcagatctcttgtttcttcttttccttctctctcgagtacagataggcagacggtaaacaatgagatctcaccaagaatgaaggagaaaggaagttttcgatgaaccaaaactaatcccggtttgccgttataaagattaaaccttgttaacaatgagttaccctctaggtacgtttcgagaatagtgttgcattaccttcacagtactatttgtatggcgcatgacagaaatagccataatgtatgcgaaactgtagatgatcatcaaatgaaatttcgttaaacactggccctgctcgtcagataaataggttcaagatcgagacaaaccgctcgtagagtctcaacgtggaaacgaagtaaggagtgaaggctgtcagtccgatgacatgcatctcgcaaagtcaataggaaacgtcaatctcacaatccagaggcgacagtaaaaatattgatatctgcattcttcttgataggtgcaatctcatctgtcttcgatccgaacaacgatgaaattctatatgttgtcaagagagcatagagatgacagaagatgtaagaacaaacaatcagatacctgacgtatccctcgcttctccagaaatcttttgagaaatgactaaccgagacttgagggagttaaggaatgaaggcttcacatctataatctccagcacatcatccagctctttccccatcttcctcgacatctgaggatatatcgtcaggccggtcgagaagctgtagataggaacttcaggccctgtctcattcgtaggtgggctctgccatccagaagtacccacgctagccagttcgtagatctctcgaccacgtccttctcggattcgcaagctgagcactcccggatttgctttcctgacacatcaacaatgatagtagagcagacctttgcttaataatttaactcttcagaacagtcgttcactgtcgaagaatcaacccacaattgaaagtaacctaagtttgccatcacagacgtatccgccataggctgaccgtttgaatcggttaattcaatctgaagacctcttgggggggagcctgtctttgtctctcgtgcatgaccctggtagtatttacaaagaagcgtatgacgataaaaagcaatacgacttaacgaaggggtttgatctatctttacggcgtgaaacaagaatgaagaacctcttacctccacaaccagtgtcctcagctcaaagacgggttcgacatcagacgtcaaatcaataagcttcaagttgtccagatcgtggaccgactctttcggagtgaccaaccaggagggaggcgtctccactccaagtgtaaagattggttcttgaggaagattttggaagctgactcgagaacgggtttgctcactgtgtcaatcgaaacgacaccaaaagtaagtataattgccaacaacaacttaacaaagaagaacttggaatcaaggcttcttactcgtcttcaaaggtcaccttagattgcaagttaagtcggtaaaacctctttaacggggtctggaggtcgttttccaaaacaacaattcctagtttaaattatgtccttcaatacgttatttgcgaactgtgcaaaaggttcacatacctcgttcaaaacgcccgaaggcagcaggattaccttgacgtatacgaagttcatttctgaaagtacacgaagggtagttgaccatttctgggcaaactcagtggcggggtccataatggctacaattctcaacaaagcagtggccttatgaccaatttcaaatgatctattcaggaaaagggatttctgatgcatcagctttccaatcatcattatcccatgatagtataaaaattaaacacaaacgtcttgtcggaacggaagagctcgtaggcttgacttcgagtggatgcggaagcaacaccaaacatcccagggacaacatcctcggctacagcttgcgagaccgtagaagatgtgaaagcgaccaggttcgagtatgtcgtactaattaacaagcgcaggagagacaataagatctttgatcgcgagctgaacaaaccgatgatgacgggcgaagcttttctcctcaaaaagaatgcatcgttagcttaccgatcaaagacactagtattgtcatagaactcctctagcgcgtcgacaatgggttctgcccggacatgaagctcatgcctcaagagaacctcgtagtcatgtgaatcaaagatcctgttcgcatccgattttataatctgcaagaacagacgatgagacttgtaacggaaataggtggcagatagttcaagacactcacccgtccgttgactaccaaaataacttccccatcagctacatccaatcctcgtgggccaagcgcatgccgtccaccttcccagtaaactttagcagcttcatcttcaccagacggctgggtggacgactcgtggacaggagcaatctctgccttatcaattatttcaagcagcgtcgaaggagtggcggatccaaggatgggatcgtgcatcgtctcgaacaagagtgtcgatagaagtgttcttgatgacctttccagaagacgttttggcttgtgcaggaaggaaaggcggaacggagtagattgctaagatgaagaaaacacatattttgttaagttggccagtgtattgatgtgtttgtcattagtatatcagatgaaccacacacttaccatcgccactaacgcttcccagaccaatcctaatccctgctcactatcaagatcgcctgcaatccaaattgatagaggagtcttcgacgatccgtcttgatacaaagattgaagtatcactttgatgagcatgcaaaccttagatgattgattaaagttgcactcaccgggatagatccatcgttgaccaatatccgaattttcgttcacttttctcaacacgtcattcatattggccactttaagcctagattcgtcggctccttttccttcaaaaatagctccagttcttcggttggaagtctggggtaggtcgtagaagtagttcgctacttcgactgggatgccgacggtgtctgcaagatgaccagcctcaatctattgatcgaatttagctcaatttaaacaacttctaatcatgaattcagatgaaagaatacatactctttcggttaagaacaccaaatctttactaagctccacttgaagcgctcgaatccatgcttgagtctacaagcggagaaatttagttcaagattatagcgtcagaaacaaaagagacacctaaatatcacaacgtgtttgaacccacttccgtcctttcaactgctttgccattgacgaaggtgagtctaccaccatcaggtccttttagatccagtctctcgatccatttataagttgcgcgttctctcttctcatgagcctcgctgatgacttctacgaacgaaagcaagcgaggcgcattttgtcggtcaccttcgaatcccagaggttccacatattggatgaaccgggcgtagattttctctactagagttaaagagatatccggggtcggagaagattgaaccacctatcaatattcaggcatacagagaatttgaaaaatttcagtcaagtcttatcaaagatgggcatcaacatgtgagagaaaaatcggacatgggagagaaactgcatcgtcgaagcccttccgtaagtcttgacgagatgtctggtcaacctagccatcctggtagctgacgtgtttcagacattatccatttgtgtacacacacaatacaaagttcgtcaatatctacgcctgatcaattaaacaccatcggagaagttactcaccaactccggcttcgccatctaaaacttcgaccattccaaatcggatccctagtccccgattgataaactggtttacaggcccaatcaagacctccattccaaacgtggtcgataaatcgacggaaacaatgacgttcaacaaatttcgcttgagttgggggacttggccaggctgttggcgcagtagctaccagaggaaaaataattatttatgttagcagggagtgatgtccctcttacaactggggcgtttgggggataacgtaccattttaagatcagatctccatttcttatacctcgagtcagtctctaggttattccaccataacacgactccctcgactcctccgctcttttcagtcttctcgcccaagtcttggtcttctaggacgagtccctcggcctccatctccatccgatcacttgcgtcgaccaagccgtcaaaaatcgggggttctcgttgaggtaaggtgagtagactagacgcttgagatggagtcaatccgagttcggtcaaagctaacgagtgtgagatagatcgtcgaacaacgggaagtagactagaggaaagtggaagtatcagcagaagtcatcaactttagagagatgagaactacaggaatcactaactcaaaaattccttccttcccagcttggatctctttaccatcgatccagactcttccctcgacttctcgccttgacccctgccatccaacgccagcaccacccaactgctcccactgctttctgttgaaagacccttccttgatcagcgctctgttatcgggttcttttggatcaaaaggcaaccgagatagagcattggtgaacaatggaaaggactgtgacaacaactcgagcgcaactaatggcgatgggtgcgagagaataagagatgcagtggcgaaaggcaattctggattgaagcagcaatgatgatattaggaggaaacgcaagtagatatggttgaggtttcgtgtcaaaatatctctataccattctcagaaaaaatttatccaataagactcacgagtaagttcgacttcgttcaagggggttgcgttctccctccatgggtcgttaccgagcgcctcagtcaaaatcggatcctcctccgggataatccgcttctctttaatctgctcctcgttgaacacgttgtcttgtcgatcatctacgcttgaatattccatcttcttaagaaccatctccactccccatccttgaacgggcacacctttctgttttttgaccgggacgaatgtcgcttgggagcttccttccaggtcggagacaagcggaggatccattctgtatcgaaccaggagcggaagttcggggaacgactgaagtagatgtaacaagggaggaaataaggtggacgaaggtgcgaaatagagcgtaagtggaggcagggtcgaatcaatgttgagacacagcagatgatcgaaaggatacgatcgtatggttgagtttctttatgtgcaatgaaggaagaacgtcaggaatttgttcagaaccagaaatcatatgatttgagaaatctaccaacatgctctcgtcccagttgataccctccttgccctttcccagcccaagtacttcgaccgcgccgtccggtccgcatcctctctttccgttccattcgacccaagcgccacagtcattcatttctggatcaaccagcatctgatgtacgctcagtaaagcttctactgctggtgcactttctccagcggctagacccaagtcccaagctggaatttgtgaggggtgaaggtaatttggtagaagggcatgggccgcatggtagagagctgtcgagttggcagcaaggatcggaaagtcagggcgctgagagagatgagtgagtataggtaaataggcctctggagaattcaacgatgtttgttctctgccattgccgagataacacgttgtaatttcataagctcttggacctcagagcagaagatgaaccaaaaagctgaatacggacaagatggaaaacagaaacggatgatcctgccagacggtttccagttgtagattcacatgcttctgggcagcaacgacaacagtacatgtcatcaacagagctagcgacagacgcatgctttttgatagttctgtcttgtttcaatctgtcctttgcgtgatgcttcttcagctaagaaagacgggcgaacgagtcagatgagatggtcgatgaagaactgagatgacgagagtaagatgaagatgaagatggaggtggaaaaatactataatatttttgtaatgaacaccacaaaaacttgatattgtctttattacttttcatgctgttttccctccatcatccatcatctgttcaggtcagtcagcgttgtcttcctttctttttctttgtactttaccctccgaagacaacaaccgaggatgacaatttgccggggcaagcagatcctctcattccatgttggagtcaaactcgtctggattggagacggaaaagaaagacaattcacggttgtttttgctaaacacaaagattctttgtttcctttcagtctctcgaccttcattcttacatgaggtgctgcgaatctgaaaggagaggagatcttctcgtctgaggttgttgtatggagggaatctcaagtttcactctcggcctgtgggttagaaagctgaccactcacttcattctcaattcacaggtcatcgatgaaaaatgatatcatcaaacacgggttgtgttgagctaattcttgattcaatctgacgatttacgtacttgcccgcttcagatatgcaacataagagctagcaagcatgttgtttccgctcatgttgcttcccgcttatttggttcattgtttttctcataggcacggccttaagaggttcgagactactgttctcaactgttcttcaaacgccttctttgtcttttccccgtcaactattcatcaagctcatcttctcttttccgttgactgtgaggttgatctcctccacctaaacagtactcttgacctccaatccccttaccgcaattgcttgtcgcttgtttctctcagtacattcagttccctcaagcagccatcctaataaacgtcgacccttcccgcaattgatatcttcacgcgcattgtacacttattcgaatcttccaattcgaatatattccaccgtcctcccttcctcctacttgctgtgtcgtcaggtctctcccaatgcccaacggctcatcaaaagaaacttctgtcagccgagatgttggtgcatatatcctgaaaatacaaggtagaagaagcaggattgaacaatgtagagtgagcgtggtaagcaagggaacagccttcacgtttgacccgacagggctcgaaccgatcatcccggaagtttcgtcagcacgatgccagcccgatagaccgctcgggctcatatcagctccgacgggttcgacaatcgtccataaactgcacactcgatcccagaacgataatataccgatggtgtcccctatctcttcagatcgggttcagacggtatctgacgatttcaaaccaacatctacgcacttcttccaattgtcgacaaagtcttccttgggaaaaacacaaaagatcccaacgtacgcggagccaaagatgccagccacctccgacagtttcacaatgttacgaaaggtcgaacttgaaatggccaattgtagtttaagaagatcttatttgagaggccaatcgacgtatggagaaatgatgtgaaagagtctcagagggagatggggtcggtctaggtcaatcagaacagagggagagagtggttttcacatcggcctgtcgttatgttcgtttcaccactgtatctataccatgcgcgatagacacatgtattgtttagaattacaaaactcgattctatgcctctaaagtctcctcatcctgcagcttgaaaagtttcactgaattctcccaagcagcctgtgcaacctcttctaggctaatccctttgacattggcgacgacccaagcgactcttccgattccgcaaggttctagtctggatttgactgcctgaccttctttgaacttctcgggtttattcgcaggaggtgaataaagttcttgaagggcaggcgggagagattggagatgaacattggaagcgtgggaggttgttatagagcagtaaggtgcatctttcggaaggcaaacagctgggtaagcggactgtaagaaaatacgatcgctactgactataatggtctacttaccggtttcaagcaacagcttgtctaacggtagagccttgaccatatcaagaccttcttctgttttgagcgagcaaccattgatcccgatgaacaacccgagctgaatcatatcctccatctcgttctttggaccagtgaacgaatgaacgacacctcccgacggcgcccatttggcttgatgatcacgcatgatccgaagaaaatcttggtgagcagctcgagaatgaaggaagagaggaagagaatgttccgaggcgagagatagttgcagttcgaaatgagggatctgagaagagatcggcgagaaatgaagtcggtcgtagtctattctccaggattcaccaaaaccgttgatgagtgtgtaggaaacataatcgaacgatgttataacaatgaataaaaaaaagacctacctaatccacattctccgatagcgatgattcttcctttcccctttccatcccctttaccttgtcgtatcagatcacttaatctagcgagatatccttttgggtctgagtccatttcagatgctcgggtaggatgtataccagccgtcgagtatgcgcctgatcttgcaaagaaaattagtgagaacatggaccttcatgcggacatacaagcggcacatgcctaccatattcttcggctagttcgagagcttccttggattcagacagagagcctccagtaaacatcatcgttcggactcctgcctcttttgccctcagaacaaccgccttgagatcagctatgatgtatttagatattgtttcagagattggattgggtatgtgtgatcagcatcaggcgcgcatgatcacatagtcagtacgagatcagaagtatcatacaggcatgtttaacttttccatggtactttccctgaaactattcaagtaaagcggatacttcctggttcagtaatcagtgctgtatgagtcgacacaacaaggtcaagaggatatgattaggctgaaagtaccatcgagtctgttgcgttaaacgctatgtctgaggagagcgagaaacaggtagaactgattaacttgattctcgtatacgtcgtctagtctcttcccttcaacgttatgcaatcatggaaaagcttaccaaagtatctgataggagtagagaccatcttggagtgcatctatcagttagacctctgagagatgttgatggtgatagaaaataaaaataaaaataaaatatcaactgataatttagtccaaattccattccatctatcatcctacatcctacatcccgtccattcgatacccttccttcttcgtatccgtgcatcagctctgtctagcgttcttcatccttacttctaactatgacgagcatgacccgttcttcctcgacttcttccgatggatccactgtcttccctgttaaccttcctctcgcctcggcctcgcctaatgcggtcggacacgatcttccacagaacggtcagttttcgaagtcttcgtctacccttgcttctctcttcttccagacggaatcagtatactatgacggttcactgaggaaagtcgtatctagaagttcgcacgatctgattgttgtcttcttaatttcttatcgtttcttctctagcatacacgcttcaccaaacggctcagctcgaagggttgctcacgatactcagagataaggagaccggccggtaagcctcatgatgcaacgctgcagaaaccgaagccgtttaattgaaatctcatcctcaatccactatataatctttctgctatgacgaaccggtcttccttgattcgcagaggtgattttgtcttcaccgctaaccgggtaatacgactccttgtcgaggagggtaggtctatctatttcttacagcgaacggcccgacttggtctcactttccaagattctgattgtgttatgcgtttttcaaccaaattgtccctccgctacttctgtccaaaggtttaaacagtcttccagtctacccgaagcagatcacgacgccgctaggagacgtctacgctggtgtaggcttcaaaggcaaaatctgcggagtttctatcttgagagccggagaggcaatggagcagggtttgagagaggtcgccagaacggtccggctaggaaagattttgatccaaagagtaggtcgaatacttttctcttagtttcgatctctgtagtgactaggcggtccatcgtactgaaagcgctgtaaactttcttgggctgaaggatgaggagactgccgaggccaagctgttttactccaaggttcgtctacttcactgttttttatttatcttctttgaccctcgtttctcaagcttggtcttgtctgtttacagcttccagaggatatcgccgaacggcatgttcttttgctcgaccctatggtaagttggtcagtctttgccttatatcgattcacacgctgatttatttgctcttgaattttgcgcgcgtgttttgatcatagttggcaacgggagggtaagggtcttgatacaaatgtatgtggaaaacgtatgcttactctatcctctcaattttctcttcggacctgcgcgtcaaacagatcggttatcaaggctgttcaggttgtcatggagaacggtgtgccggaagagaacatcatgttcctcaacttggtctgtctcttccgcttggtcagacaacataagatgtcttcttgcctgaccgtatttttatataacttcttgtctagattgctgccccagagggtatgaaaaaggtgtgcgacctctacccaaagatgcgggtgattaccgcaaagatcgacgtaggactcaacgacgttcgtccccatattatcattctcctcttatactctccacttcaccccatagactcatcctatcatccttgtcttcttgttgggctgtcaaatctgcagaaaaagtacattgtaccaggtgtaggtccctcaatttaactctgataagtctttgctcgttccatggctcgggaagactgatgtcggttgctccttcagttgggtgattttggagatagatacttctaagcaacacatacacacacccatcacgaaaacaaaccaacacaaagatagacaagaatttggccggatacagattgctcatggcctgcagtcgtttaatcgtcttattttccgaactacctgtgattcgcaagaaattatatatgcttctgtcaatttcaaggccgtactcttgcatgagtaagaaagaagctggtacagagacgagacgagacgagactcaaacattccatccagtgatcccaaactcgtaaactgtgatccttccaaagaaatcacttcctttctcaaactcaactttccacgtagtagctccgtcttttctcacctcgtcgttcaagccgacttcttcgtccgtcggtcctacgctaaacgactgagacctattgctatccgccgggtaaaacttagcccaaggtcggaacgttttagaaggaccaggaggagaagcataggacaaggaacagtgggttcctacaaacccaccggcaaacgttatggaaaggtcggacgggatcactgcattaggaaagacaagggtgattgattgaggcaagccctatag

SEQ ID NO: 1755 - DNA, 8291 bp, Xanthophyllomyces dendrorhous
acataagacaatgtcagtatgatagagtggaggacccctctcctgccgaggaatcaacctgcttctcaagttgctcaaataggaatggaacaaaacggaggaatgaatgcagatgaagaacatacgtttgcacttgcccaacaagtttctgaatctccatccgtcaagtatttttttgaaacagatttgtccaaagtagaagaaactctttgcttgacggagagaaagaaagtacttgtcaatcggtctagtcactcacagagtgtttggattcaacgaaggaactcacctgacgactacatctggtgtgatcagaggaacagctggagatgatttagcggaagccatgttgaatgatagtacggtcatcgataagacggctagttgaagaattctaaaggcgtctgattaaacacagtttctcgttccagcccgaactccttccttcctctcctacttgtacacggctctcgctcttctggtcgaatacttctgaacatgcatatttcgatacctctagccgagcctctcaagatatctgatttaacgtattggaagtattttggaacagaaagcgttttgctccttagtctggcttacttggctcaacagaagaacacacgaccgatcaggattgggttggctggtttggcttatgtggttggatggcagctatcgggaggattcgtttttaaaggttctttagagttgtccgacaactctccttctgctttgttggccagccaaatagatgcgtgtactgatctcacggttggttgttttacgtttcatcatcatcctgaacagacccagcacatgggttctgtaattatctcgtcgggttgctcggggtttatgttcgtcttcatcagatcctcgtctagtcttctcaacttatttgaacaaccagatgcttagtgatttattgattttccacgaccgaggaatcagctcttccttctcatccctcggcttgcacttctatcagaaccctactaccatcctaccccttgccctccatcgaccacaatcgatcttctcatcaatcctcccctaactggctgggctcctactccctactttacgcctcctagaacaggtaaaaaaccgttccgatcagccgcaaaacatcttgttgtttcacttcgaaacgcttctatcttggttggaatttgtgccttagcagcgccgtacccaggattcactcaaacagaaggtttcagtttatttggggtcatgtctggacagaaggtcatttggttacctggatttattcagcctttggatgggcgatttgttgcgttgagtattaccgcgttctttggagtacgtcgttggtttctcttttcctcattctgttcgttctctttgcagagtcaattaaaaatatcattgattcatattttggaaccacagttttgcgtgtacctttttgttgaagcgctctatcatcaggctgcttctatcttgatctcgcttggatggcctgtgagctcctttggggaaatttttgaaaaaccttggatggcctcatcgtacgtttgcgcccatcttgatcttttatgtacttgacactccgcgctagctaatttcgatcagtattgtggttgattgatgaatttcttcagagtccatgaattttggggcaaacgatggcatccggtcttcacaccgacctttcatttctactcccgcctcctcccttcctctctcaagcctgtgatgatctttttgatctctgggttgattcatgacgtcggcctcttaccgctcacgaaagacacgatctatccaagttacatcaccgggttctttgtccttcaggccgtgcctttggtttcagagaggctgttcggagagatgacgggtaagagagtagggggctggtcgggtaggatttgggtttggacgtggatgattctttctggttgccgattggtggaaggatggtcaaagtgcggcgtgtccgcaagtgagtcaaagacaaaccagatcatttttcttcccaggtctgaacttcgaggctgatggatgtttctcccgctctttgttcacatctttgtttttctagaggcagtcaagacggttctggaatttatgggtctcttgcatgtccagccagaaggacctccttgatcgccttctcttatatctaatcatttctctatctgacattcatattttcttccaatcctgatgcatacactactcttgtctcgctcatgatagatatctagaatagtatatactctatagaattagaacagatattacggtcttgactgccttcgatctgtaccggaggaccggttattgtctggaaattgttaacacgcgttaccacctagataacaaaacacatgccactacatccgctgtactcttcttcttcaacaacgaaatatcatcatcaacaatcacacatacatatcccttttttttctctctctgaggtaccaagcaatctcttatgttcgctaaggctgctcagaaattaggtgtgcctgaagaacagattggggtaagtctcatcttttatattgcttcgccccaaagtgacatcatctctcctctcggaaagactcatcttgaactccttcgttttatcagtttgtcttctgcttgatagctgcttttcccttggcctctgtctacaacagacttccactgggctccgttagacatagctattccatagctgtagccgcattcttcttgattgcggtccttaagctatggtccggattctttcaacttgtgttctccatcatcggaacgtgcgtctggatacaacttttctcgaggaatcttcgtccctcatgttttcctttcgattatcagatgacttatcttttgtgttttgtgtgtgtttgggaaacacccctaccttctttcgatatcagatacctgatcgtcatctttaaccggacgaacaggatgccgtggctcgttttcgcgtatgtgtttctgattatatcgtattcctggatatgaatatacgtatcatctgcttaacaacgatttggaatgtaccttgtcagttttgtcatggttcatctaacaattaagtaagctcctatacgactgcgtacatgcctttcatgttggctggagctgatcttcaatggcgttgacgtttaatgcagccatatactccgaacgatcatcgatccttcgcttaacctgatggggattaccggagctcaaatggtacttgtaatgaagctctcgagctttgcttggaacattcatgacggtagacgaagcctttctgtatgtttctcctttgcaaacttgtagtgacactaggctccgaggctgggttctgtatgttgagcgatcttttagacatacctcatctgactgactcttatctccatcaggaactcgatgctgcccaagcggcgactaggttgacgaaggttcctgggctttggtcgttcttgggctacgccctgttctttccttccgtattgattggtccatctttcgatttcgcgttgtacgactcacatgtcaacaagaagctttccacagagtcgaataataaccaacctagtacatcgtccacttcagctcgttcagtccagacggcttctgtgactatgtcttcgatcaagcagcctgacatccggggtgatgatgatgtatcgggatctgtggcccggacaaagtcgccgagcggaaggaagagagtagcgtatgttcatttggcggttggacttgggtttctgggcgcgtatgctttgttggggtcgaaagcttcgtatcagaatactctacgaccagaatggcagagctacagttggcatttcaagtgagtagctggtcattctatctctgtcaatgtcttcgtgacctgttctgtgtcatggctggacactcaattaaagatcatgatctctccctatgttccccttaatgatagattcctgtatgtccaggcggccggattcattgctcggctaaagtattatggtgtttgggagttgagtgacggagccatgatcctctgtggttttggtttcaacggatacgaccccaagaccggacgaacaaagtggaacaaggttcgaaatatagacatcattcggatcgaaaccgcggagaactacaaggtattgtttgatagttggaacatgagaacaagcagtaattacgattttctccaactttccttaatttgacacagacagttcttgatcggttcgcattttcttttgattatcggtggcgattatgtagtttggttaagagaatcggtctacaagcgaatcaattctcatggcaaaaagcctgggtttaaaaccactctcgcaacattcaccaccagtgctttctgggtaaaatcagcgttcttcctttctgtcttttatcaagctccgggtctcacgtgatttcgtgtttctgacagcatggaactcagcctggatactatatgacttttttccacggaggtcttctcacatctcttggcaagctctttcgacgaaacgtccgacctcttctgctccctcctggaacgcctgcctctgggcatggtccgatgcctagctcatccatccctcctgcacttcgagtggttctcaagcgcgcgtatgaccttctcggttgggttgctgtgcaggcgactctgaactatatcgtctcttcgtttatgcttcttcgtctcgctgagagtattcagttttaccgtgctacaggttggttggttctctgactctgccgaggttgtcaatggacaaagaagaagaactgaaacttttggctatctttttttctttcttttcgtcgtatgcaatttcagcatggtatggggacattttgatagttggatccttcttattcttcaaacttggcggagggaagttcctcaagcgtacattcggtggtccgccttccgattccatcaagactcccaccaagacgaaatcggtactcgtcgttcatcagaacgggcagcctaatccatccatcgtgatttctccaccgccatcaatcgttgatacaaattcgagcggtacacggtatggatcgatccccttctctttgggcgaaacgtcggattttacagacctgtcagcgcctagttcaccgggcgaagaaagtggaccggaatgggcgtgggaacacaacgtcggtggcaaaggaaagacgattgcaagtgaacggacgaccgacgaaacctcggagctgtaatagaaggatctatctttatggaaatgagatagtgcattgctcggaaagcgttgacagccgtacataggccgatggatggtttgttagggttaccggcctttccggcccgggagagatttggggctaagattaccccgagaactgatggctccgagtacaaagtccaagattttactttccatttgatcttggtctttcttgtttccatttgctatcgtctgttgtgaatccataaagaagcaacatctagagatacatacaatgagccaccgagtgatcacagcgtctgaacctattcttcggtctcaatgtttgttgggtgagggtcctgtatgggatcccaaacgtggattgttatattttgttgacatccaaaaagtatgcctggctctctatctttttttttgtgggttcgtttcagatggactgaccggatatgttatatgtaattggttgaaaatcgtagggtgtgatccatacctacaacccaagtaccgaagtgcacttgaaagctcattacgaaggcttagtctgtccaactatccacctttttgcatgtatcgtatcacctatgaacctcgattgaaccgggtttcttccttccttcttctgcgtttgggttgtctcacatatcaatcttagatcggaaatatcgtcctgagaaagaatcatcctggtgttcgttagatatctttgcctgactctgactagatgtttctcttggaagtttgacatgctcatttatcaaccgaaattcagttcgtttgcgcaatcggttcttcgttgttttttgccgatccagcgtccgagccaggaaaactcgtaccattcgtgactcctgtaaaagaggatgattcgagtagggaattcatcagattcaacgatgggtatgctgatcgacagggccgatacatcactgttagtatccttagttttgaaaatctattgtccttcggagagcttggtcttcatactcttggcatacctccagtacttgcggttggatcaagctcatccgtgatgttatcttgtttcctgatctgaaataaccgtagggaacgatggatctcaaaggatcaacacctagaggagttctatattctattgaaccggacggatccattcaacaacttttggacggagtcacatgctcgaacgggactggttggacagctgatgataagacaatgtgcgcacgttctcccttctacgttcttactttatcccgtatctccagcatgtgacttgtatttgagactaatgatatgctgctcataatgatataggtactatatcgactctgggttgggcaaaattcaagcataccattatgacctctctacaggctctgtgacgaacccgcggacattcactacaaatactttcggtgacgatggtgtgtttgatgggatgtgcatggatgcagaagattgtctctgggtctgtagatggcgaagtacgtgtcctcggaatctctttgtcttcttcctgtcaataagatcgcctgtattgagttcctttctaaatacggccttgttgggggatcacacttatcaacccgaaggcaatagattggtgaagtataccccggatgggaagatagatctcgagatcaagttccccaaagcggcgaacgtgacttgttgcgtctttggtggtttgtcctttctgttgtgttgagctttctctttaatctaaatttacatctactgaccccatcaactctttgattgtaggacccaacatggacgagttatatgtaacgacggcttcttgcgctgcatctggtgaggatcatttaatcgaccaattctcagagggaggtgatctttaccgaatcaagattgatggaacgaagggtttagagaaatacaagtttgccggttagagtcggcccgaggaggaagtgtttatatcttggatgttgttattctatctcttttttctcctcgtttcgttggcttcgagtgtggatctttaaatgttgtttcctatttcagccttcctctgattgcgataaaatagaatcatcaatcatcagcacatatccatgtagtcatcatgttgtgtgggtatcagatctgcaggcgctctcatttattgattcgatcgaagtgatttgtccgttgatccgtttttgtccgaggacttttgtactcggttaattctatcgggccaaaatccaagaagtcgccaggaacaggacacaacttgttccagttactccgctcatactcacacccacccacggtatgcacccgacacgtccacatcctaatccgcttcctcagcagacacactctcgaccatccgtttatcccgtcgattcttcctgggcgggtcaatcgacaccatcgtccttgtcctcttcatttgaaggcccgcagtcgcaacaagccttctatcatccttcgcctcttgatcgatactctcatcaacactcccagcccacacagatgtatcaacaacagcaacagcaacagcagcatccacagcagcacccacagcaccagttacatcatcaacatcagcaacaaccacagcaacgacaagtttcccccgcacacgccttagttagtctggggcagaaaaggccgatgccgattaccggttcggtaaactttggatcacctcttcgcgatcaagaatcgttcgccgaacccccttatctcggtcaaatttcatcgcaacagcagcagcttcagccacagcagcatgagcaactcccgccatcgaaaaagctgaagagacaaagcagtcagacgaggatgtctccctcgccgtttgatgaagcttcgtccgacgaaggcgacgaggacgatgatggcgaaggcgaagaaggtgaagaagagagtgacgtgacagggaggagcaaaccaaaggtcaataagggaaagagaaacacggatgacaatgggagtgtggaacctgtgataggaccggatgggaagccactcaaggtcaaagccactagaggatctcggtaagtctttctgaactcctgctcttcttcacccctcctttccaatcagataaaatattagcagctgaaccaaatctttcgtttcttggaatgccgctccgttcttggt

SEQ ID NO: 1756 - DNA, 11546 bp, Xanthophyllomyces dendrorhous
ctcctcctccttcagcaacatcatcaacatcaagccggaacaccccaaccggccacctcgttaccttcaatccaatcaatggactatccggaaggttcccagggagcttctatcagatactcaggcggtctcaccaacagtgcagcctctcaggccgtactagatgggattcttaggacagcaccgagagatcaactatcaaacacacctctgccttcgacaagagaaattcatccccaatctctacccccatcttcgttacccgccccgctcagtctaggtatggcgcctggtggaagcaacagtgggtaccccggaacatatacaccttacaacagagcaccttatccttggtataagccatcttcccactcaggccctaaccaaccctctggtggaccccaacatctctcagggtctacctttccatcatctacctcgatgagctcttcattcacggacggggtgaacatgcacatgatccctcctccaagacctcattcgcctagacttcactccttacccgataattcgctcaacccgctcggcttgttggcagaggctagtctgcacaatcaccgaagacaggagcagagggcattgatgcatggggctggattgacaaatagatccgggctgttgatccgaaaccttgtttactctggaggaaccagctccaacaaccggacatcccacagcacgtcatcttcttcatctacagtaggtggaggaggtctaggagtgggaggagaatactcgaggggttcaatcgaaggagggttaggattaagcgcaaactcgtcttctgtgtctgcatttgataatgctgcttccggcatgactccggctgcgtcactcagtaaacgatcgccttccagcgacttagcctctcgtccgaatggatctttgatggcttctccactttcgagcgccggtggtgggggtggatcaggaaacgcattggccctggcgagtgtgttgagcggtacttcgagtcgaggaattggtaacggtgggaacagcgatgttcgaagcagagcgccttcacctatcgaaattgatactcaagttggcggtgaagagaatgagaacggtcagaaacctgatcggagcgagcagggtgcgagtgaagaagacgagggtgtcagggtaagaaaaggaaagaaaatcaagatcgaagaggagaaaccaactccgattggggtcgctgcttcaggatacttcaagccaggtatgtccgctttccatttctctttcgagtcgagagccgatctgcgcgcgtcgatagaactgcttgatctcaatttctttgattacgattcgaacgtccttctgtccaatatctgataggcccaatgacggttcgtatcctaagtctctatcaatttataccgagcagccttatctcaagtcaataatactcaattcgctttcatttaaattgaatttgaacagatgttacccctaaggaagataattattgagcggtcgatccgacctgaaattcttgatttcttaacaacagaagaggttgtggttagtgtttttgtttattttgcttttcagctgcatacaagtcgtcccttcaaacaagtatgaccggatagtccgcgttaatcgaatggtgtttttcgaaatttctgaataggaactatttgatatctacttcaaaaacatccatggacatgtgccggtgctggataacaactttcatacgccttcattagttgctagtcgatcgcctttcctcttgactaccagtatgtgccgtcccgttttctctcacactctgtcatccgcccctagtcactgaccgtctctctgtcataatttaaaacccttcttgctttcaagtctgttcgattgcctccaggtattacaacaatcctgaaaaaccagacttgacgaaaaagcttaatgcttgtgtccgaaaactcgcattcgagaccccttctctcggccacaaatctgttgagattgttcaggcgttccttctattgtgtagctacggccttcctgttgaacggttcgagcaggataagacgtggcttcttcttggaatgggcattcgaattgcgacagatttgaatttgcagagaaagagtgttctctcagggaagaatacggaagaggcaatgattcgagatcgcgagattgtgaatcgtgagcggacgtggttgtgagtttcatttcgcattatataaatctggaggcttgctctctattctataacttaaactcatctcttttaaattgttttgggtaatgcttggaattttagaatgtgctatattctggatcgctcgctgtcggctcagatgggtatgttctctcatttctttctagaccgcttttcgcgatgagtctactaacacttcaggtcacgcttcgaacaaataacaggtaaaccatacactatccggtccgtttgacacctcgtctctcacacacttttctgagggacacaatctttcgtaattctcttatttatttcaaacttgacgttttctttctcacagcgaggactttatcatccgaaattctgcgacgtggagagtgaacaatccgtttgccaatccgtttgatgaaggtcttctccactacgtgcatcttcaacagatattatcaagatgtctcgatcatctgtattctggcatcagcacggcttcggggttgagatccgacctggactatcctctatttttggcttcggttgaagcccagattttcatgttcgtcctctttccagatcctccgctgggcgtgttagaaacatcactcttatcattctgtctgtgccttcaatcggagatgattctataggtggctggatacttgggagtcgacattcaggtttgtctccgctatagtggttgttcggcttgaaactgagtagctttctgttgctgattttttatccggatatcttcattcgcccttcttcaaactatcagtcacactcttgctggcgtaccggaacatatgaggcatcatcttcttgcagctgcatcgagcggacggttttatttcaattgtgaggcagacattctcttgagaatttcctctcattattttatcgacttactcacatctggtcgttcaaaatttggcagatgcacttcttatggtgaattcttttggcctacaagcggcgcttgacaaatctcctatcgacgtggggaattttttcacaaaagtggctagtgcggcatcagtcagtcctttgtctgtttgaatctttctgtgatctcgtttactgataatttttgacttcaaacaatcctctaacccacatcagaacgtgattactatcgcgtaagtatctttgtcaagtcaaattactactgcgtctcatttgctaaaccgatacgagtgttggggtccctgaaattataggaaagatgatatggccgctactggccggcttcgatatgctccagattcgaatttcatcatgttaagctatgcaatcctctctctgctcaaggttagttcattgtgaatttataagaattatttatgcgcttgcgttgactgacgtgtatctcggttctataaactcgcaagcttcttcgaccggagttaactgcctacttagatactccttctcggattctcaatctcgccaatgcagccgtagaagtccttgatgagatttctgtctcgcctcatcatactcctgccatgtactcttctctcctccgatctcttctctcacctaacgagacccgacctccaactcgagcgccaagtccacttgccgccagtaatggcctcaacaaagctgatggttcagcaacaggcaacgccgagtctgtctccaacgggtttacggaggccgggatggaatgggctgtgcccagttttgccggggaagaattcggagaacctgtcaactcggacctgatgaacgcattcgaaggaatggacgattcgtggacagaggcagatggagttcacatggagagtgtctggcctggaaatggagctggactatgggattcgatgcttatgcctgtaagtttttctcttgactgcttctttttgaccgagtatttgcacttctactcttctcatcatatgttgcgaataagactgacctcaacaatttatgtgctaaaaccagggttttggagggtctacagaagtacacggtcatgcgccccctttcgcaaacggagcgacaggatttatcactccagcgttgaactctcctacacaagatcctccttcgtcgagacactaaattgtctctaacagtgtgttgctttttggattccagcgcatccccgtcttctttttctcttctctcaatcaatcattcattgcaaaggaatttagttacccgatagctcatgtttataatttattgctcgcctcgattaaatcttttctgtacccgacaagccttctcgaagaatacttgcaagacttcattttctatcagtgcagcccttgagccttcaatcgagtgcatccatgtatacttcgaccaaaacaaatctatcatcatacacgggagagaaaatgataatagtacacttatcccatgaacctgtttccacctttccagtctccaattgttggcttggtaggcttaacctcaggtataggttccggcgctggtgggggaacggcttcaccctcggttgaccaggcaacctcaacagagactcgaagtcgttcttcgaggtcaatcattgcttgttgaagctcaataccttctggtcgatgaggaaccgagattagaagatggttcaatacgggcgtgacatcggctacaagacacattacaacgaacagaaagcaggaagcaggaaatggcaaaagaacgtcaataaaggggatttcagatgatttgaaaacatgataagacgtacggattagagccttgaatttttcgactagtcgagagaaactaccaagaaggtacatctcctcgtcaaccgttccctttcggccaccagccttctttcgttcattctttcttttgctccgtttcgatgatgaagccctgaaaaaggaagaacatgaattgtcagtcatcaatttgaattggtcctactatcacaaggtgaatatagatgcgtcaaaatcatcatcgcgcacgtacttggtcattccggtcattccagtcatccgagtaagcacagtagacggagcaacagtgtatcgggtgaaagcagtcgcttgagtcgcatccgtcatcacatcgatgttctctagagctggatcatcctgcatgaagaaggcgtctgtgaaaagaaaatgagaaagtcaaaacgcgtgtcgtcaggatgaagcgatggttcaaagatatatgcgtaccaggctgttgcgttcgcaagaccttcaactcttgaagtcggtcgacctgcttctccatttgttcctcaatctccttcaagtcctccataatgacgttttgagcctcggagagaagcgggtggattgttgactgaacaagctcgggtttcttgtgaagagcagtctaagcacatccaatatagaaattggtttagtccacacgtacgcgacaaaaacgttagaagaaaaagaagacagatcaactgacaactcggtaggcctcagagaagtctcgtcctttacagaacgcatgaacggcctgatcgagattatgtccataatccaaccagattcgtccagcttcaacatttcgccctctagactccaggtagtctgattaacatagatgcgaaggagtgaatccagttaacgatacgtcaaagactcttagagtactaatagaatgtagacgcaccacaaacgttctgacacaaagacactactcgctcatcttcgaatccctcagtgaaggccaacgtgaacaactccttccagagatgagccttttcgtaagctttcatggctcgaggggtgttgagagccaaggtaaagactgtttgaataattttcaagatgagcgtaattagttagagatatgtcagcttttgcaccaagccataggagaaagaatagataacttaccgattgctgcatcactgaactctcgcttgtcgtagaggtgctctccatagacttcgtacatgacctgagtattagaacaccgatatttgagtgaacagaaccagacgtcacatgtttgatcaagaaaggccacatactttgagttgatcagcatcattagcccagatcgagatcgactctttgtgtaggtcatacttctctacgtatgccacagcctcgtcaaaccggtcaggacctagcgtgatataatgaaaagggtgtgagttgactatcttcttcaatgtacagatggcacctcggaggagaaaacctaccagctaaatgcaagttcttcaaagcacttgcacgacgttcaagatggtcatcgatacggaatcgctgatagtatcgatcgagagcccggagctccttgaggaacggaagatattcacgcggatcctggttgagacaagtaagatgaagaagaatcaggatcacgtatcaatgtatgcttcagttttgcgcacggtctctgacaaactactgaccttttgcgagaattgagcaatcatcaggacgagctggaaatcatacattccgagagcgacatcaaacaattggttgacatccgcactaagatgaatccccaaaacgttcgtgccagtcagttttcatgagtcaatctggatatgatactaagagggataagagtgacattctcacaggaaaatgacatatttgacagcatcctcgacgatcttaggatgttgacctgttcgatgaattggacgtcaagaagagtttaggatctgtccgatcaacctaacaggaatggctggtttgattagataacctacctttaagtttgtgtagtactcgaagagcctcctcgtagtctggaggcgtcttgacaacgtgagcggtagatatcgagtcgacgtatttgagcatctgcttgttgagctcaaccagcatcgcaccacagattttgttgacttttccttcgacaacaaacgaagacctgacgaggaaacaatatgatgacactttactgattaggtataatctaaatcgcctcaaatgtcatagaaaggaggaccaagaaaagaaaaggaaggacaactgacgaggatgctggaacaccaggaacaggatacatgcttcgggaaacatcctcgtttctggttacggtaaagtataaagtcagctcagttttacatccgatgaaaatcataaactgagtctgaacccgatactgacttcagtccacccaagaacaagttgatataatcaacgtcttcaatctgctcaatgaaagtgggtaagttttgcatgaacttctcaggctcatggtcgtaaaggatgttgagatcaattcgattttttcggcaagtcaggaaggcatctcggtagttgcccctacagaacggaattacgatgatgttttgttgagcaaaatcgatcttgataagaagggggtgaccagtggggacttacttggtgacgtctctccttactcccgccaacactagcggtcgagggtataccgtctctaggtttcctcttggcatttgcaaaaccaagctattactcgacgaaacgacagttacgacgatagcacccctctccaccctcctctcttcccaaaccttttcttgttcgctcacgatgtatccaccgtccaggatcctcgttaaaatcgtcaatggggcatacttagattcatgagtagtggtagtgtaaataaggtaatcggctgaaagcccgaaggatgtgctattactcgcgattgaatagacttcggaggaaacaggtgtcattgcaaaaagcttgccaaggggagagagcgcgatgaggagagtggttgattcatgagtgacgaggcgaagagtcgggcaaaaggtaggtaggaaagactggaacggcatgagatcaccgtcaaaggagacttaatcatgtgttcgtttcaccacatgcatactcgttagtctagctctaagtgatcaatgataataggctgtgagccaaactcactggctgagacttgtccggtcttgtcctccaggataaatccgtcgattccagcgataagtttgcccataccactcgatcccactgatactgtctgccattcttcctctttgtcttgtttgatccaaacggagtctctgctctctttagcatcccatcctaagacagcgatggccttcttttcgtcttcccagaccaaggcgacttgacgagctcttacttcttctggaagcgagaaggagatgacaggctcgatcacctgcgctcgaccagggacacttcgatctaactttgttcgaacagaatgaagctcaatcgcaccggaaggatacaactgagcaaggatgtcttgggcgggggagtatgcgacgtgaataggagggatgcactttcgggaatccatctcgtgagagttgatgatcttgttgctggacatgggaggtgggacgttctgggtgcggaagggagtaatcaaaagagaggcgccgtcgacaacagagaccatcccagtatcgttcggagcaggtatcacagatccatatgtatcccaaatgaaggatcgaatctcgagcgagtcaggggtcaaagtggcgatcttgaaaggctcttccggatgccattgaaccgaggtgaacctggtcgtgtgaagagaaagagaggtgatctcttgcttgagataccagtggtagttgtttctcgtccaaatctggacaacatctccctcattatcgtccccctcgatccaaacagataacaagctgctatcgcagttccagccgagctctctgactctgtaagcccatcctcggccctctccgtccctcttcttaccggctacctctcgaagttcgaattccccatgtctcaacccgttcctctcgaaaaacacgacgtcatgccttccctctctaccttcacctgcaccttcaaatgtaccgaatcgctgagtggaggcgatcagactacctgacggctgccatgccaactgatgttccaacccagagatcgcctctgatgtcgactgaagggcggccattcgagaataagttcgaatcactcgacgcgccgcgttggatgaagtcgggtccagagtagagatggcgaaatgagcgccatcgcctctccaagagattcgaggcgtttcatcgtcatcaggagtgcacgcgttcttttcggaagagacatttgtctttggttgttgggcggctgctttgccggctgacccatgaaactgggtttccttcgatccccaaccgacgttaattgctttgtctgtgaatacatgcgaagcaaaaatgagtacagagtttctgaggacccagataaaaattattttgtctgtccgtagggggcaatgaattatatgcactcaccttctccaaaatccttcgatcgcaaagggctatcagccaaaacatcaaagtctttggtcatctgcagtaacttgtcatcacccgtgatgacgatcaagagttcctcatctggactccattctgcagctttgatcccagcgtcgacgacaccgacgacctccagttgctgcagagacgatgggattgcccatgacgtatttctcgtcagtcttctagaaggacaagagagaaagtcgacaacagatgaacgtacagaatccccagtgaggtcatacgagatgagctctccgctggccaaaatgacacaaagactctgagattctcccaagtactctatacacaggacctgcttagccagatgagggaatcgatgcttggctgaaggggacggattggcgatataagtggcaagctattgcaccggattaaggaaggaggaggaaagaccaaacagaaagggacatgagcgtttgtcgctcatattcgtttagaacctatccttgatgattgctcagaacatcaacgtacactcaaaacgtctgattcactgggcccttcaatagcgaccaattcaagctctatcgacccttgaggctgagccgattcaacagccacatagatcgcgccggtctctgggttgaacgcacaagaagaagacctcgagtccggagctgctgacggaagcttgcgagctattgatgagaggcaagccaaggatctcatggtggttgatcgtgagtgagggtccaatcgtgataggcctaggatgaacgaatggagagaaagcgagttcccaaaaaagttaacacttgagtataatatttgaatatcttaggtaccagataacctgctgactaatcattggtccatcccacttaccctcatcatgttccacctggccggatctcatctgtccacagtctcacccaccttgtccatctcactcaccttaccttctttgaaatctcgttccgactcatggcatcctggctatttgccccatccccattcgatatcttggtggacaaggcaacgtcgccatccatacctatcggcacccaggatatcgttactaatctggagattgctgatgagatcagagcaaagacaatccagcccaagcaggctgtggccagtttgaagaggaagcttggggacaagaatccgaatgttcagatgctggctctcaaagtatgtctccttagaacttctttctgtgcactgttgtttgtccatgggtagttcaagtggcggtatggctgagcggtcgtgggtgtggacacactgtgccgctctgataccgtcctcgaatgcggtggccgcgtcttttgttcgttctgactgtgtgaaactgttcattcgactcttattagcttaccgactcgtgtataaagaatggtggagatcaatttctgagtgaagttgccagtaaagactttatcgataatctggtgtctgtcttacgaatacaggtatacctctgctcacgcgtggcttcagaccaattatatacaccattctgaccgatgcttatttgtgtaccgtgactggcccttggatccatcatcattcagactgtcaatcacgaagtcaagaaaatcggattagacttcttccagcagtgggcacttgcttttcagtctaaacccgaacttagttatgtgtatgaagtttataagagcatgaaacaagatggtacgtgtccgcccctgatgggtcatcaggatcctagcctttgatcactcaacttttctcttgtcgtgacatctcttctgtgttcataggcatcaacttcccttctcctcctacctcaatcccaaccgcgctcctttcaacctcgaccgctccgacctggatcgactctgaagtttgccttcggtgtcgaaccgccttttcattcacaaaccgaaagcatcactgtcggaattgtggtaaggtgtttgaccagcagtgctcatctcactcgatgccgcttccttggttcggaatcaccgacgaagttcgggtctgcgacgggtgttggtcaaagtctaagacgggtggtttagccaaggaagctgtgaagcaacaacagaaggcacctcaaatacctggcaagtcggctgctcccaggagtagggccgacaaggagaacgaagaccttcagagagcgat

SEQ ID NO: 1757 - DNA, 6968 bp, Xanthophyllomyces dendrorhous
cgtacaaagcaagaacattctcatggtaaagtagttgggtatttggtaacgatcgaaatattagaatagataatttataggtaagcttaattgcgagggcgtcgagatgacaagttctatttccaatgtttgatcaagagcagtaaggactttccgcgtcagaatcaaatgcagaataaattgaggagtagagagacctacaatttgtttgacccagccagtgattcgttggtccatctccggatcttcctcctcgagattatacacgactgactgatcttcttcacctaacacttcatcctcatcagaaccttcatcagaatcgtcgatcggttgatttcgacttatacttttggccttagcagctgcaagcgcttgatgataggtttgttcgagctcagcagaacgaagagcgaggtactcttccgttcgggcgtgttcttgagctcgttcgtccaagacagaaggagtcaggggttgtagcttccgaggttggaccctcgagttataatagtagtatctcctgttttgagaatcgaccagataagcgaaagatctcagatcatgctgcacgcagttatctttctggagaaagataacgaaccttccaggtccaacctcaatctcttcctcgaaccgaaaggagacgtccgtatcgtcttcgtcgctatctccatcttcgtctgtatatgatgaattctgagatgacgtgtccagctcgtcacagtttgggattggcgagttgaggaacttgactgcagtccctggtgcgagttcagttgcaaaagacatggcgctgatcgtagtcatatttttcttttgattgtagagcagggtgtttgttctgattgagagtgagtagagtattctgaacaaaaaccgtcatcaaggctttcctttttatctgaaaagtatcatgttcgtggtcaagatcgactcgggacaacagatgtgtatggagggtgtcgtggttttgtcaaaaggcgacgtggcctcggttaactccgattttatctaggattatgtaagtattttacttgaacatgtggtgtcagggttcgggttccgaagggtgacggagaggttacgaaggttgcaatcagatggggaaatgaagctgataaggaggaagtacaggctctctggctttagtgattataacgagggcgcaaggcggggagattgaaagaacaagattcatatgacactggaaacaagaatactaggaacccaaggagtgacaaaggatttaggcttgaatagctgtactatcggtggcaaagaagcgacgtcttgtaaactatcctcagacttcaatggttaggctcaacagaacagatcatagaaggtgctagaagtgtctgcgctgcaagactgttttcctgcaagttgttgcaacgagaaagcataagcaggaacgaagcaggagatgaaacagaagtaggagaaggttcccgggagtgacactcaggtcacattccagagatgtagacacttcttaggggtatcttgtacaggatcatacttatttgtataaacaatatgagtgttttcaagcatataggtaggtttgaattatgggtcataacatcatgagtagcagatgagcaagaacaatggttaaagaagatacattctttgccgtatatttcatatttttacagccatataattaatttctgatttagggatctcttgttgacattctcgagcttggatcatcctgaagctgctttaattcctttaacgaatccctcatttgcctgagaacatcagcctccattctcagctcgtaaagacctttgctctttgatgactttggtatcgatgaatcgcttagccctaagagaggagcgcttgaaaacggggttgctggtagttggcctttaggtggaggctggaagtctgaaggaagaggtaaggagtgagtgagccggagatggtgaacagttgatcgtagaaccagttgaacatcctatcaggttgaatcatcaccagcgaataggatggtacaacgaaagacaaaggcggcggcgaaaaggaagattgacacgacacaaattcaagaagaaaggttgtcagatagttaaaactaaaaacaatcggaatgactttgacaaagacggacaaacatcgatctcttggtagaatgatttggccagatacacaaatcgttcctcctcattcatgattgagccatcctcgttcgacatcggaggatcatccggattcggcggaagaagagtaaggagtgaccgagagatgagatcgagaagaccggctatcttctgtaagagttcagtagtcaaatgttagcctagatgatacgttagtagcgtttgagtatcgcagatcaagagaggtagttcaagacggagggagcctgatagaggaaagggtgatatgtgacctaaacgcacttggtcagtttcaaataacgatcggatctggctagatgatgagagtggagttgttgtagacatccttgttgtctttggcgtgagaaggtgaggcagaagagcaaggtaaagaaggaagatagcctagatggatgaaatgaatgaggtttacacaaggcgataattgctgtgattagattacacgtgactatgtatgtgattaggtaaacatacggtgaatagttcactgaggtgactaacgatgatgctcgtttgaccgccgggccggtaaaacgctaaaatatgcagccgggagacatggtgacaaacgtttgatcaatactgaactttcggtcacctttccaggtgttctgtactccattgaatcgcatggaaaagatggaatgacaaacctgaccttctggggttccgctccatagagtcgtgcttgaaatgaacgcacttggaatcagattggaggcgtctttcgtgaccattagtctgaggatacctggtgatatataagcatgctccatcgatgtggtcttttctcttttaactcttgttgtaatttcttcaatcaaaatgctcagatccgtatacatactacccctagcattccttatcgccaacttctcagtcatctcacaggcagctccgttggtttccagacaaatcaatgcactctcacgagatccctcggtcgcagaccaaaaggagtttgattatatcgtcatcggtggtggcctggctggactaacggtcgcgaatagattgtcagaagatgccaatgtgactgtacgtacttggttggtggtatgtctctatgtggcttgaatttgtcatgttcaactttgatttgcctctttgaacatcatcataggttcttgtaattgaagctggtcgagatgaccgcactgatggcagggtatataacagtaaatatgactgacttcattctgcccgaaacagaaaaggcgtaattgctgacttagtatgtgtgatcatcatctctagtcgcaaactatggtcaattttatggaaccgacctcgattggagctggaagacgactgcgggaaaagcaattggtggtggaaagaccctaggaggatcaagttctatcaatggcgcccactatactcggggtgaaaaagcccagtatgatacttggggaagcctcattcctaacagcacttggaattgggacaccgcttttaagtacatgaagaaggtacgctgagtttttgttgctatctatgacccagcgagaagcgcacatgagggcttacttgatcatttatgtcctcatttaggctgagcgcatctatcctccaaatgacgatcaaagagctgctggcgcaaactataaccctgaataccacggtaccagtggaccccttgaggtcactttccctcaatacatgtataaaggtcctggtcagcctaacttcaacaagacaatttccgaatcttttggagttccttgtacgttgcactttccttgctatcttttcttgaaagcaaagaccgttcaatctcattcaaattaccattcagattcgcccgacttgaatggtggcagtgcagccgtagtttccttcactctcactgtttgtcttgcctttttccattcttcatattctcctcgcctgcgcacattgaattgaccttacttttgatgacaacatctcacagacactcaatccagactccaactacgaacgatcatcttcggcttcggcatacttctcgcctatcgagcatgtccgagacaacattgtggttctcattgaacatcaagtcagtatttccatcagcctttctttaatcatagtacaaacgatgtgaggtggaagttcatttgttgatatgttgtttgacctctatatttctgaaaatcacaaaggctgttaacattgaattgtcttctgaaggcagcgacactgtcaaggctacaggagtcaacttcaaatcgaccacaggtggaacctccagtgataactatcttgccctggccaaacgagaggtgattgtcgcgtccggtgctatccaggtaggtttctttggtagacttttgctgacgcaagtcgttctgctctacagctcctgattcttctctgtatttcttgttcatcgtttcgatagtcaccagctctactgcagtattccggaattggaccggcttctgttcttgaatcggctggcgtgactgtccaagtcgatctcccaggtgttggtaaaaacttgaacgagcagacatccaccgtacttggttacaccccggatgatggggtcgaattcgatggaagtggtccttccgataatatcgctttcccttctttcaaagcggtaagttcaccatcattatttttcaatattgtatttttcggaagatcttcagctctcaacatcttctgttcaattcctacggcttagctcttcccgaatgattcggactctgttgcttctgaccttcaaggcaaaatttctcaatacgcggctgacgccctgaatgcgggtgccatcgtttctcagtcagctggagaaactttgtttgatgcccaacgaaaactgattgttgagggaggtgctggtctggctgagcttttcttcgattctggatgtgagtcaatacatcttcttttcaattctgagtgcatcacgcgcttctggcctgaaatttctggattctatttcggtctggttcatttcggtaaagtcccaaacggcgggtttggattggacacttggggccttcttcctttctcacgaggaactgtggaaattactgtgagtgtagatgcagctacttggacgttcttttccaatgaccatcaaccagttcatagtgactgatctcttataatttcttctccctctgtcaatgaaatccctagtcgaacgactctttcacacctcccaaagttgatgctcggtactttgcggtcgactttgacaagacagtacagatcgcagcgatgaggctcggtcgacaggtattccaaactagtccactgagtcaatatgtcagtggcgagaattcgccaggattggataccgtgcctgataattccgagcatggttcatctgacgattggagtaaatggatcgacgactcctgtaagcccaaatacttgttttggatcatcggcagtagtaaaaatgtcgctcagacgatgtgacaggagaaagctaacctttctttcgttttttgacttgttgatggttaatatgaaagttgggtcggtatcacatccgattgcgacttgcgcaatgatgactcgagagttaggaggtgtggtcgatgattcattactcgtgtatggaacttccaacatccgtgttgtcgatgcttccgtcattccccttcaggtttgtgtttcgctgcttgcaatctttttttctccctctgattaaaatctagattgcgacatgctgacggctctgtatcattcatgatgatgatgtgaatatcaaatagctttctgcacatctatcggcttctgtgtacggggtggctgagtatgcggctgaccaaattaaagtatgcaaatttcacacactgtcgtttgaattgttctcagatcttgatactaactgcctggcctttcctcatgcgtgtgaccactccttccaggcttcacaataatcgctcaagagtatatctagttttcataggatctttgtatcatctcctcttttgatgttctctgttataaaatatggtatcaaacacttttctcttctgatttgtatgtatgagaaagaagattattcgaaagatacattgattctgatctgttacagtaggagctaacgcaacccaattggatacgagattccttgaatgcgctttatatgctcaagatagtttagtctgtgaaagagacaaaaaggaaaccgttctgaatgtcagtttcgcaggaggagcatgtgacttttacaatgtcttatgaagagttacgaacagttcatgttctagaaattgttgatccgtttcgatcgcccaagagaagatagtcagcatataacttcatgtatagtttgaagaaacatactccaaagagactcaatcttacctcgatggcctggcgcttggcttgtcgcttggcctcctccttgtcgtaagcgtccaaacccttggtctcgaacaacttgtcaacctcagcaccagccaaagcagccaggatctccttggctcgagcgtggttctcgggctaaatcgtccaaaagaaaagtcggtattcatccgaaagaaacaagaaatgttagtgacaaagcgagggactgcgcgcagagagatgagcgttgacgcacctttccgttctgcctctcgtggttttcgtaagccttcatggcctcgaaagcagcagcaccaccgatcaactcgtgagacaaagagctcttgtgatcctcgttgttggggtcaacgttgtaaacctctaaggttgacaaaggtgggtgagatggcgcccgatgagatgggacattcatcatgtgagatggatgatcagtttggagttaaagacatcaaaggagattgacctcgacactcacggtccttggcg

SEQ ID NO: 1758 - DNA, 21297 bp, Xanthophyllomyces dendrorhous
gttctatataaaaccagaacctggagggtgaatccaaaacaggaccatttagtgtgcttcctcggaggttctttgcttctaggtgtcaccgaagctaggctatcagttcctccgaacctgaacgagttctcacaagccgatatggaggattggatcactggaaccgagctcatcaagacctgtgtagagacctacaacacgaagacgtgcgtgatctctaaattcatatctacctcacatatcttatagagagatagagagacaaatcgatacgacgatatgttcagctaacggagacttgatgttcgacagaggattggctccagaaatcgcgttcttttacaatgaacaacagccggaaagtgcgatgcaagattggtacatcaaaaagtctaggttagtaatccttttagttcagggggcgaaataaccctctttgcaacttttgaatgtgacaaaatccgtatattgatctcctcaaacatcgtcggggttcgatcttgttcacagcgcggaaagacctttgatcgatgctcgaaacatccttcgacctgaaacagttgaatccctgttcctagccttcagattgactggagacccaacttatcgagaacacggctggaagagtaagcatgattcccacctcttccctcttctctcagtcctgtccaagcctatattattttaaatcctgactgatctctcaatctgtgtactatgttatctccgctcgttttgtaagtcttccaagcattccaagagcattgccgaatagagactggtggttacgtctcggtgttagacgtgaatcaagtcccggtcgagcatgaagatcggatggaaactttctggttgagcgaaacgcttagtacgtctctagtccttcctggtgtctttttattctgtgtcattctctcaacatattttcgactcgtttgctgatgattggcgcaacatttgggacttgacagaatacttgtacttattgttctcggacgctgatgtcatccctctacgagacaacgtgttcaacaccgaagctcagtacgtaccgcgactcgatgtccgaacgttttctcaaaagaagatgacgcatcgcttctcatgctcttgtgctgacctttccttttctcaccctgttcgtgtacgcatggatgaagtatccttcctgtgttcaagccgacagtgaaacatgatatctagtcgttcgggcattcaattataataaaagcttggtgaaaacatgtattttctctgcattttgcacgtaaacgtcgaattgacagaccaacaggaattcataagagtgtcgtggaccaatagtgaggtacaaataagaaaacatacaatcaggggatatacaaaacgatgagttccacctctgttcaaacaacccgaccacagaaaatagcacaaaactaaaaggacaaatttagatcggaagacagaagatggaaataaaacagttagaaaaaaacgatgaaaatgaagtgattgtaaaacaaagattaaagtgtcaaaagcaagaccccgaaaaccatctactccgacccaagcccaaacccaagggctctcttccaattatcctctgacaagtctcggacccgattactctccatctccacctttgattccttatggtcctctgcaatcgcttgtgtattaagcatggtagaaagcattgtttttgacaactccgttgcagtagaagtcatcgtctctgcgtctacttcttcaattgcagcctgaataatttcctcatcatcctgaacgagactttgccatctatccagaacaattctcgcctggctgatctctccgccccgagcaaggctgtcgctcagtttgagcgtgcttgatcgattcggaaccagattcaacttgatcgcatgttgaaacgactcgagagccgccatcggtttcccaagttgacagagtgcttccataaagtaggcaaaagtggattcgtccggttgaagagactctcggatgatcattgtgtgaaacaaggtagtcgcccgaaccatggcgatctcgggttcgaggggctcaaacgtgtcgaatagttcaatcaaccagctaggcccttgtcgaaccccaagatgcattcggagaaggatgttgaacgtctctgtatctggttttggaccatgattcatcattactgtgaactcagctacggcgcgtgagacattttcctttgttggatgttgggcgataaaggtgagcaagagattgtaagcctgaacaggcggaagctgaccagaaggataaaatcctctgatgagaggtaagatgttgagagcatcactggccgagacatgtccacgtttgacaacggtaatatcttcaggctggacgattcgttgaatagatctgatcactcgtccccgtgaagatttggctatggccattacaatatcatccgtcacgatggcgtcgccccatttttgggaactgtctgctagagcgcgagtcgccatccccgctaatctaggttctcgaccaacgacttcgagaaagatggacagaatgtgtccttgtagaggcgttcctccccatgcgatatgatcatcgtagatatttgcagcaaatcgagccataggatgacatcggttggaatgattggaatcatccgtgatcttgacaggaacgtctgtttctcggatgcccagggccaactttaggatctcgatcagagtgttttcttcgaatacgaatgctcgctctctaagccggaacatctcgtatagtcgtctagtgaaaggcagatcctggtgacgaagaaacaagagcagaagctcgtggtgatgtagtggcgatatggtttccaactgaggataaactgagagtagtgggacgaggagcattcgtagattctcaacggggagacaaaactctgagggtgctgatttctcaaggcggagaattgagtcgatgattacggagactccttcagaactgatatccccagagccattgagaatatctcgcgtgaggatgatggccgaggtcgttcttgagagtaaagacgaagcttgctcgttactcatccacgcttcctcctcgtcatcttccatcaatgactctacgacctggcatgccgatgaggattgcttcttctcacacaccaaaagatcctccacccacccgttcgcaagtttctcaccatctccgttcaaccctttataagcaccaacaatgaatttccaaagccgccgtctgatgtttcggctataaaagctatcttgttgaacgagcaactcatcttgagtctgtctagcgtctaagacggaagtttccgctagctcgatttcttgtttgagttcctgagaattgctcgaacttcccgcagagagagaaacagcaaagttgtgcagactttcgggagaccaggatccgaccttgtccaaaaagagagaaagggcctcgattcggtccactttatcttccggttgattgaatatcagagtctgccgactagcaccgagatctggagaaccatacccagcgactagaccgacccagcgccagagatattgttggttgtcaaacggctgaacagatgagggatccgaaagttcaaccatcaatctccaagcctctcgtaagatgacagcagctgcctctctctttcctgcattctcctttcgttcttccttgtccaatatacctaaatccacccgatatgcctcgccaatctctatgccagccaagaatgtttgtcgaagttgctctgtactgagccaccattgcaccttcctttgccccttccgagtagttactactgggtaagattgtgcggcatgaaggaagattttgagaagccgaaattgacgggtgcttgggtcggcatggctggcttgcgacttgaacagaagagagagcatcttgggcggcacctcagcaggctcgcactcaagataccttccccaaagatcatccggatccagagattcggcctcggcttcgttgacgaaaggaagcttagacttatacgatgaagacatatcaacgttgtcggaagtcttggacgtcagcgcggatggatctgaggtaaagaagtgcggaggagggacacgttctgacataaatgttgaagaactgtcttcgcctccggtcctaactttgggtagcgtaaacggctggatagaatctgaatcataagaaaatgctggcgataaaggagtcgaacgggccgatcgggaaaaatgagttctttgtactgaaagaggaaccttgcggtaatccatgatcggttcttcggactctttcggccatacttccacgatgttcgttatatctgcgcttatgagaccgaacccagacggttcgcccagtgtaggtagagatgaaggcaaagcagaagattgggctgtccgcttgggtaaaacatctggtgagattttaggtgagggttcaggcagaggaggcggaggcggaagagtggaagaggtcggaggaggtacgacagagaatggtgtccaattcgaagtagggttggtcgtcctatattcgcgctgattcgtagcggtgtggcgtggtttagccggaaactctgttcccctggagggtggtccagacgaagcctcccgaaccaacctctggttgcattgtttagcagctttccgaagggcaagggacgttatggaccagggtgcgctggggtctgttgaagaagctgtggaagagactaaattagggaaagcgggagaagacgtccaaccgggatgcataaagactagatgggaagatttgagacgcgtgctgggtgaatgtgaaagaagagagccatcggaagaaaccgaagccttttgaggtctagtcggttcaaagtatgaaggatggactttgaaagctccagaagcaagcacagaggaagatgctgttggcagggaagagtgcagaagaacattcaggaagtttgtagtcagtcagccagttatattcaattgagatcatgctaacttcatagagatatcgattgtaatttggacgccaaaggggggaaggctataccctgtcaaattgataaacgcaaacccacttaccatcttctacctgttctgcacaatctgatcttaatccgctttctccagtgagcgtgttgagatcttggccgaagccctcgacgttaggaaggatctcatcataggactgctctgtttcccggaacgatagatattcctcggaagaagatgatctgtgaaaagagcgttgaccagtcgctcttgatagacagggtgctagaaatgtaggtggcagtcgggcgacggccggtgcagagagaatgagcattgaagaggaggaccgagaaagccgcctggtgaggtgacgtctatgcatgcagaccaagttgactagaagagacaattgtatgaatggcacgaaagaatgagatacgctcgataggcagcaagaagagacaacaaggtcaagactgtgaaggagacagaacgtacgtgcaagccgctgctgctgatgatgatatgcctaagggtctcaatcttgtatgatgtccaggaacgatccacttatcggaacaaataggaatcgtatagttttccgtcctttttttgttatctgccaagaatctatctctggtcagcgtggagaatatcacaccgggaaagacgacttgattgatagagaccgactggacgagatggcaaggtggaacggacgacgggcgacggacgagatggggatgcagctggttctgatggaagtgttgtggaagccccgcgtctttttttgatttgtcctgtcagcacgtccaatcaagcacgagccttttccgtgctgtgtaatcactggttacgtagctcacaagttgtcacatcatcagggccggccctgagcgtctcaagtttcgtataaatttgggaagtggctcgtgtcatactctacctttttctcctcaaggaccatcttgcctctgtgcaagttcaatgtcgatcacagcgaagcacctcctcttctcttccattcctttctttttttccatgttttctttcattaggaaacaggaaacgtagttcgggagggaccagaagagatcttttttcgataggtgtatatttcccggtcgagtggcttccaacggcggagtacccagattaccatcccccccttttttcccttcttgaggaattccatatcacttccttgaccgctcccttttcggagggtgtgttgactcggaaaatggagtttttcgggtaggtgagaatcgggagggaggacctttatttcatatccgtccctatagtccttggacgattaggtgtttggaaaaaccaaagcgtcgtaaattctttctcccctatcatatggtttctttatatgtatcaagtcggctacaacaaaataatcaagagacatacaataaccaaatttattaaaaacaaactaagtatgaaacaggacagaataagacatgataagaatagacatgaacgatgaataggtaaaagaaagacaggctggtcaaccaggtatacagaggcaattaatatcaagggtgtagcgtacgaagataaactaatagcctggaaggataaatggttgagagaatcaattcattaaatcaagaacatcaagtaacgtaaactttgcgaaagaggaaaccgtcaaaataattggagtgagataaaagaagacgaggatatgaaacacgttgaactggtttgattttcagaacatcgtcgccaaagcctcgccttcagctttgagctttccagccaccgcctgagtagctggactcgagttctttccgaaagctaaatataatagttttgacaacgcagaacagatcagagcgacttcctatcacaacatctgttagacaaagaaggatacgatcatctgaactggactgactgaatccgacccagacgcctcggttgaatccgtcgtttttctcctggacggcatcgacgtgtcgttgtttctcaaacacctcccctacaatccccacacacacagagtttgtcagctgactagatggtcctattacaacggtagaagaagacgaaccatatttggccaagtcgccttcgtttgtgaagtcgtcataatatcctacatcatcctctccctccaagctgggcacgaacggcgcttgggtatctctcagattgttgaatgggagcgaggcgaaaaacggttccatttggagctctgtcaaagagctgattcgagtcttgtcgtgggtgatcaacctatataccaaaccatcatttgaatcaagctgtcagggcgcatgccctagaaggactcatcattagagaaagaaacagtgattgaaagacaaaccgagtaataacgtcccaagcctcatcactcatgttgaagattaaatccttcgggttcgtgtacactggccgagtcaatactctttgccaattcttcaaattcgcccacgtctcgtccggcgtagctccagaaaacggcggataggccgcgctaagaggtggagcagcaagtcaaaaacgattctcgtcagtctcaatttgcacacaatcgacgctcggcttcaggagcagattgaatggaaaggcgtacaggaattcgaataaaatacatccaagagaccaatagtccaccgagtacgagtattgctttccacgaaggacctctggaggcatactgttcgttgtgaatcatcaaacatagatataagtcatgaaggtgatgtttaagcaatcaaagtcgacgaactagtcaggagatccaaccaccgagtcagcctgtttcggagaagaagacagtcaggtccgatcagcaaacagcccgacctgtgtctcgaagaaagaatgacgaaattgttgagaaggacgagatctcacatatcgaggctcagtcatccggatgctccgatagatcgtcctcctctccaaagtgtttctgaggatgagcttgtcgtctttggcttgatccaactatctcacatcgaaagcaggcacaacgagtggtcaactttcgatgagcttcgaaatagagagtaaagaatgatatgtataagctgacgaaccttgtgcctcatactctcgattttcatcggattcagcgctcccgtcgccaacccgaagtccgtcagcttgacatgccctgtaccgtcaactaagaaattctccggtttaagatctcggtctaagtgaagaacaacatgagatcggaaggggtcaatacgaaaagcgccaagcttcagaaaaagaggcatgttacagaaattgactgtgttggatagacgaacgtatatatcccagcttgtgcagctcgttgaccgctacaaacatttcagagatatagaaccgggcatgttcctccttgaggaccccggagttgtttaggagcgttcggaagtctccaccagggacgtattcctagaattatccgaaagatgattatttcgtaaacagagacgagaatcagttgagtcgaaattttataagaaagaggaaagaaggattgtacggaccatagctagataaatgtgctcaggatcctggaaagcgtacatcaaacggaccaaccaaggagttttggtcgccgtcaagatatctctctcaaccaagacatgtttgatctgggaaaagaagtttggttagaatcagtttggaagagcggttgtgtcgataacttctatggcttgagcagagaaatgaaggaaatagatgcccacctcatccatcttggccagcgtcctcttcttcattttcttgagggcgcacacctcaccagtgtcagctttcctagcaagatacacacttccgtagcctccttgtccaacctaagaccatgcatttgcaaaggagataaacaatcagttaccctctctgtagaccaaagtctctaaaaaagaaatgtacctgagcgatgattctaaattgatcgactttcaacttcgttcgtcgttttcgaagtaggacacgctctcgacccagatacgaccgtagctcagatctgtattcggacgagtcgggcgccagctcacgagaggacgtagattcggtgaaggcagtgtgacgcaactgcctagagtgaaggtaattcaacaggtcgactagcatcacgtcgaaggaaaagaagcacggcaaggtaagaaatctttcttgcaaaaatcatgtaacagatcggttgttacacgcacagtaataatctaggaagtctgatggatgagaccagcaagtaaagctatcgggtcagcgatcactgtgagggaaagaacacaagtatttggaggatacactcacaaagctgagcaacagtagcctttcttctgacttccgggctctctgtcagtttgagttcccattctttgagtcctccaccttgagccgctcggtccggtcgggagcccaaggttctgaggtcattcatatcagcttcaggcggaagaagaccgttccgttgagctgcgaatgcctttatatcagctactgtcggagtcgagggacctccggcattgtaggcattggaacgaatgtcaacatttgatgatgtgggcgtacacgggtcaatattcttggtatatcgagggataccagatgaggacatcaatggggactgagacggcgaggggaaagggacgggtgttgcagcagccatctcggataattctacagagtttggccgtttgccatgatcttaagtacatgctatgttcactagattataagaaggcaaactcactaggagagactttagtgggagacgagggacctttggaaggagacgattggccggatctgatatcagaaagaaaaggagcgaagaatgttaggatcataataataataaccatctcacgcacagacaaacatagctgttacctgactatagattcgacaagaatttggagaacgcaaacttccgactgaattagtaaacaaacaacgtcctttctctctgttttggctgtctttgaaccaaacaagatttgtatagccaacgactggcagtcgagaacaagacttacgaccagagttgctctttgaaggcgatgacggaggattccctgtcttctccttgttgggcgagggaaacgactctttgagcgactctgccaacgattgagtcgatctaacgatgaggaccaaggaaccaggaacggaaagctcagggccacagttcaggaacataatctcatcgagagccaagaagattcaacacaaccatcacacgtacctgaagactctagatatcatactgaatagatttctaggtggaaaaagagagcacgtagatttgactgtatatgtgtatgaatgtgagtgtaagtatgagtatgtatgatgtttaacgagcaagcaagggttcgtaggatgaagagtggagcggcagcagcggtaacaaggttgatagccaccccaagaaatcataagcctcattcagaaaagaaatcaacacgtcgcgtcgagtcgcgtcgagtcgcgtcgagtcgcgtttcaactatttgacctgcacaggtcgttcactctcgcacatacagtagcttcaaagacatcatacattacatccacaatggcgctctcgtcctcgcttgcctatcacccgtcatcggcagctctagccggaccatcaagtttagcatcaggatcacgcccacctcatcccaatctggctgatccgacattgacgcagatccctacgaattttcctccattccaacagcaatccacccaattccttgcagcgctcgatgccttcgtccttcggggtaaggaggaaatcatttttagaaaagagactagggaacggttggtcaaagaggctgaggagcaaaagagacgtatggaagaagggattgacgaagcaagtcgaggcgaaggaaaattgctggagagtacgtacgagtggccagttgtcaagtttctaaattccttgtcgcaatatgaatttaccaacactgacaatgacatctgacggacaacagttctagagaaagaagcatcggatgtcgctgaagtccaaacgacaatctcagacctcaaactcaatctgtcaacactggaatctcaagaaagagcacagacggctgaactcaaggaatggactgtcaaagttgaacaactccgggcggaaaagacactgagactatcgaaggaggcagagataagagcgtcaatctctcgggacctccgtacattggaaaatgccctaggatttaaagtagaaggagtcgatagtgtgtttcttcttttccttttaacttcttcgattctctctgatggctttactaacccatccattctatctagcggataaactcttgattcggttcaccaacctttccccagatgacccgtccaaagtcttttccttgcttatagacctgtcttcccgtctctacaaaggtgagcgctagacatcctgctgccgttctatatgctcttctatatgccattatactcaacaagccacatatttctgtgtcgctacagtttcttcgatctcacccccgctcccgtcattgccatatatccttgagacacttaaccaagaccgagactttcatcagttcctacgtagaagtttgtctttctttgcctttcttggtacattcgcagtctcatattcactgatctctctgttctatgtttcttctcatcttttagtccgcaaggcattccaaattgaggctaactaagattcaccgtcatatttcgacctgatctcctttgcttaacctgatacgacccacttaattatctttctatctatatcattggttttacattttcaaaaccttcttattaatcgttgtgcctcgctccttcataccgagttcttaaatatgtttgagattatatatccacttttttccgccagtacaaattctaggtatctctgtaagccacaagtgtatgtgcgaagaagtcgtttatccttcatcaaaactcctctatctcgtccccttcgatctcgcctccgctgtcttcttcgttcctatttcgtgccgcttgatcctcatcgtcctcatcgaaaccgacaggaataaaacgttttgtcatcatctccaatcctgatatcccttccttgccagcattcgtccactcattcttaaccaatctcaggtctttagctatgtcagcatcaccgtcaagggagaggggcaaatcggcgactgggtccgatgtggcgctcaggatcgaacgaagatttgtggtagaacgagtgtgtgagatcggtacgaaaggaagagaggcgagttttgggagggccgctgtgggtcggtcgtgaaatgggacgggaagagaagcacattgggcatcttcagatcagtaaaaaagaggcttgatcaaaaaggaaggagacttcccctgcctacctggataatccggagggataggaagtgactttagttgaggaatcaattggctcgtcatgacttctctcgatatttgacctaattcaagcgattgatgatccacagagtttatgatcaaatacgtgatgtgacgagtagaatcgggtaagaagagagattatagaaatcacataatcgactcatacctagacttgtatacttagcgagccaattcccgacgtccgttaaggaggtatcggtctccctctgtattcgggcattctcaaaccaatccggtttatacaccttctggcctcgtctgtccgtcagaacacaaatcagttcatttttgtgtggcagagcgtatgagacattgatgttatttgactcgaacgaaacgagcatctgaagctcagaagagtgaaacacgaaccttagaacgggcgatggtagaccgaagaggattcctctggtcgcgagattgaaggcgtacgagatagacgtggttgagctttgccactttggtaacatatcccattacataaattgtcagaacgttgaatcatgttttcctctggtgagagcgtcttcagaagaaggaaggaaagaaattctcacaagatcatcgtctgatcgcaatgcatcacttgcgcttatagaatcaaccgcctcgaaacattcatcgacgtccatcgtgaagagcgggtagttttgatgcagatataggttgaagagagagatgtcgacaggagattgagcaaacaacatctgaagatattgttttcaagtattgaaaaagagtcaatcgacggcataattgagaatttcactccgagagatatattttacatacctcatgatcaactttagagattcttcgagatttttgttgtaaaaagctcggaagaggaattacatcagagtggaaccgaggcacatcatccctatcttctttttcttcctcgggatctccaacgcctatatcagaagcagttgtcgtatgaccataacttagctagatgttcgtcaagtagtagagaagattcgcaagtgaagaagcagtgaatcaacacgaacgcttgttatataaaacctttcccaaagcatggaagagagctaaagactgttctcgtcttgtaactgagttcaatctaaatttgatattcaacgcttacatttagatcagtcggcacattaacttctcatatctagagaaagtcaaggcggaagtggacgaacaactctttcagttccttgtcggctccctttggcgatttgcctcctcgtcccttcctcgtcttcttgacttccgatgtcagattggacctgcccatatcgactttacataagaattgcagtgcgttgatggcgcttcggatatccccattggaagaatgaacgatgagctcaaccgcttcctgaggaggcttaatggctgatttagatagtgcaagagagataactcgattaagagatttgaggagaagtgttggtgctatcgaattgaaactgatgtattgacgggggtacttcatgtccaattcagtatacacgcgtgtttctgttcagaggacgcataaatgcgaacgagatcaatctggacacacatacctgatagttttcgtggcgggaccgtccagtacatctttgcccaataagctccttacatcccatccattctctcccttctttcgatccatccagctttcacctgcgcgaccactgtctcctgcctcggagacaattacaacgagcggagcagcagatgggacccagttgactgcgaaatctctaagagcctgttgaaagctttcgcgtgttggagcgtgggagagatttggaagatcatccaaaagaagaatcttcttgttggatgtacaattagaggaggagcttgtggatggagacgcagacaaatcagaatcaaaagaaagggagggatacgcatagcgcgcaaggaaggccctgaagcgttctgtgagagattctcgatctattttgtcggggacaaaagtcaaatatgaccttgcaaaaagaagcgaattttctttcgaatctggagaaaatgtacctaccggtgatgcctcctatcccgaattcttcagatccctctacccaatcgatgatctcgatgcccatttcttgagccacagtctttaatgtagccgtctttccgactcctgctgaaccactcaaagctaggattctctaatacacagacacgagaaacgtaaaacgtaagatgcccttcgctttgaacagtaattcgtgagagagctaactctgtatttgcctctgagagcggcttgcgatgaggtctctgggtgatcgacatcaccaagggcctctcgcagccaacttctcacttcgctgatcttcttcttatgcaccgcaagatcatcctgtttcatcaaacagagaattagttttcgggcaatccttagtatgactgtatcgacaaggagctatacagcgtaaggtgaacatactgctgatgtaggcgcgtatgcatcaacccacaaactcgctgcatggctgtcagatttatctgatgggagcggaaagcttcaatgagcgctaaatggcaattaatacgaaacaccacgagtaataagacgaacagcctgaaagttggtacggctctataggcgtcgttcctttcctctttaacatcctgtctgggttcggtctcgtttcaacagcctcttcttctttatcgatctggtcaagctcgatcacatcagcttttcgcttgacactgaatgttttggaagggcctatatctgaagatgtagagggcatgttctgagtgaaggagacagttttagactttgatttgccaattttagatgcgacggctgattgagaagatgtcagagatgatgcgcatgttgatggggatgaatgcgtaatcaaaggagtcgttagagagaactgtattgtcccaattcaaagcagacactctcggctcagctcctctcttctatagttgtcggaactaagaaagctcatgggtatatctcgatcagtgaacgtacggaggtgagcgagcctaagcgcttcatcgtccggggctttgagcttgccgaaaaggttgcctcaacagttcctggagaaggtttgaggatagattgattatccactgttttctttgacctagatggttgcttccttgaagtctccggctttggtggcatcttataaaggcgttgtttcactgaggaaggtcgaaagagataatggaggggaaggcgcaaataggatgatgcacagattaaataaattaaccctaacatcgcgtcgcgtcgcgtaaatgggtttgttgtattacgtaacgaggatcgcgtggcgcgtcgcgtgtcaaatcgttgactgaatcttcgccgtttctatcaagagacgatcttcaacttcaacttctcgtaacagatccaatcactcacactcactcactcactcgtttgctttgttcccttccttttagtctctatcgatcgagccatccggtataatcctgccttgacagtcatgggagtccatgtccgttcgagcgatagcgacgttatcatggccactccagactcatcaactactacgtccgtaatttcttctactcaagatatgagtaagtctattctccagctctgaacttttcttgatttgtaaaggaaggaaatactttgcgctcgccactgacgattttctttggttatctgtcactcagctaatgaaatgcctgcctttaaactaaagtcccgtcgatccgtcatcttctcctcggtgaatcaaaatcatccttataaagaacccagccccagacgcccggcagtctcggctcagtttcgtgcgctagattcggcatctatgaatagcgtcaaccgtcccacaaactcaccaaacatgaaggcgggtgacccaggttcatcaggtatcctcactccatctagaggaattctcaaaagaacgggctcggaagaaattaggctcgcaaaggatgtcaaagaaggaaccaggataaatggccgactcaaagacccctcccgatcggattcagaatcgtcagcgatggtcgaagaaacatccgaagatgacacagagataattcctatctccttctcatctcatgttggcactcctaggaaggataacaccatggtctcgtcattcagtgcccaatctccggcagctgcaaacctatcttctcattcgattcaaacccacattaataccctgttgtctcccagaaccaacaccactccctccatccatcaagaccctcaggaccatcagcaccagtttttagtttctcttcaagacctggccgaggcctatacaagcctaaccgcccagtttcgaggtctccctatcactccaccaatagataacattgcatctaaaagcccgcgcaagcggaaaaacttggcaaaaaagagttcaatagatgtgtttcttcgtccgttgattaagaatgcaccggcattgatttcagctttcactagagatctttccagattgttcacacatcattcacccgctcctcaaccggtgcgaattacatcgcttgcgcggggggacgattcctccccaggttcttcttcagctgtgggttcgagcgagagagatgacgaagacgatgatgaggcttttgcatttggaaacagacgaatgagaagaggattctcagaacatgagatcactagaagaagggaggaggtttctgttggacatgctgttctcaaatggctagcgctgctgtttcattccgaggtcgtctggtcttgcttttcaggtgagacatacttctaacattacacctcttctaaatatttttcaagatactggcccctctgaataaattctcgaatcgtttcttctcagatgccgatatcctttccctccttcgactactacttcaaatccctcttcacaaacccatctctacaactgactcgatcagcgctcctcttccccctttgttttcacctacaacggcttctaaacgaacatactctctctccatctatgccttgactcatctacgacttccctctcgaatccttcaatacgttgtcgatgatattcttgaggccgtgaagcgcgcttgttcacccgctccacccaagaagtctgctatggtttctaccaccagcgcatctgttgctggttcctctctcccttccgtcacaccggcaatcgaaggtcaggtaaatcaaaaagcgaagaccgaggctctaggcgcaacgttcaacttgctctcaagaaatccaactcttcttcttccattacatagggaatggattcctctacttcttcgaagcttgcttgattcatcaagctcgatccgagttcgagcaacggcagctctggcagctgttctcgaaggaggtcacacatggctaaaagagctggaaatagccgtcagggaggcaagcgttggatcccaagaccaagagacaagagaggagaaggaggcagagctgaacgcagctagaaaggttgtagaagaggaggttgcattgacggttgtcaaagtactgggaaagaagaatcctgtccaaccgacgacaacagtcggacagttacttcaagcagggaagagtgagggaaaaatgatcacggcgttgatggggttgctgaaatcgactgtagacaaagaacgtaggtccctccgtcatcatcctttcatcgttgttcttgaatcccagatgactcatcctccgttcttgaactcttgcagctcattgggctattaccacgtggtcggttctagtttctctcctgggccgaaatgttcatactaatacacatgaattgctcgactttttaaatgtacgcaatctgtttccttcatccagtgacaccaacttttcaacttgctgacatcgttcctgaatttgtctccccaaaggtcgccaaatcgaaagctattccggcggtttctcttctatgccgactagcttgggatcatgtcattcattccatcatctctcaatcttcacgtcggattacctcatctttcatcacttcttcaacctcggaacattcgtcgtcccctttacctgacagaatctctgcgctcgacgatcttatcatatacgatctttcttggtgcctcgccgataagcgcacagctcttttctccggcttcttagtagctgttttcaaccgccatcagccaccttctatcatagaaagcaaatctgaggatggatccatcaatagaaagaggtggaaagagagagacggagcaaacggacacggaggagtgctagccaaaaacaggttggaagcaacaaagatcatttcacaaggaatcattagcttgatctacggctacaccggcgctatactcttgactgcttctccttggaatggttcaaacccttcgtcgatgaaaaatttcgaggcccctatctctcgctccacaaagaaccttcctatccccaaacctactgctcctaccggtcaaataggtacaatttctgaggaaggcattcttgttccctctactatagattcttctttccgaagctcgttcacttccaggtccgactcttcaatcccagctccctcatgtttggaggtccacgacaatcttactaaattaatgaaagaacttatcgggccgctgctcaccgatcacttcttacctgcaaaagccttggacgagatcaagctccttgggtggtcgatccttcgctctatctgtaactcttctgcccctcctttgaacacatccgtctgggaactcgatcgacttctctgctggtcgttcttgaacggcgatgtatcttcagccgagattccatctctgattccaggtggaatttccaaagctgcggcggaaagagaaaacgcactttggaaggtggcatctagagcagcggagaatgtaatcagggtcgatgagataccggcttggccgcgaagctggattgcaagtcgactctcggattttgtagtgaagctttttgagaaggcacttttagagatgagaggattgatggacgttgaggctgtgagatggatcaagagtgaagaaggagagaaggtcatacctgtatgtcctctatattgtttcgatccatcatccgggtttcatcattttgagtagcgctaatcactcaataagcaacgcgcaccattttacaggagactctcttctttatatggaaagatattctgatcgcactgaagtcgattggtcccgattcaggttcgccgctttcagctgtcctaaattctttcatgagaacataactactaaactgtcattcgattctcaggttcagcaccttcgaatttgtataatgagggtgtgatcgagatcactcgttgtcttacaactgtacttaaaacagatcctcgcacttatgttcctcctagcttggaacatactttgaatcttgctgtattgagactcaatttagtcaatcggctttttactaccgctgccgagactctaggatcatcagcgttcgctgagagcctcccttttgaagatgaaactgtcttgggtgctggaagcggtgggtaccctactacagcgggtgttcttcttacctcccttctaggagggccttctcccttgtttacgtcgacttcaccggctcgagttccgtttatacgattattggagagcttgttgaatgtgggcgtatcaggttctttagcgctcaacctgttaggagatttaaccatgaatctgggagatttagctgtcggagtggatgaagagcctggtcgattcgaattgtggagactctttggttagtatactgcgttgatactcaatatcccacaatctcagagcttcttcttatcctgatttttgaatatgttgggttccaagtgagccgatggaatgcgctctggcccgaagagccgatagatagtacactgacggtcattcaggatcagagcatcaactcggacgaggattgtaacggagcgcaatctatgactgtgagtcaatgtttctcaaatcttttatcgcacatgaatcaaagttttctgatgtgaccttgttctgaaatgatgcttcttttccagctcggccttctgaatgacttactcaccagtcctttccaccgattccctcaagcttggtcaaatgcctcgaaggaggacatagacatctggatttcattattgaacacgtctacgtctcgagcaattgcaaaaggaatgaatcccaacatcgcggtagtcgagcatcaagcggccggtttgaatgatgctgatatggccaaattgtgagtactcagctttcagttttacggaaatatatccaacagtcactaagtattcatgcgccgttgaaaacagaccttgtgttgcgacaatcaagtgcctcagcgccctcatatcgaagattcaataccctctcccctcacctcccacgcatgatactcagcttgccttcaagcgcaggatgaagaacttccctgacagcttcattcaacttttgagggattgtcttgatgttgcctatactcagatctctggcaaagagcacagtttaagccatctgaccacgctactcaaggtgtgtagaaatcccagaatcgagatattgttgcaacgtattgatttgagacttgtctcgtcgtcattcaaatcgttaggacactgcttcgctcttgaaagttctacctctagacttcacgggcaaggcaattgagcttctcatagttgtagtaacgagatgggttcgagatacagatgctgttcttcctcaaaatctctatgatgaatcagtaagccctcttgactcgtgcagtcgtcgagtttctgctcaccaaccttgtgattccttaggctcccgtgttgtacgaagctgttctcgatgtactttctgctacgtcaacaactctggaaggagagcgcttttcagtcattcgactcgacaaccctactcttcaaaagatataccctctactctctgtcgtactcgatgctccttcaagcaaacatcttttggt

SEQ ID NO: 1759 - DNA, 2801 bp, Xanthophyllomyces dendrorhous
tcttttggtacaagccttgagaagcttctggtcaaagacttttgctgaggttgaaggcttggagagtcctgagaatttgaagacagttctaaacgaatcgaatatgtttgagacgcaaccgaacacgcttcagatcctatattccccatctcaagtatgttcttcattatctcatcgcatcatcatcacctgctgattgaaagctccgaacatgacttcttggaccaggccacaaagtccaccgcctcaccaggcttgttatcagaagatacttctctcgagatctctgaagctgccagggatcagagctatgatggggatatctcttccctcggtacacatcaatcaacctaccagcccaattctcctgcatcccaacttccatcagagtcatctatatcctcagcaactcagaattcaagtggaatcacgaagaatgatgaggacttcacctcgcttgaggctcctccttcaaggaagcgccgccggggaagatcaggtcagtcgtatcctcttgattctgttctgatcattcgctgaattaaagacgcttatttttcatcttgtgtgattgtatcatgcagaccgatcctctaagcgaagaaaaatatctccggtacctgaagatgccacaatttctgctacgcctgagatacaaagtgtctcagatcttactgatggcggtgatggagatgtggattgcctgattatggaaccctcgtctgcttcaagacctgtcgtcgattccaatactcaaccctcttcttccgcttctcgatcttcaactggttcacgatcagtccttgcgtctgtatcggcatctatcactcggctcttcagaggcaagactgctgatgatgagccttgtccttcgtctagtccatcccaacccgaagacaaaaacgatactacctactacagtcagccaacaacctcatctgatatagcaaacatcaaaagtcgtcttcgaagcacaaaggaatcaggttcctcatcgacgctttccaccccgttaagaaaagcggcatcgagcgcaacattggtagctagggaggctgaacgtcctcaatccttgtcagcgggtgctggcacgcgagagcagagtccaacgacttatgagaaggaaagtgaggatggacgaatcatgactcaaattggtatgcttctcttgacggttctttcagtcgatgatcaacatctcaaacgttattccgtcgattctttattcatctcttcttctcttaacggcatgcgcggcatagaatcatcgttaacgaccgaacaaccttcgacccccaagtctggccctcgatcgatacaacctccaaaaagtaagtatggataccgtctcgccaagtgtctctctgctatgcgtttgatcaaggacagacacactcaatgtctctactttcatcccaggtacgagtcaacgttaccggacaacaccactctacgagcaaagtatatcattgacacaacctggaaacggcaagagaaaacaatctgaggaagctcatgatagtctgtatgattcatcctctgcatctcctcattctatacaatttggcgcgaaaggtaagggtttagttatatcacatcctcgcttttttaccttacttatcgtctgatgatattgtatcacgttaaatttccgccaaagtgcctttgttggatcggaattcgcctttcgtccaacctctattgggtcattcgggagaacagaattctcccagaaacgacgacctgacgactagatcgccctctatcgctacttctcttccatctcctccaaccagtgttgaccagaaggacgacatcttggcttcgacttcgacccagcttggactcctaaaaacctatcttggccatatgacaacgatggaattactacagtgagtttccctgatcaattctacatgtgaagcagccaaaggcatgttctctgacccatgtgtttcatgaatccctcacgtaactctcagagctcgagatttgttgatgaattctctgggtgcgatagacgatcgcttccgggctcgctttgaaaaagaataggtttgctatcaaagatatatgttttgtacgctttgtgtctttcactctttttgaggatattcacacatacacatatgctaaatgaacgtatacaaggttacggaaggcagaagtatttggtgacaaatgacagcaagagaaagtcttgggactgattgtttatcgaacaccccaagatcatgcaaaagaataaataaaggaccatagagcagaataaggaatgtatatataaatagaaaagaatgcagtggccgagcaagccagatattgtccgttagcaagaatgcctttttagtgggcgtcatagagaagaaagaaagctggccgaagcaaatatcatcagtgataacctcctaaccagcactcatggccaacatgctcttcttgctgattgctttcctccttctcaacctggagagagaagctctgtcctcgggaggaggcaagaagcccagcacagacttcattggctcctctggcatgctaggttgatcatcttccaatacgaccgcagggctcttggaaagagcaacagacggccgacgcttcgggacttgaagagagggtcgacgacccatcgcgttggagacagatgaacgacgcagagaagagccgttgtaaccaggaaccggcgaccgaggggaagaattactgataggagatcgagggtattcttcgcttgatttgatctttcaagaacaaatgacagaaggtcaagaggattagtacagcttaaaaatgtgatg

SEQ ID NO: 1760 - DNA, 1402 bp, Xanthophyllomyces dendrorhous
gcttaaaaatgtgatgttcaagttatagctggagatggacttacaaacgtgattggttgaggactgttggtgcaggtgatgtcatggtgttccatgtagaatttcacagcagcgtggctacagacgccaagagatggtacgttgtgagaatcaagaataatttcaaagtttctatacaaccaaacaaaactaacaatcgagtccttcgagcattcttggctccccaatcttgccaattggccatgtgaggaattccaattgtgagttcaactgaaagcataagtacatcgtaaagattagtatgatactaaattcatcataagatgatgatgaagtttctggaaaaactcactatttctttggaagttgatgctttggtactgttggatatgaaaactagatgaacaaaatgcaggtacgagagaagcagaatcgacatgggtacgtaccatgatagcagtagagggggcaaagtctctcttgtcgtctaaaaccatacatcatcagtttggaattagatcacaccttcataaaatgacagagagcgaacctgtggaaagccagttgcagattgatttttccagtgcatcgatttgttcgttggttgtgttccatcctacctgaacagtcatgttctcgaacatagatctatagtgacgaatcatcagtttacataaatctctgcagctctagtatgatagagaacaatacaaacttacccgcttcggcgcactatgaagatggattgtggcaagaacaaaagtagtgagcaaatcaacatatcttgataacaatgtcaacaacgatcgaacttggaaagcgtaccattaaggatgttcaagccaaacagtaccgaatcttcggtgttatgaatcatcctttggtcagcctctctttcttcatttctcgcgaagagcaaagcacatactgtaataataggcttcggttccatctgaccgcgtgaattgcgtactgaaaatgcctgtagaagcaatgtatggagatgtcttgttagtcgaataccaaataagaaaagaggtttcgaatatttgtgcttacccatcttcttgactatcatattctcggttccaataaacactcgatccccagtatcgaaaggatgagtgacaaacaagaagatctaacgaacaggaagggcctgtatcagtattgaggacaagaaaataaacgcattcagcgttgacataggactaaggttggtactgaccacagcatcaaaggcgttactagctgccgatttgaagataaatgacagaccaatcataattgtgtacagggaagtcaattgagtctacgatcgatatcgagtcaacaaatcagataagttagctgttgttcaacacacatacgacgtcgtacagcatcaaaacccaccccaatg

SEQ ID NO: 1761 - DNA, 51401 bp, Xanthophyllomyces dendrorhous
cttaccctgaatgccttctgtgcctcctgttcagtatcaaatgcgccgaagaaatcctcaggaatcagatatgttctcttcgccgaacctctataagacttaaaaatcgctctggccaagttcttttgtgaaagcgaaggacaaaggtcagtagcgtcattcctaaagagtgacaaaatgacttggggacgatgatgtggagaaggaacggaccttggcggcgtgaggcgtagataccgaaaagctgacttccttgatatccttgttccctagctttcctttaatattcctcgcatcatgcaatacagccttcttgacaccctttttgagtccagtcgcgaagttttgtaacttgatacctgttttgctctcctcttcgcccaggtcctctctaggaggtggcggggatgactgcgcggtaggtgggtacgaatgaatgctcgatgctctgttactttcttcccttatttggtcgatcgactcatcccttcccgaacttttgaaaccgaacaaatttctctgggaatccacagagcgatctcttgctttactttgaccgaagaatgtattaggaccgggagaagatgatcgagatcggctagcccaatcgaccgcgaatagagatgagcgagctgaggtgccggtggtggcatagtccttagattttgaccttgtctttggtcgatatagattgagtcgatcgagcacggcaacagtttccttcatttatttgaatggttgagtattagtgacagttttatatgctcttgtgaagaaaaactgcactcactgtaaggtcatttagtcgatctcggaaagcaaccgtgtggaacttcaaagctatggtaataacaatcagaaagtcagtttgtacctgataaacattctgattatatcactggatagaagcctaaccaatcaactgcagcaggatcttgcagatacagaaaattaagatcaggaagaataagaactctacaacatcgaacatctatgatgatcacacagatgcaaagcgcaagaacgacgtcctcaaatcagttgacttcgtcttgataacgcgtagacaaggtagaagatcatatgggccgattttaccgtatcagtataaggggctcgagattgtgtatcaccagcagtgttgagtttgtaaatccccatgaagatcacagcccagcttccccagatacaagctgcgtagaagactgatcggtagcattgaaatgagtcaagattctgataattcacggtatataccaacgtctgtgaaagactcactaggtttgatccagccttttatgaccgcgtaactgagattatactcgaaacagatcagacataatgcgaacaccagtagaatagaaaacactaacgtttctacatgagatttcatgttctccgtcatctctccccaaaaaaggatgatcaacccggtcgctgctaccggaattagatccacctgtggcggatttaatcaagagaagagatgacggaggttatgggcaagcttcagagttcaatttccgaattctcgacaaaagaagaaaacaagaagaaaaaaaaaacaagactaacgatcacagcgagataccaagacaccaagacgttgaaagcagtgaaattcaaccaagcgctgatgtttgcctatgcagctcaagacgcaacatatacattagcaccagatttagatatcggagagaagaaataagaagagcggcacacacagtaacgtatctcctctcattagttgggttcttgttgagccaagtatatctaacgatcaacggaatagcgaccaataccgctgccattatagtcgatccgatcagcgttgagaacaagaaggtgacgacccttataagatatgagttaagtcagtgataactattctttctatagcagaacgctatgagcaactcacctcgcgggcccccaggtcttctttttcttctttccgttcagcccaaatctttcctcgtgtttagcttcgattctagttggaaacaggcaaagaacggattctcgtattaaatcaacctcccgctcatgcctaggttgtataaaaccacggcaaaatgtatggaaaactcactcgtcaagatcctcctcagccgaccagtcatacaatacgtcatcgtcgaagttctcatcttcactcagcacacttgcgctggaggacatggatctatcataatccggtctagttggagcaccgtatgtgctgaacctgcctttagtcgaagcatcctcatcccagactgcttcttctcgtcggtgatcatcggccatgtctaaagaatcctggatgatagccgtgttggcgaacctagcctctttgggtagttttcgaggcggagagcgctccctctctcttcccctgttttcttcatcttcttccaagagttttggaagataagtctctgtttcggcagtgattttgttgctaggaaccgaaattgaatcgaacttgtgtacagattcaggaggttggataggctggacggccatatgatggtcgtccgaacgggagagttcgatagcagtcaaggtctcggactgagcttcgtcatattcatcggagtttgatcgttgcatatgaatggcatccggagcgagaacagcaggtgatggagctctgatagaaggctgaatggagtatgagctaaaatcgggtagagaggagggtgaaagaggaggaggattaatgacggcttgagattgagtcgaaccgtgatcggtcttgccagacgggactggtagaccgttagacatgttcttcggaaatctgtctgcttgttgaggatccaaccgaatgtgtttgtagatgtatgcactttgttgtgtttataacaaggatcgatgatggtgatggtcaggagaaggagaggtgaaaaaagaatgctggctagctgtgtcgctccctccggccaagtcgacacggacagagccgaaaggccgctggcttaggccttacacagctctgttagaaaacagcgtagactcttgtattctgtactcatttgtctcgattcatatttatcaaaggtatatgcggaacagatgatgtatgaacgtgtatggtggaaaggatggggtctaatgtgtataaggatgtagaatccagataaactacactaagaaggatgattcgtctccagaagaacgaaccgtatttcttccttcatctcgatttctcagacaaccacccgaccgacaacagtcgtgtgacataatgctgaaagacaaacacagagcgtcaatttcaactcgacacaaaagacacacaagagaaaaggcatacgttcgatgactcccttcttttcgtcgaacatgtagttccatactttctccagacgagcggctccaggaatatcagatcctcgactcggcgcagtcctacggatacgcgaaaagagagaaatgacgatggagtgagcttcaaatatgtttataagagacgcagtatacgagacttcactcacgcggggtgcattccgttttcgacaattcccacataatcaatttctgtgtatagatagtattcaaattggtatcgtcagccgccttctccagcctgggaccggatgccttaagaaagaagaagagaaatataaaacctcaccaatcggctcgtttccaaacaccttgaattctatactataactttcataagacttttcactcgcgctcttcagatgatgcctaatatattcttgaggaggaggcgtgttgaaaggccaggacttgattttcgcggagaacgcgatgactgaagaaaagaagattgagcaatcatcatcagttttgtgttttaatatgcaaagagggaaagacttatcgttcgtcttacctggccagatcaatcctggctacaagatagaagagaaacaatagtcagaaccaggtatacttatgaacgctggattgaataagattatcccacatgatccattttcaacttgatcgatctgatatccgtcgatttctcgtacgtgtcctccacgaccgtaatctcgagcgtagggagtctgccagtctcttcgggaggactgatcttgtagtaaaacggagcaaaaaactgcaggggacgagcggccaaccaatggtacgtcaacacccgatcgacggtatcaattcgaaaggaggctacatacgtgttgaacagggtagagagcgtcccaggtagggttcaaatctcgctcctcaaaagacacagactgaagtttagattcagcagggagatcaaggatggaatgaacctcatcgaagatctctgtgtaacctggagcagaatccatcatggctatgtggaacctgaaatctcccgaggtggcctgtgttgttgttttgaattcgttcgcatcttatcaatcgacagcatggagagacgagatggctgaattgaacatcacatacattgaattcgtgctggaagaaaactcttcgaggagccgtatcgctgaacggacgcttgaaagagaagaatccgactgacacagccgaagcaatcaccgcaaataatacaacccttttctggaaggccggtccaaatctgtggtagagaggaatgatcgaagatgcaaacaggaaacaaaacactccagtgatctaaatattcagtcatgaatttgaaatcaagtgagtatatggttcgagttcatgattaaaaatgactaaaacaaagctctagttacgttggcgatgatcagctcgacaggagggatgacgcccatcctacccgtcaggggtacaaagatgcccaacacggttctcgtgcagtctgtaccggaaactatcggacctagctgagcaactacatatactgcctgtatgtagatgaacagatgaaagaatctaaaaggtgagcatcgtaccctccagaaaatctgaaaaggaggaaaccacgtgagaacgtactaaatggatggatccctttgtcttcctgcgcacctgggtgagaatttcagaagtcgagagcgtgatgacaccagccgctgtcaagagcgcaaacaggcaagcggacctgatacggaagtaggtaagcgctgccatgatcgaagcgttgaggacgacgactcctgtctgggacgcgtgttcgagaaggggcgcatcgaccaacggaacgaatctactcgtcaaagattgggaaatctatcgatacaaatagatatacaagctcagggtgtaagtcttggcagatgtctcgatgttcttccctctaaaatgaaacgtacccagattccagcaaaggcagggggagcgtataaagctgagaacgggaaaataaagcaaaagatgtcaacgttgatccgcaaaggacatcaagaaaagacctggatgacatacctagaggcaacagctcatgagagtaccaagacatactccgatccaatacctaagacatacatgcgtcagcaacgcgtaattgatacttcaatcatctctgcgtaaccctcactctgaacacgaaagaagtctcaccttggacatcaatagtgccactatgttgacgcccaaaagcgctcctatgaaagagctcacacaacccgctattccagccgcatacgccttgtatgacctccactctgatctgttgaggaccagcagtgctaccaacgagatcaacacggctgagatctgtaatggttacaaccaaactcccttgttcagtttctcgatgtcaaggacaatcacaatgattcagaaaggcaaagtttaccttggaggaggtctcgagcgagtacatcaagaagtatgaatcgaagaaggacagatagactgtagtggagttcatgactcgtccgttagattttgtcacaagttcaatcgaaataaaagcgaacaacatacccagatcttgttctttgacacccttctcaatctcggcaagagaagactccggagcggttaactcatcgactacagctaacacattctctccaaaatgctattgaaggacacgtgcaaaatgtagacttgattcgtcagcactagaagatcagagttagggttttaggggattattggttttttacctgagtagttcccttctctaaattcgcaatggtatctttgcttgtatgataatacctaccagaaccgaaacccaagttcaacccgtcaacttcaaactgaagctttagcctatggagacgcgaagaacagaggtacataccatgagttgtctaccactgccatatcgagccctccaatattcagatactcctcaaattgtccgaaatctgtatcggagccgatgatacctgacgagaatatatcagctgcaagtacgcttccgtgcggatgtgggaccttcgaatatgctttgaccatggcgttgttcgttgcttggaagagcatctcctggccagtcgtaccagcagcttcaaggttgaccaccgctttgatggttttggccataggatgttgtgtcgaaaacagatgggatgcctgcgaagggtaagaagcgtcaacgttgatacttttgctgtccaaagatatatcatcattttcctcacgtctttgttgtgaaataaatgaatggatgattagaaagaacgtgacataacttcagagatctgccaaatgatacacaccttgcaaactttcctctgcgttattgaacactgaggcgtcaagcaaggagaactaaagacatcagacatcagaaacaacaagcaagcctgaactaagacacttacagaaaaccaccgagttcgtgaacgatcgttctctctcaatcagaattcgcgcaatttccaacatgatgcccactccgatagcttgaaatgacggatttcgatggaaagtttaacgtgcgcgctggaacaggtgggtaagttactttgaaaatgctcaccatcatctgctgctccaggaccaggctgtattccagacagaaaaaaaaggtaattaagagccacttatcagcccaaagttgacggcctgacatgcgaaagataaaaaaaccagactgaccaactgagaatcaatatgtgaattcagtaagagcgcagactctttggactccgatgagccgttggatatccgaaggatgacatttgtcaggccagtataagtcttcaggacatcgtggtctagaatgttgaacctgaaggagatggttgtgagagggagaaagagaggagagggggatgaatcgatgagtgaaagactgatgaaagcttgtgacgaatcgtttaccgatgattgccgtttcctctttgaagatcaacttcgcagtccaacccttggacttgatcacatttttctttcaataccttcacttggttccatacgtaatctcttcccttaacgtgttcgtccgtgcctgtggtgaatatcaaaaagagccaggagtatttagccacaattgggagacaaatcaaacctgatggacacttacctactatcctccacccggaatcttccaatgcttgaatatgagagatagctaacgattccgaaaactggggttcattcgttatagaatttgttctgtaggattattttagcatgtgaaattgtaaaacggctcgtcaattgagtagatcagctccaattgagcccatgtagctctaacgaaagaaacgattcacccttcggccaatggggcaggtaatcgggacagccgatttgctgtaaggtatgtgaggactgaaacaacaggtatcaacacgaccagggaggggagtggtccccatgtgtttgttcttctggatcgcattgttgagacaaagatggagaagagatgagagaacgactgagttttcttgcatcaaatgagatcaaagcttcttcgtcattctcttacgagtgccgcgccggtccggcaggaaactcatatggggccggtatggggattatttggggccgtccggggccgtttggcccatgtctgggttccgtctggggtctatgttgagccgttcgccggaagagatctcatctgatatacggacgtacatcggggagtaagacaaaatatggagagaaaggtcatggatgtcatattgcccatagcgttaggaacacaagcaagaagcagataccaaatgacatttgacaaaatacaaagtacgatatcttggtagaactcaggtcagaacaatatattggctcgctggtttcgctggtctggactacttgcttgaccaattcaatatgcgttcgctcgtgcagcaaggcttcaaccgtggtgactagcgccttctgatgtttaatacgatggatataatgtggatgcataagaagtcgatctctcaatatcatgatctgttggcacacaagaatgctgatgaatcaatgttttcgtacgctgctgttgagtgctaataatgctgcctatagactgttagggttactctctctggtgatatgacgtcgatttcattggtcacgatctcaatcgagcggatgaagtcgtgtatctggccatacgataccttctctctcgttgcctgtttgttcttccatgtacaaacatggatgatgatgatgattggggacgggtaagaacgatcggatgagatgatcggaccacgttggttcctatatataacgttggctttctgttcttctttttcttctcttcctctttctccctcccccatcattcatgaccatccttagaggactcttgccaaccttatataaaagaactcgcgcatatcctcttcaacccttccttactctacaaagaagaaccatggcgagcgtgactaatccagataaagaggccgtgacgaaagaagtcgactgcacgttcgatgacctccttgagggaaagatgtttgttccctctttctgcgcgcaatctgctctatcggtacttgtttcttctagacactcaccatgctccttatcaaccatctcacggccggtctactcgtcatcttctcaggaaacaagtcggtttcggagaaggaaagatcctcttgagcaaaatcgatggcaaaatcgcaagttccttctgattatcgatcgattgaggttgccgatctcaagcctatcgtcgtctcctgtttcctacgccacgatagtatgcaaccagtgcaatctgcacccattatggagctcctctagccagtcagttcttctttccgattgaccagaaagggcctatctcatgctcacaaccgtattgtgtatgatggtagagggtgtgttgactagcactggcagagttgtttggtaagttcatcatttagcaaactcgcaaactccatatcatcagctaaaagaccttttcatcctcttcgattaaatgttgttcggtagtccttggtgagttcgatgattctgactctcgatactaattattcaatctactgatgcatctcttgaatatctaggcacggagcctgcttctctgtcgtgagtatatccatctgttcatcttatctcgtttctggaaactgatgtctcgtgtgtcatgttccttttggtccctttgattagaaaactggagatatcgaagacgccccaggccttgacgccctccatgcttacacggttatcccatcttccaacacatcggaaaagatcaagatccaagccgacctgaagatcgtggagagcaagaagggaaagaatccttgcgatgagcggaaaggagtagccagaaagacaaagaagaacgaaagagtggtgattgtcggcggaggaagcggaggagcaggcgcgatcgaaggtcttcgagaggttggttgaatcatcttcccgttcctcccttccttcacttgggatgaacgtcgtaggtctgacggatttgatccatgcatttgttcaacgttaatagctcgggttcagaggtaaaatcacggtgatctccaaagaacctcatggcccgattgatcgaaccaagctcgttcgtcttcttcatcacttgttttctcgttctctcctaccttgcgcatttctgagggtctatctttctttgggaaaaaaatatctagtccaaagcgttaacgacagatgcatccaagattgctctccggcctgcttcagaatacgagtccccaccctactctatcgagcttatcacctctactgaagtgactgctctggatctcaaaggcgataagattatttatggagatgggaaagagatggtatatgatcacctagtgatggcaacaggggcagatccaaataggcttcctttggacggaattgatctcaaaaacgttttccagttgagaggaatcgaagattccaagaagattgatgctggtttggtccattattgtcttcttcttgcatttctctcgaacgtatctgacgtgaaccttccatcaccttgtctgaattatgcagctctcaaagaaggatctaaacttgttcttgtcggatcctcgttcatctcgatggaacttgctgtagttgcttctaaacgaaagttggcctcattggacgtggtcggaatggaaagcgttccgttcgagaacgtacttggaaaagaggtcgggaaaggtttcaagacttatcacgagtatgtcaatctactttttttttcttcatttatctgccttcgcgctcttttcgatggtttacgtatgtgtaatacagccaatagatctgatcggtgttgctcgtcctttgaattctccagaaaacaaggtgttacatttcacatggaggcagagatcgattcctttgtgtctaaaggtaaatatgggatatacgttcagagtcctaccatctgctaacatgctataattttctcgagatcaatctaaagatggcacagacaaggtcggcggcgtcaagctcaagaacggaaaaacctttgaagcggatctagtcgtactcggggtgggagcaaagccgaatacttccctgctcaaagacgcaggtatcgagattgagaaggacaacagtgtgaaagtcgatggattcctgagggtacaaggcttgaaaaacgtttatgctgtcggtcagtccctagtttttcgagttaactgttcccgctcttgtctcttataacgaacggttagttggctttcaattttgtcatcttaggagatatcgctacctatccgtacagaggtggaatgactcgaatcgaacactggaatgttgctgccaatcgtacgtctactctgcgttttctgactgcatcgtgcacagaaactaatcttggaccgaacgacctatgaacgtctcgcttagacggtcgagctgctgctgaatctatcgctggagatccggcaaacaagaaaccattcagcaagattccgatcttctggtccgctcagggtgctcaattgagatactgtggtaactcaaaaggattcgatgatgtatacgtcaatggggatgcggcggagttgaattttgcagcgtactatgcgaaaggcgaagatatcatcgctgttgcctcgttcgttcaccttcatagttctgtttcgcgcctaaacattgactgatatctttttcttggacttttaacgacaaaattgtatcacagaatggctcaggatccactcaactcgcactgctctgagctcctcagactcgagaagatgccttcaatgtcagaggtcaagggtggtaagaaccctttggatatcgccctgaccgcttgatctttctctccgttatctctgatcttttcgcctactcttatgattccgcgctgtatgatcaaactcgtgatttttcatctatgtttccttaccgttgtacttgataaatatgcaatcttactttctgcttacctactccaaggtggtcataattcacacagaggagcgaagagtctgtttctggagcagaaaggttgatagtcgcccgttgatcttgagtgctgatagtaatggtgctggaatgctagggttgactccatttcaagtaaatctgtatcaatctaatcttatcgtataaagaagcttattttgcgatgaatttgctgcacgcaacacactcagacaaacaattcctatcatgaggatcacaaatttgtttctctatttctttgtctcttcttctaataattcctctgtctgttcatgtctctgtctgttagctgtatagccttcacttatgactttcaagaggggtttcatatgatcaacagtcaggcaaacccatcaaactggctatctgcaaaggaggaatcaatatcaaaagctgatggaagtctagaagtcggatatggagaacaatcctccgtatcatcaagtgtactggtgtttgatacagctgccgccgtggctctggtcgccgccaccaaggccgataccaacgctcaagctgcctcagactacctattctgcctgcgcttcctgatttcgctttttcttcccctctgcatccttattctgttatacattcgtcaacgcttcaatttctttcctgtttctacgtcctgggatcattcataactatatatgtatcctctcgtttcatatcttttgcgcgaggagttccgatatgtgaaagaggactatctcactcctctttgaatgagagtttccctggctataattcttctaggaacgcgctatccatgttccttgtcagattgcgaccagaatccagtattgcatatccttatagagaagcttcttcagccagtgaactgcaagtcgagcaaccatctgatagaggaaccctaagtcccttctccgacacacccaatcaagtagaattacgacagttgtaagctttcacgtaaccacgttgtaaacccatgtagccggcctgggttcatctctgtaaccagtgccgctttcaccacagagatcgcaacgccttcttcttcctcttctctttctcaccatcgtcgttttcttttttttacgaaaaagacaatggcagacttcaaacccatctgtacgttttcgtcaaaatatgacttgactgatcttatacgtatctctatctgatcactccttatcattttcttgttcgggatccttgatcggatggaatggcggggtgttctatcccttctgtttacatcttaccaaacaaaacagcctttgccgagcatctacaactaacagcgctcgggattcaacctgcttcaatctcttttcaaacactcactcttgaatcggatcatttcatctgcgtaagagatcagaacaatgtggtcatcgttgatctgaatgatgccaatcaggtcatcagaagaccgatcactgctgattcggcggtgatgcatccgaaagagaagatcctcgcgttaaaaggttcgtgttcttccacttcttcttcatatagcatcctcccaggctgtcctcttctaggagctggtaatgtcatgtaaagaaacccagcagacgagagacgaatgtcgaacccaatgaggttttgccaatagagatgtattcggtcatcgtgtgagatgaggaaagatatttgagatggggttctccgaagagattgaacggtacctttccaaaacaacgcccaacatgatccctctagtctgtgttctcttcttgaggccctcaaacctgaaactgatatggattgtctaccttcaactatctagctggccgacagcttcaagtgttcaacttagctactaagcaaaagctgaaggctcatctcatggacgaagagatcgtgttctggaagtggatttctgccgaaacgttgggaatagtcaccgagacggcggtccttcattgggatctccaaggagaaagtgcccctgtaaaggcaagttcttcctgacttcttcgcgacttttttatatcacaataatgtacggcggaagatctatcattggatacggagtctaactcgcctcctttatacacacctttctgtcaaatagattttcgatcgattaccaggacttgctggttgccaaattatcaactatcgatcgacagcagatggcaaatggcttgtgcttgttggaatcggcgcgaacaaggacccctctggattcaaggttaaaggaaacatgcaactttactcacgagatcgtacgtatcatctctttttttctcactcgccatatgcttcttttcttccctcattttaccaaggaagaaactaaacaaatatcttcccgaatcatcaggtaaggtatctcagcctattgaaggtcacgccgccgccttttctcagctcaagttggacggagctcctgccccatcaaagctcttctcttttgccgtgcgaactgctactggagccaaggttcgtgcttccttatgattccctgttttcagattcttccgccgtgcaacgttcgctcacctttctgatgttcttgtttcttctagcttcatatcgtcgagattgatcacgctgcctcgaatccgccattcccgaaaaaggctgttgacgtgtttttccctcctgaagctgcgaatgatttccctgtggccatgcagatctctgcaaagcacggcatcatataccttgttaccaagtacggtttcatccatctgtacgacctcgagagcggagcttgcatctacatgaacaggatcagtggcgagaccatctttgctactgctgagcacgaggcaaccggaggaattcttggagtcaacagacaaggtcaagtgttgagtgtaggtttagacgagactactgtcattccgtatatccttcgtaagtggcaatgtctaccatgtatctcaaagtttctccgacaggaaaggacgctaatctgtttttttttgctttggtgtcattcaggaacccttaacaacacggaactcgccatcaagctggcttcccgagccaatctgcccggtgctgatgatctttatgttcagcaatatcactctctcttccaaagcggcaactacggagaagccgcaaagattgctgccaactctcctcgaggaatcttaagaacacctcaaacgatcgaacagttcaaggcagtccctgtccagcctggaactttgtcacctatcttgcaatactttggaattctgcttgagaagggtgagctgaacaagattgagacgctggaactcgctcgaccggttctagctcagggcaggaaacagttgctggagaagtggcttaaggagaacaaggtatgcactgggtttgctcacacgcggatagttggggacgcgtataggtcacgctactgacaatgtttgacaaattacttcgtgttaattattaactcgctcaatagcttgagtgcagtgaggagttgggggacatcgtcaggacggctgacttgacgttggcgctgtcggtataccttcgagctaacgtgcctaacaaggtcgttgcttgctttgctgagaccgggcagtttgctaagatcgtcagtctattttctttcatatgttaccttgatgctgatctaaggtcttgttctgatctatcctttatatgctgtcgttcaccatcgaacaggtcttgtattccaagaaagttggataccagcctgactacgccgcgctcctgcagcacatcacccgagttaatcctgatcagggagctgaatttgcctcctctctcgtaaatgatgaggccgggcccttggtggacgtcgagagagtgcgtttatgatcatacaaatctgatcagtgattataacctattctgacatatcttctgttttccaggtggtcgatattttcatggcctcgaacatgatccagcaagctacctctttccttctcgacgcgcttaaggagaacaagcccgaacaaggccctctccagactagattattggagatgaacttgatcaatgcccctcaggtggctgaagccatcttgggtaatgagatgttctctcactatgatagacctcgaatcgccaacttgtgtgagaaggccggtctcttgcagaaggtgcgactgtttttacatatgttaaattgatcgcctcaaccgcgcgtgtcaattcaatactaactccctgaattatcatcggctgcctgagaatttctaggctttggagcactatgaagatctctcggatatcaagcgtgttgtcgttcataccgatctacttaacaccgagtggcttgttggatactttggacgactcaccgttgagcagtccttggcgtgtctcgaagagatgcttactgtcaacattcgacagactcttcaggttgttattcagattgctacaaagtattctgatcttctcggaccactcaaattggtcgaacttttccaaaagcaccgaacattcgaaggattgtactactatctcggttctgttgtcaatttgagtcaggaccccgaaattcactaccagtacattgttgctgctgcccggaccggacaaattcgagaggtcgagaggatctgtagggaaagcaacgtctacaacccggagaaggtcaagaacttcttgaaggaggcccgacttcctgatcagcttcctttgatcatcgtctgcgatcgattcgactttattcacgatctcatccttttcctctaccaaaacaacctcacttctgccatcgagacatatgtccagcgagtcaactccgctcgaactcctcaggtcattggaggtttgctcgatgtcgattgtgacgaagccacgatcaagaacctcttgtcttcagtcaccggcgctttccctatcgaggatttggttcgagaggttgaggagcgaaacagactcaagttgattcttccttgggtagaggctcgagttgcggctggtcaacaggatccggctctttacaacactttggccaagatctttgttgattccaaccaaaaccctgaggctttcttgaaggagaacaacctttacgagcctttggtcattggaaaatactgcgagaagagagatccttaccttgccttcatcgccttcgctaagggcttctgtgacgatgagctgatcgccgtcaccaacgccaacaccatgttcaagcaccaagctcgataccttgtaaagaggcgtcttcctgatctttgggcccaggttctcgttccggacaacatccatcgacggcagctcattgaccagatcatcgctaccgccgttcccgagagcaccgaccccgatgatgtctctgtcactgtcaaggcgtttatcgagaacgatcttccgactgagcttgtagagctcttggagaagataattcttgagccctctcccttctcggataaccgagctctccaaaacttgttgctccttactgccattagagccgataagggcaaggttgtaggctacatcaacaagctccagaactacgattcggaggagatcgccaggatcgcggtcgaacaaggattgtacgaggaggccttcactgtgtacaacaagcatgaccagcacggactcgctatgagtgttttggttgagcacgtcgctagcttggaaagaggttctcagtatgctactaagatcgacaagcctgaggtttggagccgtctcggaaaggcccagctcgatggactgaggatcaaggatgccatcgattcttacatcaaggctaacgatccctcgaacttcgccgaggttattgagctcgctaatgctgctggaaagaacgatgatctcgttcgattcttacagatggctcgaaagcaggcccgagagcctaagatcgacaccgagcttgcctactcgtatgctaagaccgaccgcctgcacgacatggaagaattcttggctaccaccaacgttgctgacgttttggttgttggagagaagtgtttcgatgatggtctctaccaggcctccaaactgctcttccagtcgatttccaactgggctcgacttgccacaacgcttatctacctcggagaaaaccagcctgctgtagatgctgctcgaaaagctggaaacactcaggtttggaagcaggtcaacgccgcctgtatcgacaagaaggagttccgactagctcagatctgtggtctcaacttgatcgttcacgctgaggaacttcccaaccttcttcggttgtacgagagaaacggttactttgaggagatcatctccctcatggaagccggtctcggtctggagcgggctcacatgggcatgttcaccgaactttcaattttgtactccaaatatcgacctgagaagctcatggagcacctcaagcttttctggagcaggtgcaacttgcccaaggtgatccgagctgctgagcaggctcacctctggtccgagcttgtgttcttgtatatcaagtacgatgagttcgacaacgctgctcttgctatgatggagcgatctgccgacgcctacgagcaaaaccagttcaaggatgtcgttgtacgagttgccaacgtcgagatctattataaagctctctcgttctacttggccgagcagcctcttttgttgactgatcttcttgtatcattgactcctcgaatcgatcacacccgagtagtcaggatgttccgacgaaaggacaacgacaacttgccattgatcaagaactacttggtttctatccaacatctcgatatcgccgacgtgaacgacgctcacaacgagttgttgattgaggaggagcaagtccccaccttgcgagacagcatcctcaacttctctaactttgactcgatggcacttgctcgccgcttagaagagcacgagcttctcgagttccgacgattggccgtcttgctctacaacaagaacaagaaatgggaagagtccatctcgctcagcaagcgagacaagctcttcaaggatgctatcctgactgctgccgagtctggcgagggggaggttgccgaagaagtcttgacgtactttgtcgacatcggaaacaaggaatgcttcgctgcaactctttacctttgctacaacctgcttcgaccggatgttgttcaggagctttcatgggtcaatggtttgaacgacttctacttcccataccagcttcaggccgctagggatcaggcgacgagtatcagcaagctcaaggcagagattgaggcgctcaagttggctcgaccgaaagctgccgaggaggacaatggaccgatattagctcctggtttcaacaagacattgatgatcaccgggggaggagggatgcctccgatgaacggtgatggagtttaccctcaggctactggttggggagcaggattctagatcttttttcattgttaaaaacaagtctaacttgtcctttccctttcctttacgatcacggtttctccattttcaaacttttcgtttccttggtttctacatttatataagcgttcttctcgcttctcgttatcttgtgaattttcttatgttataaccactttctctttctctctttctcgagatgaagtcttggcgcgagccgatgagaagcacaatgaagcaggacaggacacatgaacgatcacattaattcaatctcggcgctatgaatcagccttcttctttttcttacgaacttggagaacagtcaccggttgaagtgtacccttcgatacgtctcggccaacaagcgcgctatcaccatcagcgtctgatctctttctcttcgagtttgtttcgtcgtcggtagtcagacttgagcttgactcgattgaacgttcgacgtactccaaagcaccccactctccggtcaatcctctgattgagtcccagattatcttggaactactgatgacgagtggattggacgaaaacgactggttgagaagcatcgaaagaagtctgataaatagattcttgggaagttcgcctggccgtcgctttggttgggtatgactttccatagtagtcgggacagatatgggagtaaagacaagagtagctgaagcagaggtggatggtagaggggaagaggaaagagtggagaggataaagaatccgacctgggagccaagtgaacattcttgtcggaaggccaatcgttcgtagaattcgtcctgagggattgtagatagtctagcagaagcaatggttcgagcagccagtgctttattcgacacttcttcgtcgtcgttatcttctccttcgtctttgtccatagcattcttaggctgacctgatgcgtttggagttgttgaagaagaggtaatggaactagcagacgcagaagggagagaaggaagagctgaattcgaagagaggaggcttgaggatcctgtgcctgctccgggtgtagacagttcgagtagaaacctggtcctaggatcatcatcgaacgtaggaatcgttgaggcaagcgtcgggatcactgaagatggattcggggcttggttgtgcagaggatggggtacgttcttgaggtcggtcgaccatgtaaactctgtgcgtctgccaagggtgttcagagtctctccttttgacagaccaggtaggaaacattctaggtcgacttccgaaggtcccaatccggcaagtttgatcgagcgttctaaaacgtctgaccaccatctacaaagtgcccctcctgataggatctttttgatcttgccttctgtttcctccggatcaagtccagaatccgggaaaaggtattgccgttgacttcttgcaaacagatgaacttgaacggtcggtgtcggccgtgattgagggcacaggtaataagacaggaaagatgagatgatcgtccgggcgtacggtcgagaaggtagggatgaaggcagagtgtaccctgtagaatctgctttggagatgtacaccattgtatgagcttctcgaggaaggataaagatctgtgcttggatagatatcaaggcgatagggttggtgctcgatgtcgtggtgtgttcaacaccggacttggtcgcgcaagattgtgaagcggcatcatcatcagcagcagtaataggggaaggagaacttgatagatcggccggttcgagatgaatatagagaacgaggaggacgtcttgaatagtggtccctttcggatgagctgccagatgtgtgtagagagtatttgtccgacggggttctgattgaagcaaatggactgtcagtggtcgaggagggcaaagcgtgttcagcgccttaacgacagtgtctagtgcggacatttgtctcttcacgagggtgagtagaaacgaaggagagtgagcgagtgaaagaacaaaaggccggtagatatttgattatgaagcaacatgtagccgtcagccaaaagatcagccattgcacacgacgatcgatcatgagaactgacaaagcgaaccaaacttgaacggatccggacaaacagaagaacaggtgagaaggagaattaagaagaagcagcctcggacacgcagagatcaagcagtaaaggtgtttcatttgttggatgaacgatctaatgatctgacgcgcgggaatattaaatgacgcccaagacgatatgatgacgcgtcagtcagattccccgcgcgcgtgttcaatgtgacgtgtgtgtatgtccccaaaggagtcaatcgagatcggtgtttccttctgaggctcggatggtcaagctgaagatactgagagtcttggaggcttccaaagagctggttgaccgagaacggattgatgacgtcgtagggttcactctagattgaagctgttgacgcgcccgaacgcgctctgctgacgcgtctgattcgcgtcgcgtcgcgtcgtacgcacgtccctctcgtcccccttaaattagatcgatcaacttttccgctcgtctctctttttctctcttcttctctcccacaacaacatctctctttcccttctttcttcgttcattcctcgttcttcatccctcacacacatccatatccaaatacaccaccatgtggggtaagcttgctgttccctatctgtcttgcatttgtttctcttcgtttttctgttttccccgtccttttttctttttgctcttgttcattaccttcttttttccgtctcttacaaatccttaaacgacttgttgtcgtctacctttatccttctttccttcactaacaaactcgctttgctgaactcttcacatagtctacaagcgagacggacggaaggagcgtgtggcgtaagtgtttttctctttttaagcatcttttcactcccatgttggcccagctttctctgggatacatccttcgcgcgacgcgctcttcatcacctttccgcgtcattcctccctccttctgttttattggctcttcgagccaagtcctcattcgttcaacatcaacaccctcttccgtcttgttcatctctctcctttgaccactatttttcctgactgtcgtcaatcgctccctcatgcccttcctcaatcatcatttattgttgcactcaccttgaacagcgctgaccaagcatggctactcttctttccttccactctagtttcgacaagatcaccgctcgtatatccaaattatgttacggtttggatcccaactttgtggagccaattgagtaaggattttacctctcttctcgatcaatgcttcccatgctgagtgatacttcttccgcttcacatagaattaccaaaaaggtttgcatgggtgttcaccagggtgtcaccaccgttgagctcgatgtgagttctcataatctagttgtctcatcgttgacctgtttgtccctacctcaactgaccaccatttcctattaaaaagaacttggccgccgagactgcagcttacttgacgaccaagcaccccgactatgccattctcgctgcacgaatcgccatctcgaatctgcacaaggagacaaaaaagatcttctcccaggtgattgatgatctctacacttatgtcaacccaaaaaacaacaagccttctccaatgatctccaagcagacctacgaagacgtcatggccaacaaggaggcccttgattctgccatcatctacgaccgagatttccattacaacttgtgcgtccttactatgttgtttctcactatctgaacatatttgtactgaccctcgactttctatgaacagcttcggattcaaaacgctagaacgatcatatctcttgaggatcgacggaaacgttgccgagcgacctcaacacatgctcatgcgagtgtcggttggtattcatggagccaacgtcgagaaagtgattgagacatacaacctcatgtccgagaggtacttcacccatgcttcccctactgtacgttcgtttggtctttctttttgctattgctatgtatctgctgacatctctgtccttgttttggactctctcttcagctattcaacgccggtactcctcacccccagctttcgtcttgcttcttggtggccatgcaggatgattcgatcgagggtatttacgatactctcaaacagtgcgccatgatctccaaaactggtcagttctctttgctccatcatcttatgttaccagaaacttcgaaggctgaccgagatttgtgtcttaacagccggaggaattggactcaacattcacaacatccgagccaagggatcgtacattgctggaacgaatggatactccaatggaatcgtgcccatgctcagagcttacgacgccactgcgcgatatgtcgaccaaggtggaaacaagcgacccggagctttcgcgtgagctgatatctttcgtgtgatcttccttcaaaaaaaaaggttctcgcaactgacggcttctcctaataatttttgggcgattagaatctaccttgagccttggcacgctgatatttttgatttcttggatctccgaaagaaccatggaaaggaagagcagagagctcgagacttgttctatgctctctggattcctgatcttttgttcgtatccgccattttatcttgtgtaatgcatgattatcgtgactaaccctgttttcgtcaatttcattcccttatagcatgaagcgagttgaagccaacggtgactggccgcttatgtgccctaacgagtgccccggcttgtccgaggtttacggagacgagttcgaagccttgttcgagaagtacgagcgagaaggcaaattccgaaaggttgtttctgctcaaaaggtctggtacgccatcctggagtctcagactgagaccggtggaccgtttatgtgctacaaggttggttctctgttccgttctttcgaatttacttgggtccgctttttggtgttaacatcggtatctttgcactcgcaggaccacgccaatcgaaagagcaatcagaagaacctgggtgtcatcaagtcgtccaacttgtgcactgagatcatggagtactctgcccctgacgaggtagcggtctgcaacttggcttcaatcgcgctcccgacgtacatccagcacggagtgtataactttcaaaagcttcatgaagtcgtcaaagttgttaccaagaacttgaacaaaatcatcgatgtcaactactgtatgcttcctcctctcttgtgcctatctttgagggtcataggtatcacgctaatattcacatcctatcttcaaatgcttttagaccccgtgaaggaagctcgaaactcaaacatgcgacaccgacctgtaggtctcggtgttcaaggtctcgctgatgcgttcatgatccttcgaatgcctttcgagtctccagaggccaagcttctcaacatccagatctttgagaccatttatcacgccgctcttgaatcttcttgcgagatggctgccatcgatggtgcctacacctcttacgagggttctcctgtctctaagggagaacttcaatttgatatgtggggtgtcgagccgacgggtctttgggattgggccgagctcaaggagaagatcaaggtacatggagtcaggaactcattgttggtcgcgcccatgccgacagcttcaacctcccaaatccttggtttcaacgaatgctttgagccttacacctcgttcgtcccctttttggatccaatcgttttcttgaatctttgttgactgacccttcgaatgtatataggaacatctacactcgacgagtcctcgccggagagttccaggtcgtctgcccgtggttgctccgagatcttgtcgagcttgggctctgggacgatgatatgaaggatcgaatcatcgctcacaacggatccgttcaaaacattgcccagattccggatgagttcaagtccgtcttcctttaacaatctagagtttcaagactcaaagtacaaggtactgacatcaactaatcaacttggttactcagggcaatctacaaaaccgtttgggagatttcgcagaagaaggttattgagatggctgctgaccgaggagctttcgttgatcaggttagtccttctgttcattttctttctctttctattccgtttgatgctttatactgactagtcctttacctactcctttgttgatgatagtctcaatcgctcaacattcatctgactaaccctacattcggccagcttacatccatgcacttttacggatggaagaagggactcaagactggaatgtactacctccgaactcgtcctgccgctcaggcaattcaattcactctctctgccgacgccatcaaggaagccaaggaggccgcctcaagaccggcttccaagcccactcctacgtctactcccgtcaaatctagcccggcttctgtcaagggactcaccaacggggtgtccaagttggctttcgttccaccttcgatcagcaagcctactcctgctcctgcttctgctcccgccccggctttagttgacgctgttttgaagccggtgcaggtcgttcctgtgcctgcgcctgtgaccaacggtaatgggaacgggaatgctgtgaatggaaacgggaatgtgtcggatgagtcgggggatgaagagaaggaggtgacgtttgaagaggcgaagagactggctgccgagcgtgcagaggctgctcttctttgctcgatcgagaacaaggaggcttgcatgatgtgcagtggttaagcctctctgcttgagccaggagcctcacttcgttgttctgattactttattatatcatatatttacccgttcattcataagcatttctttgacattttttcgtgctagatgtttgttcaccctttctgcatttttctcttgttgatattcgtcttctttttcgtctagctcttttcgtctttttctccctttgattgatacacccctcctctctattaccctcatctatcgctttcttcttacaatacgtagtgtcctttgtacttgtgttttattcatatccaatgcacagtgactcgttttgatctgggaaaataaacagaacaagattcttcaagccacaggaagagacaggctcgaacggccacaatcccttccttccttcgctagatctaagatccggaaaaacgagcatccaccttcattttttgtgatcgactgaccgctgttgctcgtggtgacgacgacacttgggccttttccttcgggtttttcgtcaacaccacccgaacctgattttttgttgcacatccagaaaaagacgtacggcgctggtgtcggcggcgatgagtgagttgggttcacatttgttggaggggtcgggtgagaactcggattgaacgacgtagtcatcgacgacgacgacgacgagggtacgatccgccggttcgtgctcactcttcctcgttgatctgctttcagaacgcaaggtgatttacagtaacatagtggggttccttgatggttgatgcctggaggtccatcgagcgatgatgacacagacgacgaggatgggtgaggagcaaagtctgctctgtagaatctgtttataaacggtcggagacacccgtcgttaccaaacggaagacacgcaagagggaagaaaccttgcgaaaaggagcgaaaggagaaggagaagaagacgagggacgaaccgaaaagtcacagcaatcctcgctttatatgctttcctttcctcgggtgggatccactgccggtggacatcataagatggcttatagatatctaccgtccgttgcctcgggatcgaatgtttgtatccctcttgaacagggggatgcatgattaagaactggtcatgtagatgagaagaaaattggatggtcagtgaggaagcgcgcgatacgcactctggtcgcaaacaggcgaagacaaacggtattgtgtccgaggggaatatcatatgttcttggatctgcttgttggtcagctatagccggatcctttgagctcacagctctcaagcgaaactttcgtggtgttccaagggaaagcgaggcaatcgttggataaggtccgaggtcttttcgaagcgaatggttagaacagaaaaacgaaaagaaacaccgcaggaggagattgaatcgaaggcgtacatgtaagttggtctgcatgcggacccacactattgaaacccaaatcccatgaaaagcgcacgacagtcaagtatctttcagggttcagctttgagaagaaaaagaagggaagttctgagaacattgcgaaagaccgtacccttcctcaccgccttcatacctgttgcatgcggcgacacctgctttccaagttcccatccattcaccttcgtaacgagctctactctgaattgacgcattcacaattggctctagtaaatcggctgcctcctgaagcaaagctgggaattgtggaggtggtggcgtatcggaagacatattgtgccctgttgatattgaacgaggagagagcaagcagtcagagagacgttgatgtatcgggtagatatcacacgagcaagaggagtgatatctacagttcttggctgtttctgttaaggctgatggtgtgtatggtggtggattttttgaagacacatagaagctcgtctacattaccgaaagaaaagacgtatagacacattttaattgatggaaatatatcgcaccagacgtcgattcagaagactgactgtgtgtggactttggacctctctactcccaatccagtatgcgagttgcttccatgttttactgtcctcgatcagttgcaagaagagcgcgctcgccaagttcgatgaaagtggtgagggaggaactactattgctgggagatgttttctacgaagatggtctgttgctagagtcaatagaggaagagacgagttggagttagaggaaggagcggttggatttatgttggagtttggtgaaaagcgaatggacagatcaggatgtataacagatgatagctgaggtggcaaagcagctctcttgctaggtaccggaggagaatctgcccgagatcgcttcgactcagacactgcagaagctgaggaagaagatgactgttgaggagccaaccattgagctaccgaagtgggctggcttttcgatttctgctcgtgtttaccaattgaacggtcgtctgcgaggttggataagtgacgagctgctagctggggatcaccttcgtgatctaccaaagctctgagaagatcttccggtgaaaactcttgactcggtgggagcagtgagcaaaggatcatcagcaaaagctcagtatccatcgtgtatggtcgtgatggtcagttctaaatctctctctatccagaatcggtcagtttgctgatgatggttagtggtcggatggaggagaagactacgaaaattctgtagtcgtctattagagaaaattcagaaaatctctagtcgaattcctcctgccgaccgtcacccgaatcagccagcccagcgtcatcctctgtatcaatcaaccatcatcgacgagaatgagccatcggtcattcctttcttttcttttctgtctttccatcgccttcgtccttctggccagacaggcatcggcagcagcgctcacgacagaactcaatgcagatgagcgagcctgcttctttgcagatgtagatcaagtcggggaaaaaatcggttcgtccctcttgttaatgtgatgtcgtgcgatgggatggtctgctagttacgaccagaatatggttctacgtatatcagatgctttgatcagatcgaaacgacagtgtcgctcaccggttctttcgacacaggcttttactttgccgtacagagcggaggctcgttcgagattgactttgtggtccagtatgtataccaaccctttcattcttcagtcaactatggtcgaacatctctgatcaacgactcatccttcatccttggtggctgacgcgaacagtgatccggatgacaagatattactcgagggactggcagagacccaaggagattatattctcacagcaaacactgttggagagtactcgttctgctttgagaacgaggccagtctcactcacaaggtcatcgactttgagtacgtgtctatggccctgcttgttgcctgctttgaactagacttcagccactgacatcttttcgttgttcttatttctgggacaattcaacaaacaatttgaacagtatcatggtagagtcagaacctcggttggctcttcctgggaagcagacggctatctcggaccatacatcctcgttggaagaatcaatttacaaactcaacggacttctttcttcggtggtcagaacccagaaatagtatgtcctccctcgccatttgtcttgttcttgtttttctacgcgcatcaagctatttatgctagagatcaattctgtagagctgacctatctcttcatcgagaaaatagtttccacacgcgtaacaaccgaaacgaaagtactgttcgatccactcagtcgaggatcttctggtactcggtgatagaagctgtggctatgtgtctgatgtcgttgtaagtcttgcttctgtctctctgtggtggtgatgatgatggagggtgatgatggtgatgaagacaggtctacgtcagacgcgtttgctcacctttgtcgactgttttgtgcatcatatgcgatcttttccttacagtatgcaggtttacatccttaaaacgttcttctctcggacagccagtcggtatcgcgtttagacattgtggacattgtggacagaggggatgggacgagcgccggtcgtatttttttctttctttctttctttctttcccttcttcttcttatgttacctgccttgactgctgctactgatgctgatgatgatgatgacgacgatgacgagctaatgagcaggtcggctgccagattatccgatgaatggccacatgaagaagatgtacaaagagatgaaaggaaagaacgaaagaaaagcaagaaacaaagaaagacaaaatcaaacacgacaacttctcctttgaaggaaaccatcatggtcaactcgataagaaggccgacaccatacagacctgttagaccccatgtacttccttcgtcctccgcttccacctcggctcagtctcctgctccaaatgctccgtccggtccgggttccactcgggcccacaagccagttccaatcagagttcccagacccccaagacctcaagtctccttgcacaacaacttgggtcagagacctcaagccaatggtccgtcaggaatggctgctggagtcccgaaaggcccttctcgagctgaggaagccaatcctcgggcttttgtcaagattgagcctcggctgaatcaaagttttcctcccgctttgccatccaagatggaatggtatccacctcgctcgttggcttcgtctggatctgaaacgtttcgacctccaccagtgcgaccactaccaccggccgctcgatatgcaccgtctatgactcctcgtccatcctttggaacagatgtgagagcaactcctacaggtcctcggtcgaccatgccagctacagttcctccaccgccatcacaaccgcgtccggccttcaaaggagacgcaagaacaacgcccaccggtcctcggtcggggtcgacagcaacaattccagctccgccaagtggaccaagcatctcaaagtacaagcaggaggtcaaggttgaatggaagatccccaagttggaacctgggctagtgtctcctcccattccatccttctcggctcagcatggtccaaccttatcatctcgacccactgaagatcggcaagtcagatcgccagaatctgggcccaccatcccgtctcattcgcaattgcaacgacgagaatcaccatcgtcttcaaacccagggccagtatcgtctgtaccaaccgttacccatcatcagacgcccccagatgataacatccctcatcgacctcggtcatctatcggtcgggttccgcgcgagcctgtccaatcttcgcttcaacccgagctcaacctttccgtttcatcaacatcaggacaagcgtcggacatgaatcggcccactgaacccggcattttacagcaaaacccctcatcaatgggccgtgttccctcagttcatacgcctccaatctcgcaccatgtgtccccctcacccacacctcctccaatcccttccactttagcaccctctgtggccgtcaaagctgtttctggtttggcttctgaactctctactcctctgtctgtgcctactgtagaaattgtggacgaagacgctttagacagacttcgcttggcccgactggaagcagaagccaaggcacttcaagaaaggatccgactacggcaagagagagaagcaaatgaagcacgaattcgggccagctcaaacatcccgggagatggctcaaaggggacagaatcgaaagtaaggataggacatgtgccagtggatgcaagagagtttgagatcagacggttcctcgcctcaatgggatcacccatgtacgttgcctcgctctcttgtttcttacttgttttccttgtacttgttcaattgtcttgttactttgacaaaattctgcgcgcacggaaacacgacttacattcgacttctcttttcatttttctttcacaaaagtcttcacctcgctcatcacgcattatccaattcgtacaccgcaactttccggacattctatgaggcagcgaacatcatacgcgtcctctccctcgaggattttagacctggctatcgactttccctaactcctctcgatgaatcaacccaccgctccccatctctaccattgccgccgccaccacaaccaccgtccttacctctatcctctacgacgaatgctcagaattctcctcaatcgcctaccggacaaccaccgacacccgtgtccctcaatccaactctgtctcattcagaaacgcgagtggatcggtcatcgagttccagatcttcgtctctgaatccactgaatttctcaatcctgcctttgagtccttcagttgagccttcggtgccattggtgagcgatatcgagagaaggactccgacaaaaaggagggaacctatgagtgatgaggtgattgatttgacgaggttctcttcgtcgtcgccgtccgcggcgtcgtcttcagacagaatatactgggaagaagatacgaagagagatgtgagtagggaaaagagtgatgataaaggaattcagaagaggagaagaacgataggggaagacgaatcggtcgacgatgaggaacttcccccttctgaagatgataggcagaagagactgaaggcgcctcaaaaagaaccgatcaaacgaacaaaagagaatgttcaacagcaggagaaggataaaggaaaaggcaaagggaagagcagagaagtacccgcttcttcaactattcggaacccatacgaaggcccttcgacaggttcggcagctggttctcggcgaccgtcgacagatggtgtctccaaaaagctcgagctacatgtgcaaaccaagacaaatctagaattaagacggccaagctctcagaggacgaggtggattgcctctggcgaaggaatgtggatacatggatttacgaaaggtgcgtttctgttctgatctctatgttttcagttaacacgatgatgctgttgactctaatgggtttggaatgtgtgcacaggtgtgttcaatatatttgaccgggagacaagactgtgagtctctttctctcggttctctttctcctttccatcttctcttgtactcattcagttttggattctctcttcagctctgtcggaaaccctgttcagctatcctttccagaaggccatatcgtagaaaattacatagttgccggccaacgggtcattgtcggacatcgacatccaaagatcgaggagttcgcacctccaagcataagaccggtccagatctcgtttatcgagcttccaaaagatcgtatcaattttagaggacagcactcgacaggacatatctctctgagtccccatcatgcattgggattgtccgctttagaagcgttaccgtcgaatgccttgaaagcaggtgatgggcctcgaacatctgcttttataactggagggttcgatcattatggtgcgcacatacagttttgacagcagacggcttcagatgatcgatgtgtactgtcgaagcttacgctctttgtgactttttttttttggttggtcggcccttaaaacgatagttcgaatttggaaactagatgaagaccgaaaatcgtcatcgtgggcaatccatcaaggtcattcggctggagtgaacgcgttggcatataatcattataaggtaccatttgaccttccttgaatttgtctacaacctgtctataatctccgtcttggttatatcagagagatctaactttcattgaatttcataccggatagaaacaaattctaagtggaggagcggatggtcgaggtaattctatctttcaatttcatgatcgatgactccatgcgcattatctgatgatatgtcttgttttatatcagtcctggtttgggatgcaaactctacaaagctcggctcttgggagcttcccaaaggaggtgacccagttacacaactacacctcagtacagatccaaatttactcactgtggaggttcgttttttcttctttgccatgttcttccttaggccgtttctaacctgttcattaattattcactgcgccatcgattgatagttccgaagggcaaaacctttgtatagagtgttcgaccttcgaacggacaagactcctgtgctctccatcgaggaggctgaggagacaaacgcgaaaggaacgaccaagttttcgagagggttctacaatgcaaaccaaaagttcttcgccaaaggaactaaccaggggacggtcaaggtatgacatcattctcaaatgctcatcaagataaactgaactctgtaacatgttcttatttattatcatcgtcagctttgggatcttcgaaagctcgaccgtcaaacatcaccgagtaacatcgtaagtccatcggccttcactgacactgtggacaagtggcgatcaagcttccatccacttacgacttctcctcacaagaagagtgttagagaacttgagtggctaacacagtgctcgataaaacaggttcaactacaaccgaaaggaaccgagatccgacaaattgtttttgaggatgaaggaagtgtgctgttggatctgaccaaggaaacgctctgcgtcaggcgatacagtttttgatcttcttagtcacacagtctaatgattgcagcatgttatcggatacaggttggcaggttgacatgcacatgtcatggacacaagagaaatgaaacttgattcgtcatgaaagacaaaatgcttagagagaaaagaagacgatgctagtggtgattatgatattgttacaattgttctggtgaaaagagctccagcaagttaacccaagtttgaggttttgtatttgctgacgatggactaccagacgaagatacaacacacgtcagagatattcaggtactagactcctacagagcgaacgaggagggcactgaccttttgctgagcattcctagacactcgcctgtaagtcaaaatcaatcaaattaaaagcaaatatgagtcatagtcgagattgaaccagtctattagattgtcagaaactaattcaacacatacatataataatcgataccgctttatgaaggaaggaagggcgattgaatcgttggatcaggaacaagcttctatataaaggggcaaaaggtgccaatggtgcttactccgcctaaaacgatatgcagattagcaggtatttctctttagcgttatcaatgatgtgaaatgttacctacaaatgcaatttcccgaaggaactcctcatcgtgactagaaacgaacattgaagtggaagagaatacatgagcttcaaagcgcttgataaaggaagaagtgatcatcaaaagctcctacgtgatgacaattagttggaagtttccactcgatcgtctctcctcaataattcttgagaaaacaggcagtattggattagacaagatgactgattcaagaagccaaacagagcagaagcttactgagctaatgattcagctagcgatcggatgttttcctgagtggagaatgaaaagttagttgatttgtcgtatggacgaggtgagttccctttacttactttgtccaaattggttgtgggcctaaagatatcaacatacgaatcagccaacttctcaacatgtgacgaagacataattgaagggatttactcgtctaaggcaatgattccgcaattgtggccaaatgaatctgagagtgctagtcggatgatgatcgaagctagaactttctgaccagcactacaacgaccgcgcatatccatctcgacctgatccttgaccatgacgacctaaatgcaatgcaagtccttttgaatacatggtctgatacgccggagactgaaaataatgacatactcgatagttataacttttcctggtcgtagccgtcttaggttcttcagagtcacttctgatgagaatttgatcgatatctgaaggatgtaccaaacacgaagccttcagctgatatatccggatgattttttcaacatgacgggtgatcgttacctgttccttgataagtcctgttccataaatatcggatgttgtcattgatctccgccatcttgacactatggtatctcatgatagcactgtacaatcgatagaagtcagcagattgcccaatgacgattagacatagcaaaattgaatacctatccagcgctttgccgtatttttctagatcgatgttggcaagatcggaagtctaaacgaaaaggtacagtaaattaggaaagatcggtctacgataagatgttttatttgaggacatgtacactagaacgtactttgacttcgataagtttgctcataaattctggattgatgttcttgtactctgtgttcagagtgtccttcatctccaaggcctgcgctcgaagagaagagatttctcctaatagagtcgcgtgctgacagaaagaaaatccaaaaaaattagatttgattgtatgctacctaaaaaactcaagacttacttgagaggtcaactgctgctcttgctcctttgccttcttgtacttcctagcatactgatctctagctcttgaggcttcctccaaaccgagtccttgtatctctatcttggcgttcctaactcgatccttgaattgacgatgacgaatgttatcttcgatgttctttcgggagcggtcggactgatagatttcagactcgaactgcttgatgacctcatcatggtgagtgattaaagttcgagaccgcttcagatccccctcctttctcgagatctgatcattcagatctgacaaacgacgaggaccttcgcttgctgtccacctaaaagacagacagagtggataaatgatatgaccagataactatcactgaagcatgtgtgatgaggacgtactcttcaaccgcctctgatgattgatcaagattcgcgatggcttggacaagtgatgctaaacgctcctccatcgtggacagctcattcgtgaagctacttcggaactttgtaaattcttcctgaagtcgctgaatgggtacatctgcagcagcgaccttgtggtcgacatcctatggtaaagattacatgaaattattaagttatataagacttgtcaatatagaatgtactaggttgacttactgcaagttgttgcctgagatcgtctatcttctcacgagatgtgacaagtcgtttttcaactgtctgaacttgtcgaagatctgcttcaagagtaaccaaacggaggttaagattgttgagctgattacggtatccctgaccttgtttcgataagtggtcctcgtccacgctgatctgctggagttcttgacggagtctctttcttttgaaaacgggaaagggaaatgaattcaattcagcttggtatgcgactggaaagatgattaagttaatgagaaaaatacaaacaggtcgatatttgccttctgcaggtcatcctcaacatcgacgacaggtctcgttgatccactggctgtcaaacttcgatccaattcttctacgccctgctttaagctagaaatttcttctagaagtctggcgagttggttggaaacttcccggagctcttggagttgagtctctttctctctgagtgattcaagagacgcaagggcctgagaatcggaagggcgaaggacatcagtatcatttgttgtggaaataaataaaagttgcgaataacaaaggaatgagtagaactcaggggtactttttctagatctgacttggtttgttcccttcgcttctcagattctctgatctgctctgtcagcctctccaactcttcatcctctagagcatgtatccgtctttctggctccttcaactcgttgagcttccctaattgatcggtccatccatctaggtcctcttggtacttttctgtggagtcttcgaccgatctcctagtcttctgtttgtggacctaagaagttttgaattcaaacaaacccaagatatgaaaagtggcattgagccgcaagcgcaacaaaagcaaagcagaatgttaaaacgtttcttccatgaaatgggacttacgtaggccagtatggtcttcatgtctcgatcgtccacagatcgattacaacctaagcatacgtgtttgctgttgatagatttttcaaccatctcgaagagtgcaggaagttgtccagcatatgcgatatccctatgacaacatttgaacagttattaaaaaaccgaggtcgatccatctgtgatctgttcaagatgtgattatggtggtatagatagtaatatcacataccctcgtgcaagctcaatctgttccaagcagatcttgattccagaagttagatcctcagctccatcaacctcctgtatagccgcatcaattttgtcttttagatctgtttgttcagacccaaaaagacaactcgaagtcaagtctctgataggaagttcgatttatagtgatgacccaccagacagttcatgctttgcgtctaatagcttgtccttgtcccgctgaacggctgcttcagcttgagcgaacactctgtcagctttcgatctgtctcgttcggcgtctgccacttcaccgtctttatccctgttgcacaaccaaagagtatgaaacaatttagatctgctcgcaaaaagaggtgcaaaacagtgaagagaccaacgatagagctttaacaacatctcgaatcatcgttcgctgaacgatacttttccctaccaatctttgaaacttttcagtattttccgttgtgctgtataccaccagtattgaataaaatcagtggctgaaccgtatctagcagaatttccttgataagcagaggatagctttgccagaagatctactcacattgatgctgcttccgcctccttttgcatcagcccttccttcttgatcgccaactttgtctgagtggccgaatgatgctgaagttcactcagctcatccgtcattaaattccggcgattatcaagagcattgatttctcctctgatccttcgcttggtttcttcatagtttgcagtcttcaacccaagctcaacttcatccaagcttgtttgctgagtggctatgtccgcttggagagctgagagttcagcttcgacagaggagctagtttgagtgacccctctggcatcttttcgaacctgattctcaagctcatcctaatggtgagaggcaaagcagatcgatacgatcagtgtcatgatgggtgcgcaaagagacgggaccacctcagaaactgaagacatgaactgactatttgactcttaaagctatttctactgcctgattcggcagctttcacattattcaagtttatcaactcggtctgcatccgagcttcttccgcctgggtttcctcctgtcaacgttacaagtcacgttgagaagccaacctacgatgagtaaacttggcactaaggctcggacatgaggatgactagaaagaagatctctctcatagacgtggaagcgtaccctcttgttcttgagtattcgttcctgttctctttttaggttctgtaaagtattcttcagctcgtccagttttgcttggtcctgataagggagacataagaaaaccggagttagcaaagtgatatatatctgttgtcaagttaaggatggtaccattagtaggacttaccaagggagtgtcgtctgaatacccgatatcgaatttggtgcagatttttgccgccaaattttcttgggttgagagtgccgtttggtgagcctatctctcaaaagagaagaactcatcagtaccaatttccacgtacccatatagggatattggaccaaagaaagactgaacaaacagtaaattctgcatcaagccttcccctcttttgagcaagattcgcgaaatctctttcaagtgctcgcagtacatcctcttcgtctcctctccgattcaatcgtgctgttcggagctgtttcttatcagcaagcgtttgatcaaatccatgaagctgccctctaagctcttcttcgctttctgtgaattgatatgccatgttcgatgtaacacactcgtcagctttaagagtctctcaatagctgtgtgaaagacatttgggtagaagagaagaataccggagctaaccttgcaataaactcattgtctcctcataattcatgatctgttcctcccagaccgagatctgatgcttcaggttctcctgtttgttgaacgtctctgcaaactgttcggcctggtctctgaagctgatattgataaccgccatttcctgggctttttggcctagatcctcagcttgttggtctttgtctttgatatattgagtgacctttgctaattttgttcgaagctagaggagatgaaagacaactcggtgttcatgtgttgatagaagagggattagaggaccagagaatcggatgacgaacaatttcggatcgatctttctccatttttaaatggttgagcttttctttctctaccttgagatcagctgccctatcctttctgatctttttgatcgaatcaagcgcatccgtaaacctggaggtccatcaccaaaatcagccaacatgtatgccgatcagtcaatcaccctgatcaatgcgcaatgagctttaagaggattaggggaataaatacatccactcacttcgtcgcttcgaaaatctcatcgaacttcttcttcagtgtcgcgggctcactcaacggccagtttgactcctcttggtgacagaagatgacgttatccagtatcgctctggaaacacctagcaaaagtggtacttcgtcatcgatctcgctacacttcgtagatatcgtgtttctctgtacttgaaccgagtcacaccccaacattcagcgcaactcttcttccaggaggtaaagagtgaaaataatatactttttgattcgattcgcctgcctcatctttggataaaatcccttctagtgtcttcatgctcaacccggtcttcttgacggagaccgataggttacgagtgacaaccatccgctcgctgtttgagttttgaaatctcagtttcaccgacgccttgacttctttctctcctgccatcttttatttgtccaaataagagagcatgaatgagattttttccgatctctgaatgttgttcttccttttggaagtcaaaaacttacctttgggtcatgaacaaatgcgcctccttttgtgttcggaggaagttcacccgttgttgcatacttcaagcactcgataatggtctattcgaatcaacccccagaacccgcaggatatcaataactgatatgaagacaattcgaagtgtttgactcccaagactcaagctcctaagttgggctggtgtaatggcttatgtgaaaatactgacggtcttgcccgttccattagcgcccacaatgacggtgacaggagtttgaaactctaccatggcggacgagttgttactacgaacgagaaagaaaggtgagtctttatgaattttcagccttatagatacagtcccaatcttgattttcggacatactcaaaactcctgattcctctgatgacaagacgatccagggacgacctagcagagttaatgaagatgtgattgatgaaatgcgtgtgtgtgcgagccagaaagagtccaagatgagcagcgcgttctttcatctgcctatccatctgtctctgaatacagtaaaacttggctaaacacgaacatgatgtgtaccagcaactctggatggagaggacggtatcgacgatgaggggtgtatgcgcttcctgggttccctcttcaaagggagaacgagagatggaagtggggacacgctctgtaaagatatttgattaatttatcttattacaactttcgacgcgttcgatgcgtctgacgcgtctaagataacatctatgttatgttaattttcatatattaaatcagttatctcggctttcggaggcttttcttactgctgcaaactaagggggaggccacagctcccatcgccttttgcacgaaccgacactctctatccttttcctccctcgtcttcccttcgtacaacacctcttcctatatacatctctaagcaccatgtcttcctggcgatctgtcatgacgtaagtaccttctcgtgtgtctaggcctaagattgttttgaggtgggagaaagaagaccgaacgagggtatctggtcaagaatccaatcagaacgatcaaacgaaagatcttgaaagaaaaaagaagactaacgatgggatttcccattcattctgtttatctattcctccctttattaattgacttgcgtatgaacgaaacagctacaacaggtacacttccgttgctgcccgagctatccgatctggtttgaaggaggctgagcgagtcaaggctgacaagcgagccaacgttaccctcaagaagcagatctggaccaagggagagccctctgagagcgtgcgttcttggttgatttatatctgttccttttccatcatatcgtatcagaagatgtctctcgagaatggaccggatgggaacgggaatggatcttcgttgaacaaagatggatgggaagggctagtctggggaagagttgttactttgagcctctcttttaggcccgatactctgcgaggttccaaattcatagagcagcgagaagaagagcaaggaacggagaggattgtcgtgtttgggagtaaaaccatacctgttgaatgccgaagggaatataccttttgagtattcaagatgagatcaagacagacgcggtcaccctcttcgagacttcctggtcgccctccttccgaaagcatatgtctttcttcttcctaaacacgaggatatcaggtcgaactaactcagcatccactactttccaaattgacaggttgtcgtcgacgtctccgctcccctcaagtctgcttccaagtctgcttaagatgaagagagaaaattctggaacaggctttccaaagaagggttccatgtgttagataggtcgttggagacaaaagaagagacggctgttggtgtttgggaggagaaagcttgtgtgcaagataggaaatgtttctttttgtgaacattgaacgaaggcgaaacgagagtttccttagtgagtgaaaaaagggttggacggataaagagtagacatcggcaagaaaacaagaagagaggtgaatgaatatcggaagcgcagatttcgctgggaagaggggatacttcaccgaccagtctaacaggttggactctccaagagaatcgtccattacggaaagaacgagaagactaagagaatcagggtgctcattgaccagaaaaatctcagtaacggtcgtcgtcaatcttatcgactgactctgactaatacaccaagacaagtgattggttttatgcaggctggaatgaagagaagaggacacgactgtaaaatagagattagaggttacgatggaagtcgatacagagtagacgatagacaatggggaatagagaaaagagagtggggaataaggaaatagacactaccgactacagactacagactacagactacagactacagactttctaatagggaatagacaccggatcaggtccggctatggggagatcagctgctgcgcgtaaagtgatcgtccgttcttgtgaaccattcgttcccgcttctgttcctgaattgagatttcgatttctgttcctgttcctgttccaccttgccccttttccatcccgtccgtccatctatcgctccctccttcctatctatcctcgcctatccatcctcttctcgactctggatgcaacccattccgaaagtgccaacctcccagacggagatctcggtcctccgggatctcggtatcgagaaagaactcgccagactctcgctcaaggtgggtcttttttatccgttcttcgctctttggtcgtcaaactcatcgtgcgctgattttctatccatccgtctcttttcgctcttctttgctgtggtcaattatcaccggtccactccgaaaatcatggctaccgtcgttgtgttaactcttgggaaacatagcaagcgaacgggaatgtggacagggcagctgatatcggtatgtggacgacacccatcgtgtatcttcctactctctatctctccacccggttgtcgcgtgtctgtattctccctatctgtctgccaagactttcctggccttatgagggacaacggacctcgaagtctggatcgagggttatgtgtgtgaccgagtcaatgttatttgggaggctgtgggatctgcttggctatcatacataaagtgttcgtcgactaacactcctgattgtactcttcctccactttgtcatccatgtttgtccatccagctttcacgatcatgaacagacctagcgaagaggtgagaaaacctctccccctttccacttccacagtcacttctgtcccatccaatcgacacattatcattcctaaatcaagtggagtttctgaagatgaggatgagaatagtgagggcgacgataacggtgaacatggtggcggaagcggtggtggtgatgagaatcaggaagaaggaacttggtcggatgtccgttcgtcgacggatcgtcgacctccctttagaacatttaacaatggtagcagtgaggattcctctcaacagacctcttcccgcccttgtgctccaccttctttatcatctgcatcgacgatcacgcgcaatccttctggcagcacgacgctcgcccggccagccggcagcggtgtcagagcaaattcttcctttaacagctctatcgcttcatcctctcgctcgtcgtcgcgctcgaaaccttggtctcatcggctgacctcgaccgcttcatcatcctctgcttcatcttataaatccacttcgcctcataagcgatctcccgctgtcagtctctcatcctctcctccaggtggttcttcaggatcatcctctaggccgttgagtcatcaggtcatcaggtctcttcctcttggttcattggtcgctctaggcgatcaaaagcctgacaaggtttacaagcctcctaagcttaacaacgaggccatcagtcagttgtcttgcgttcttcctttgctctttttgacttgttttttcctgtttttgacttttctgtgacttggacgcccttgcttatgatctttgttccgtactttcacatttcacgaccaaacttagaatacgatgcagctgccaatcagttggtagccgacctgtttgccagaagcgacggctcaaacgtatcgctcgcctcaataaactcgaacaaagactcttcgtccgacaccaaaagctctcgtcggagtttctttggtcggtccagatctgaaaaaaccgccaatcaacgaacaagctcaccctatcgatccaccccggctattcaacttccgacagcgatggccagcccagacattgtcaccatcccacctactccaatcaataacaccccatctgtcacgtttgaggaagaagacagtcgaggtcgatcgaccagacgactttccactcgttccatgtctcctttcttctctcgaactggacgaagtcgatctagagccaacagtccgtcctccgaagttggacaactgcgcgccagacagggaacatccgaattggcggattcagattcggaagacgaaggagacgactcagagtcaaatgcggactttgcttcaggtgaccttgatcaagctgccgtcggagtcgacactggggacatagacaattgggaggacgatggtttcgacgaagagaccgagctaaacaccgaccacaatgctgagacagagatgatcgcttcgccttcgagtgagggttatatggtcccctggtcggatctctatcaagaaattgagccagagtgggttcctgtgctcttctcatatttgatttttgtttactgattatgcttcatttggattatcttccactcttctcacaggctgggtgaaggacccaacgttgtcatccctgccgcagactcttacacaatccttcggaatcaaaccgctccgtccacaggactcaaattgaacatccaacgaccagatttcggtagggatcgatgtacaatccggatagaacagggtgatccggagactgtgttggagcaaaaagcaaagaggcaaagaagatacgttgttgcttcggatctctcagaagagagtggttacgcagttgaatgggccatcggtacagttgctagggatggagatgaggtaagacctctttttccgtatatcctcggatttagttttacttgactcaccggaagaaaccctgaacatttttcatcttttatttgatagctctggatcgttagtgttcaggagaacgaaagtaaaggtaggaaaggttccttcgttcgactgagattggctcgtttccaaatgttgacttggatccttctttactggcctcttgtttctcaaactattcaagtggatcccaaggatctgtcttcgcaagaccgttccgagaagctcaaagtccagagagaggtatatctattgtgctcaaatgtctcttttcccttaatcttctttccaaactaacgacatacatccttgctcaatttcttgtcgagaatttagcgtcaaactcttgcctcgttactcatcaaacaagtcacccccattcttcaacgaacaaacttgaacctgacagttatatgtcaggcggttcacacaaaaaacgcgaggcacatgttgttggatctgattgatttcttggagccaacgatcgtaatcgttggtagcagagggttgggaaaactcaaagggtcagtacaaattacccttatatttctttgtccttcttttgtgataccaatgctgaacttttgagatggttataactaccacaaatgccccgtgagcgtagaacaattttggggtccatgtcgcattaccttgtgcaaaaatcatcggttccggtgatggtagcccgtcgtcgacttcgaaggttcgtcctcgtcatttttcaatcaacacttttctttgcggatgaacgcattgtactcacctcattttggtacacttggattcgacagaaacttgaaacgaaccgacccgtcgctccttcggaacggagcgcacgtcccgctatcccgggcgaatgtcgagaagctagcaacgggaaaagaaccgaacatgcaggacgcagcagacatcgagagagaggaagatctcaaatcatccgaggcggacgaccggacaaaggcattggaagcggctctttaatcttctatctctttcgaacctttctctcacaaccattttgcttttcaatctgtcattttcactttttctttcttctctactacgttcttttttctcctattttctcatcatctcggcaatgtagttccttgttgccccctattctatctttccttatacagtcatatcatcatgtcctgttttgcagccagtctctctgcctccttctcttgacttgtcgacagagttgcccttcggaacaaggcagagaaagcatgcttacgtaaccctgcgatcctctcgtcgttctcacccttttcctctcaccttctccgcttcttccgaagtagtccaaagcgctttggtctcgaatgaagacatacaacatgttggcatcgtctaggaccatctttagaagctcgacttcggttcttcatgtgaggtgttacagttccgcctctccacttttcggttagctccctatccttcttctgtttctctaccatcttgagcccttcgttccgacggagggccgggaggatcttttggttatccggctgatattcgcctcctattccttcggttgatcgttcgttgccaacaggaaccgaacgatcttcaattcagatcgagggtgtcacctatccgtcagatgattacaccaacgcctctcctaccattttgtctaaactcccatacggactacataaacaaccggatcacccactgggaatcattcgaaacttgattgaatcccatttcgataaattcacaccggtcatccctccgtccgctattgtctccgtcagacaaaactttgacgagctgggatttgctgatgaccatcctggtcgagcgaagagtgattcctactacctcaacaaggacaccgtgttgagaactcatacctccgcacatgaaatcgaaacatttaaacgaggattggaaaaatggttgttgagtgcagatgtctataggagagatgagattgatagctctcactatccggtcttccatcagatggagggtgcttccgtttggggaccaaaagctctcaaagaccttccgaaagagaaccaagcactcagagatctgattgcttcgaacccatctccattgctgctcgacgatcctactcaaccgttggatgcggtcatcaacccttcccaacctgagcacgacgaggagattcttcaactcttggtcgacaatttgaaactctctttgaactcgatgatcctcgcactgttcagatctcataccgatcaggcgggtgaacccttacagatcagatggatcaacgcgaccttcccatggacggcacccagctatgaggtcgaggtgatgtttgaagggaaatggttggagatcctaggatgtggtgtcgtcaagcaagacgcattggtccgatctggttcgtatccttactctatatcttctctcctttgtctttccatttccaatctgtgacaatgctaaattcttctgctgcctgaaaatcttatcatccactcctataaaacagacgttcctgaaaaggtcggatgggcgttcggtctaggtctcgaaagactagcgatgattctgttcaacatcccggacatccgtctgttctggactcaggatcctcgatttgcggctcagttcgcctcctctcgaggaatcactcagttctcgccttggtcaagatacccgtcgtgtaaccgagacctgtccttctggttaccggatgaatcgacctcaacggaagagaggctgcatgagaacgatgtttgtgatatcttccgagatatcgctggggatatggttgaaagtgtcgaaaaagtatggtaccttccttacctcgcggccttttttcttatgtgttcgtagattgatctctctcactgttgcctatcaccgtagtttgatgaattcgttcatcctaagaccggtcgtcgatcgttatcctaccgagttgtctatcgatcgatggagaggttcgtgaatttacaaacatactcttctaacttacccaaccttctttgcgtgctgagccatttcatcctgacgactatttgtttttatttgttttgtcgtttttctcgttctcttctgtttggatgtttggggggaacatgattgggaccataggacactgacaaacaccgaagtatctgaacttcactcaaaagtaaacgatgctctcattgccaagttcggtatcaccattcgataaaaccaacttgttgtgaacgcaaagaagacaagaggagaaaacatgctttctgatcctgacaactattgggtgtggagcaaataaagtaggaatatatgaatcaatttcaaatggtggaagtgatgcaaaagcgcaagtttgacgaggatcaaagaaacagaagagaaaagcggtttcgaactgaaagcatcgaggagaggctgttctatgatcaaaaatactgaatgttcagagatggaagagctgaggatgaacatgccaggaggaacgaacacaatatgtagagaactatagctggttgaaacaaaagagaggaggagagttgagaaagatgtaggaaagatataagaaaaacatatctggtagaaccgtgtggtaaaagtttaaagaaaacgatcaagcattacaaacgagcggacaaggaaaacacacgaaaaggagcgcacttctcaaacacgacaacaagagatatcaaaagaaaagaaacaagaaaggagtggcaacaagaaaaaaccctttatgggagggaggtgaattccaaagtcacatatagtagaacgatatgatggtcaatcttatgaaatagattcttcgttcgttgctgactcagctggacctggccctggattgggaggaagaatatcttcagaaagagcagatgagctgttgctgagtggagtagccttagacggtcgacgggctcggactttaggcaacttgagcgaaggtcgtttgatcaaccctcctcggctaccctcgtacgcgtcatcctcggctgagagaagggatggtcaagatcaagagatgttaagttgttggtctctcctttctcttgaggaaggaaggagaaaaatgcctaccatgtcgctttcgatcgtctgacgagtccaaacttgaactcattcgacgctcttcttctaccatatctaaagtaccctgaatgatgactgcgaatgcagtaaaacgtatcgataacgacgagaaattaaaaccctcagtgagtcagagaaaacagaaatgaacgcctacagagaaactagatcaagtttcaggaagagagcaaacatacctcgataagcaaacacgaactgcctcaatgtctgacacagactcattctctgctctctcatgtcctccaacacgttcaaaactggatcctgcaagtccgacaacgtgacatcctgtgtgctgagtgtacatctcgggggtggtagtccctcttggtaactcattgattcagaaggtgtcgctactgacgtcggtgtcgaggtcgacgttgtagtcgatgtcgatacaaacgaaggcgagtcctctttcaagctgtttgaaagtaggggtgagccggtagagtggaacgtcgtgaacgaaggtcgttttgtgagattgaacggcaccgagcttcttctgccattcgaaccgatatgcatgttgcctaggttgatgagcgatgtggtcgaaccagtatgtgtagagaacaaggacgaattctcatccgcatctgatgtagcgggagaaccggatcgagatgtgtccttggaattataaacggccgagtaatcgatatccatatcactcaccctaggaccgttcgtcgggtcatccctcgatcggggtctcgaagtaggtgatcgggctgctctgaggtcaaagaacggtgagccgggcggtggcgatgatgtcggtgcggaagatgcgaatggagacgaagatgagaccgaagggttcctagatcgatccagcgtctgtttcctgtctctcgacggtttggcttcccgtttgagttgcatctcgtgcttgattgcatccagcacggcatctaccacgacgtaagaaccagttctgccgacaccggccgaacaatgaacgacgatcggaccaggtgaaggttgaccagtgatatgtgcttgaacacctgcctcatcgttgatctggttgacttctcggatcaaatttaaaagatcctcgggagtctctgggatatcgaaatcaggccaagaaacgtattggatctgagtaatcagtcgcccgggttcttcagggtggtcatcgtgagtcacaaggaaagatcgctttatgagtggtcgaggctcgctcgtctttggggcggcagcggcgaagaaacctcctcctccgtcgtgacc

SEQ ID NO: 1762 - DNA, 6754 bp, Xanthophyllomyces dendrorhous
attctcttcctctcctttaacttctagtaactgtaatgtaagccgtccgaattttcgatcgctccagtaatctccacatttgacctgtccgccttcgtgttgtttggtcaacctatcatcaggtccgtcaagaaacaagatcccccaagaacgtcaattgttggtaaggagcgacaagaacgcgacagagacccggcttacatgacgataaccctgacgttttgttcccaacataacgtccagaaatcttggtatgtcgaaggcaaaggtccctgggtagcgatatactttttgttcgtcgcgcgaggctgcacaagagaagcgttaatgtagtccgatccatcatcatgacactttgcttccagtcggactcgagcatggtcgaacggccaaatattttggaacctagagatgacgcgtaaaatgagcacttttgtaattagcgcaaatacacaaacacgcgcaaaagagaggcatccgaacggacctgttcttccagcctttctccaggccggcggtgatactatacgggaatcgatccaccttgttatcgcccgactcgtcgcttccggcatctccaaactttgagtgatgattcatgattccctgtagtcgtttttgctctcccagctcgactttgtaaaactgctgagcaagtgtgtccgccgcctgtgaaggagaagctaggatgatatccctcaagaaagagggcagatccccggctcgttcgacggtcgacgaagggagatcgaggggaattcgttcacctataccatgtgagagctcgatattctgtctgatgttatcaaagaacgggttggctgctttgtgttggagcccagccgtctgaggcatagtcaacgttttgccagacccgtccataccggggagagtaaatccgacggtgggtgcgcctccgttggtcgaaactgttagaaaaagacaaacgttttagctccggttcaagtttgtgtttatgaaagtttgtgtagctcaacgaaccttgctggaaggcggccaactaggtttcagatcgatgcagagatgttgttgtagcggcgttcatcatgaaaaaggaagtcagtaacacgtcctttcttgatagcatgagcaagaaaagattacgaagaaatccaagaagacaaacgaaccggaagatcacgaccgttcactgatttggagggtttggcctgttccgccagaggggaattgtcgaccaagccctgtgtgtttgattttgagaccgcagcaaaaccgcctctgacgatacagagctttcctttgaagccgtctttctcaaacttgtttaacaatccagcaaggatgcctccttcgcccgctgactgtccgtcttgatcgtagcagataatccgagtgatggcatccggtcccttctgaaactcccatattcttgcctgatcggattcttgatcaagcatgggaacgagcctggcgagcgtaaagttagctcgacggagtagagtcgaaggaatggtgatggggatagcagtaggaacacgggagtgtgtatagctgttgtgggttcttaggtccaagatcaaataggtgtgaggaattggcactggaatatcacttggatccaacatttggatatggggattcgatggggccatggcgctgcgggaggggaaagcggagccgaaaatgtccaaaatggaaaatcgcaacgatacacgaaggattagcatccgagaacggggtgagaagaaaaggcagaaagaagaaggagagaacagagagaaaggagaaagaacagagatggaaacgcacgactttgctctacggctggcgatacttccgcctgacggaccacctagcattcgatttgccgttgatgagaacgagtgtggtgtcgagttttggactggaaggaccgatggggaagttgagagattgttcaaacgctttccggtaccagtgacctcctctcctttcgaagattttcctgacgttgacaaactcatcctctgaaacctactggccatcgctggtggaggggacgatgcgatcgaaaacccggttggaccggttcggctcataccaggaaacactccgactccattggagccacctgcagcactaacttcaccagcatctccactagggaaattcaatgaaccgatcgggttgaatggcgagtctaacggaaagagtgacggagtaggagcgccagaggacacgaacaagttctgccacggactgatcagaggggtcagaggggtaggcgatgtgaaaggttgtctgaatgcgaaaggctcttgagccgaggcagatgcggtcgaagaatgatgaaagatgtcgtttgtgttgctggtattagcggtggtgatagaggaatctgcagcaggagtggaaggtggaaagaaagatggggtagagagatcgcctaaatttagacctgttcgcctgttcgtcagcattggtggtggcggtggaggagacatcgactttggagaagaaggcagctgcaaccgaaggtttgggttgctttgctctgtgtctacaaacatccttggtattggctgaaatttaaagagggagacggggtggggtgccagccaaaaggattagtaaaggagactgtatgaaatggacaagcgaggtgctgctgaaggcccagaacaggaaaaaaaaaaaaagttccagaaaaaaaaggaaaaaagcacgaaagagaggagtcgaaggaggttgttgatagaccgatggaagagacctccacggtgtccttggggatgccacaaaggaagacggaggtgggaaggtgtcgttggtagtatgaagaacacttgtgcgataaaagaccgggccaactgttggcggtgaggagggagaaaagaacgtaaccagtcggttgattacgctggaattattatctccggcgtaaccattcgtgcgtcactcatgacgcaatcgttcggcaaggtctctcgcgtttgagacacaaacatgtttgggtatgtaggtagcgctgcgaggtgatatctgtgctgtggggtggtgatattgctgtgaggtaacctgtattcagtgtttggaagcagttggttccttcgttgaaggatgacagtatgtcaccataggattgaggtcgaggcgggtcgctagggagaaggtagaaaagtggcagtggtcaagccagtcgctcatttttttctagtttctcttcattcttcctgcctataggtgcgacagaggaataatctgagtatttttttttaccagaccttacacctctctcttttggccatcaatgtcagatagcacgaagagagagtagagagtgtaagagaaggatttcagttctctcactgttaggccggtatcttatcttatctatcctggttttcttttctcaccaacaagtcacccctcctcgttcataccgtattccttctagtcatcataatcttccctcatcaaacctcacccatcgtccgttgagcttatgctcttcaatttggtctgatctatattgtaagaaaatccttgtgatgttcataaacccccttcttgattgcattgcgggttgagggcgccaatgctcatgatatcatgtcagatatttcctctgtagaagagagctccttctccctcgagaatggcttgtcaacccagcaacgacgtgaaattggtactgaaatcatctcacaagactgtaaccttcagaacgagatgatatttgaatgcaaagcccttattcagtgccgagtctattctatttcattcatttcagtcattacttttgggatacttcaactgtctgttcttgcactcgtggatgcctgcttcgtcgttcgggccattatctgatacaccatccacatacgtcccactgcatagatttgttgcttcttcagtatatccgcgatcaacaatgttaacgatgtacagtgtaaatacgataacgcggtcggcaagctaatctctcacaaaaacaccaccatcatcatcgcttgtaaccatttgcaaaccgatgacgcaacttcaataaatcaatacatacgatacaacttgaaaacataaggaaacaaataccgttcacgaaggagtggaagatctagtgtccacttccttatgatactttgatcttttcgaattaatcccggacgacatccgagtccaggctctatcgaatttatcggatcatcaaagtacaggtcagtttttttccatcttccagatggtcaaagataccgaattagaatgaccgtaccgctcgtactggttcgcgggctggtgaataagaaccacctcggtcagatctgatgggttgatctatctagaggagacaggaggaagtgcagcaagtgcgaagaggaagaagattgaaacaaaccttgacgacgaccccgagtttttcggcgcactcaatcacgaaatctgcattcctaaggagttctctggctaaaaagacgacgtctgcttggccttcctgtagaacatcctcgatttgctccgcggtggtcaatagaccaacggcgcccactctcagagacgtctcgcttctgatgacttccgcaaagtgaactacaagagctatagttgagtgccttgggtatcttcatatgaagaacaatgagagagatggcaagatctcaccttgataaccaggtttgatctcgattttttgtttggaccaaagcccaccagatgaggtatcaatcaagtcgattcccagagtcttccaaagtcgggaacgaggttcatcaatactgaaagaaagatcatatgtcacaaacatataaacactcacctcaagttccttactaagcatgacgctctgaacgagtccccactgaacccactctccagagttttgatctctctccggtccgtccgcccagtcgctagcagaaatcctatagaacaatggccgatcccagatcgctcgaacctctttggataccagtttggaaagcctgattcggttctcaaaagatcctccgtactcatccgttcggctattcgatagcggggacacaaacgaatgaatcaggtacccttttgtgtttccaattccatacatgatcagcatctacaagaaatccatctttttcctggtatacaacttgagaagctcaccatgagcaccatgaatctcgataaagtcaaatccaatctttttacatcgctcggtcgcgtccttgaaggcttgaaccaggttctcgatatattccttcgaggcctcgataggctgcgggtatgtttcctggaaaggaatagcagaaggtgcgtatacttgtaccatcccaacaagatatacaaacatcagcttcatccctcctcttcttcccctgcttcatcacagagagtatacatccgaaaaagagacgcaagaaactcagaccaaccattatcgggccatcctccatcgtcttctgaagcgacgtccgactgaggtccagcaggagctttcgctacccacggcgcttttgtagaggccttgcctttaaggtttgatcaaaagtcgagttgaattttggtcattttggaacagataaatgagtgcgatatgtcacaacttacggccagcatgagcgagttgaatcccaatcttcgttcctgtagtttagaggagagtacttatgttcagtccagtgttgcgacactaatgatcgggacggggtttcaaaaaaaaaagtaacacgagggaagaggcttaccatctagagggtttgaaaccagttggacgagctcacaccggtcaatacctcacaaccgtgccattagagagagagagagacatgtatggagaaggtgaggactgacgggcgtggcaaaactctaccagccgctttagcggctctatctgagaatccttccagattccagcatcctgaggggtaatccttccctctggcaagactgcatgagcttccagacatatcgcgcctacgccgcgaatggcaaagccctggatggaacaggttaaaattcgagtgtttcagctctatctgtgagccagaatcgatcagtgaagatttagggttaaaaaaactcacacctatatgctgtggtacaacgattgatatcaacaaatcgttggcgtaatcaccgaaagtctaaatatatgggacaagccttaccacaaaatgctgtcgaaagataagctgatcagtcctatggatctcactcaacgcggcaagggcttacagatgagccactcacaaagtcggtttgatgaccatcttctgccgaatacatacacataggactcacccagagccggttctgttgacgacagacaaaccagtcaaactagctgacctagcctcggattaatgaaaccaagagcatactttgaaagtcacatcccggatattaagcggctcgaaacttttcagtctcggacctccaactttgatggtgtgttccacgatctctgacccaatggccggactgttgagcggaaggaaatctattttgtgttgttgtaaaggttacgatggtgtgagcgcgcacgaagagagaaattgagccaagttcttcttcttagtcactcacatggcatccctggaaccggctcattccgagaaagagacattcttgcgtcgactgtttgatcaatgttggctgtgttggctgtgttggttgtgttggttaaaggaaacaggtatcatgtaaacggatgagtttgtcatcccaacagattatgcatctatttaggacatggccgaaaaaagatgagtaattagggttatgacaaacccggcatagtcacgtgatataatga

SEQ ID NO: 1763 - DNA, 22272 bp, Xanthophyllomyces dendrorhous
cttttcaacatccaccgtcatccttttttacacgctatccattccaacctatccattccttcttcgggcgccttcttcgttctgttgcttctgtagttgatatcatcatggtagctcttattgctctggccgcttctctggcagtcaccactccggtcttttcccgtgcgctcaccgttcctcaacaagtgtcgtcgttacccgtcgagccgttttcccttccactttcccatacacatcattctagacgaatcggcgaggacggtacgcttttagagtggctcaggaaggagcatgcaaaaacccaagcaaaatacggccttggcgcaagcaaggccaagagggattctggggtttctaggttggtctttgttcccttgttcctcgtccttcctttgtctttcggacttgtacatcgtagtacagccacctctcccgctcaggccatctgatgtgatacattgggatctgcagtcttcatacccattgtctgctatatcaatcatgctgatctagaccttctctctccagtcttcaaaactctgggttggacgcatcttattctgcttcggtcaatatcggaacccctggacaatcgttcaatttgatcttggacacaggtaggtccacgttttgagaactctctatatattccaccgtctcagacagcattgacggactgtatgacctgataaaaccctgtttgttcaatcaggctcttccgatctatgggtagccgggaacgattgtacgagcgggtgcagcgggataactacttgggatccgtcgacgtcatcaacattcaaaaagtgagttacgaaacgccatcatattcttgtcaattattcatattgtcagacgtttgacatcttgaaacttctcagccttactaccgatttcaaaattaagtacggatcgggaaccgccgaaggttatgctgtcaccgataccgtgaccttggccggaatgacccaagtggcacaaaacatgggtatgtatcttgtacatgttctcgcgtcgttcctcttgatgaaacgttgtagtcgatcgactgactttatagttgcgccttcctcaccatacagctatcgtcaccgccaccgtttctggattgctgaccgctcctctgtccggtctcatgggaatgggtttccaagccttgtccaaccttaatcaacctccgtggtggcaagctcagtcggctgattggtccaagaaggtcttcggtttccgattagcccgatggagagatgtcagaggagccacaccattcgaggaggagggaggctacgtcgatttgtcagtatcattctcaagatggtcagaccacctagcttccgacactgatgactgcccaatatcttccgaccttagtggagcgcttaactcgtcgcattacaccggcgatatcaattacatcacagttcctcaccaagtctgtacgttcgaggattatactccaatcatcatcgactaatagatctgaccaaacaaactctgttcgacatggaaactagactggcaaatccctgtcaacggtctctctataggcggagttgccatcaagctcaacggggtttccgactctaccggcagctcgtcatatcctcaagtagctgtagacacgttcgtccaatcctatctcttcgcgcttgtctttccttccgttttctctctagaaccatcttttaagcaacttgtttctctcgttttaccatcagcggaaccactttgatcagtgttcctactactaccgccgcctccttctgggcgaacgtcgatggagcccagcagatctctgtctttggtcttactggttactaccagttcccgtgtagcacctcgctcaacgtcagtccaatctatcctgaatacctttctattatatcatccgaactctaacttacatgatgacaattgccttcttctcacacatatgtcattcacaggtttcactgacgtttggctcggtcacatatttaatcgatagtgccgatatgaacgttggtccggtcgacgcttcaaccaatatgtgcttgggtggtatctacggcgtacgtcttagctggctttccttgtttcgactttgaatacaactaattcccatactcacattaaagcttactaatcaatttactatgaatagtctaatcttgaaagtaatactaccatccagtggatcttgggagacactttcctcaaggtgaaatttccattcctatatatgtccatcttgcttctctaagctatcagacactgattggtagtgtctcattgtttctactgcccgcttcgttccgacagaacgtctactctgtctttgtctattctggtgctaacactggaagccaagtcgggttcgccgctctatccgagtaagcgttacgttttgtgtctcctttcagtcttagtatcttgaacgttaacgtatcattctgtaccttctaaattttgaattacaaacagcggaagcactgttacgaccggtagtccaactaccaccaccaccggttcgggatctgcagcaacggtcaccagttccggtagttcctcccctaacggcgctccagcacacgtctctatctctagattgaccatcggatggagtgcggctggtgtggctgcgttggctgttatgttgatctaacaaaacaaaaaaaaacaaagcccaaaatcctttttttctatcgcgcattcttcctacttatccttctttctcttgccgcctacagtgttttctgctccgtgacgtatatctcatctgtatacacaagaaatcattcggatgcatctgtcttaggactttttacacgagcgtctttttgccttcctctttttcgatattcgttttgattgttacctactgtcttccaattgtcttcctactgtcttcctcctttcttcttgcttttgtcgcagtccgtctgtattctcatgccgtctttacatttcttgttcactctgcttttgcatcgaaacgagcacacggacgagacttactttcctcacactctgatttcattctgttcactggttctttgtgtttagactattctggccatgtatcgctcagtttgatttgtctacatttggtatgaaaggcagttcacttggagttgttgagtcagagctttgaaacgtaggccgtagtgtcttcatgtctcttttctgtcactttcgggatctgttcgattgatttcgagcatcaggaggatttcattcaaattcatttagagaagttaagacaaagctacatattccaacaaatagaaaaaccaaaagtcagtttccttatcttccaagcagtcatggctagccgttatgagatcagaagattgggataggtaggattctttggttgctcagataccgttgtagaagatgtttgacttcataacagggaggttatgaagctccctgatgcagatagtgtgaatacttttcgtcttcattgcaagaataagacccggagtgggtttttgtttttgacgttgattttggattgtgcagaaatgtttgtgtgatggtgtccaatcatgagagagagtacttacaagcaagtcagaagatgaaccagggatgcgtttgatagagaaaaggaaagaaagaaagaagattgaacaatcgggcttatataggttttcagaaggacgaggaaatttaacgccgcgaatcacgtgtagggtcacgtgcgtgacacaattcttccctctggtgattttactcaaaacccattccgcgtggccatcgtaatgaagaaacgagctctataatataacctgtagaatgttagttatctgttctgatcaagttccagagcaggagagcaattgcattccagaacatgttaaccctcctcgcacatcatatacgatgagacatggttaggatactcattggctatcatattatattggttcgtcaaagcaaatgaacaaagcaaaggagagaagaatccgtgtgtttctatagctaggtattcagctcggcaagacgtttcagctcagaaagttcgcccgaggattgacaaagttggtagaaatgtgaacttggattctgaagaaggtttcgaggtgaatctaattgaaaaaaaatagatcgagatcaacgtgagacgcgtcaaggtagattcaagaggatacttcagtccgaccgatatttaccgtattccatgacttttccctttaaaaggaagagaaccttgtcatctagaggcatagtataccataatcccaggagcttgttgtgagccatctacttcaaccaggaccaattgactcaaaagatagggcatacactgaatgattgtccttaaccgatgagcaattacgagcaacgtagagtcttggaaggcttcttggatggtcgccgtcaacagatgatcggtcgcaaagtcgattgaactggaaagaagaaagcgtctcagaatatgttctgattggtatttttgacatgtcatgcaaatcagtccaaaagatgagacacatgtaccttgtcgcttcatctacgtaaaaccagcgagggatgcattcgagtaagcgtaatggaaatgagcaagttgggaaagagaaactctgcgaacctaaaatcatgaccttagaacgacgcaaaagcgctcgagcaaggaggagaagctgtcgttgtccctgagagaaatttctatcgagtaaaagaagtatcagtgggatgtgagtcagtaagaacctatcaaaacaggaggaagacgacacatacgatccatgctgagcaacctcattgtctagggaagaaaacactgagtcattctgtccttcatccatatctggagctccgttggtgtcggaagagtctttcagcagatggactcgtcggagcgcatcaaatatttctgaatcagtgcattcgtcgtagagatcaagggccgaccgtagagtgcccgacatgattgttggatcttgagggatgattgtcaaacgggatcttacagcatttagcatcaatctatcgatgcgatgataattttggagaaccaagttcagcatcagaaaacgaacgatgtagtacatacgagaaggtcagaacatacttgctgatgtcaagatcatctagaataatttggcctgaataagcttccataaaacggaaaaaggacagtgccagactactttttccagatcctgttggcccacagactcccaccttctctccggcttgatgaaaagagaggaaaaacatcgcgagaacgattcacgtgtatcagaaccacttctgcttcttttcatatgatgagtcgctctacaatagatgtactcacgtctaacgtggaaggaaatatcactaagagcatcaggcaggtggggtgcatatcttacgcaaagattctgtacccgaatctctcccgccataggccacgcggctggtggatgtacgccagctgtactctctgacttaagtatcgaaccagacttctgatcgtcctcggaaaactgcttgatacgctcgacagcaaccatggtgagctccagagagacataccgaagcatgagatcaagcatcccagaagagatgctcatagcaaacgtgagagaaaagccggctaaggcagcatcttgagttgagtagagcaggatcaagctgtcgcacagaatcgtaggtcagaatgaggacatcgagggtttaatctgaaggtgacggctatcagacacgacacataccctgcggacccaatcagaattccattcaaacctgtaaaggtggttataagccacagatagacctttacgagagtacgtatcagacaacgttgaccaagtttgtcatagtacgttcaagactcacagagaatccgtgaaagtatctagaggtttgtgcatctacgttagatagcatccggtccatgaagctcgaagaggaaccgaagcttccaaatgtttatgcagacaggttaatcatgatccctacaggcatactcttgaatagatagcaagatagaagctcacgctctgacaacgagaatccctcctccactgataacttctgaccagagactaaacaatggcgacaatgacacgctatccaaacgtctcaagtctctggtaatcttggcatatctggagatttatatacaacaataaagggacattgatacataacaattgtgatcggactcatttatgctcgagagacgaaccttattccaacgacgactatgataggggctatgacggcaatggcccataggaatgaaggcgtaatgatagtaatcacaccaacactacttgcaaggctcaaagctaattacttcaaatatcagccaaaaccactgaggatcagcttaaaaaaaaaactacgtactgtacattaccactcgagcccaatcatctctgattagtaagagaatggagaaacatatagaactctcataagtgtcagagcaacagctcatacagcacgatgtacacatacggaagaaacccgtccacccgactcatatccacactgaacctgttgagtaaagttccatgagcggtgctttcaaaatatcgaagtggctcatgaaggacgtttttgaggagacctaaaaagggataaaaattgtatgagccgagaagcaacaggaggcacattgacatgaaagaggattacgttgatgaattatagaagaggctctagtcgttgccccgttatagaggatgatccatctcagagcgcttgcaatcacgccgaaaaatgttatgcacgctagagtttgatgaacgagcaagagtgtgttcagtcttctagaacaaagatcgaatccgaaagctaagcggaatgaagtcaccgtagatggctaggtagtagtctaatgaccgagccggatgagatagtcccgcggcatcagtccatttcctgagccaccaagcggttaaaagatccaaagcctgtgtgcctagatacacaatggtgaacgctgtccagtagaacattccacccttttcaaaataatgtttagaaagaccaaactattcaggttcaaatacgcgagaatagcgaagcagaggtacggaaaggatagggggagttctaagcagactcacacaagacgacaagaaatagatataagctgctgatgagatattgccctcctctcgcgtctcctttttgatgagcttgacaggcgatttatgtttggtgttattatcattgctaggcagatcctcgaaggtggattccagactctccaccaattcttcttcacgctgagcttcctcatcttcctcccgaagaaagtcctgaaagtgtggagatgtggcgaacgtgtcggaatctcctgagtattgaacacacccattatctagggcaatctatcatttacgacgaaagaagggtaagtaaatgaagaacatatggtagaggggtgaacttaccacttgtgtgcttgccgataagcacagagacacgtggtgagtgacgagaacgacagtccggtcagctaccataggtcctttcaaacatttctcgtaaataatctgagcggtgtgtgctgttttgttcgtttcgtaaaccaaatcagacgatgaattgtagagatttaccaattgaaaatataagcgttgtactgaccgtcaacagcactcatgatgtcgtctatgacgagatgctttgctcgagaataaatcgctcgcgccaaggatatacgagcctagaaacgggacattcgaagaccaagtcaatttctgaatagagatgtcaagctagatgagctggagcttgccttttggcctccactgagtacacgcccgttctctcctatctcagtcaggtctttatccggaaagatctctagatctggattcaagctacacacttctagaacacgtagatatcttgaccgattgaaaggcaggccaaacagtatgttggactgtatggagccagattgaagccaaggagtctgtgaaaggtgaacagagttgagacatgtttagtcaatgtgcaaatagacatgcttaaacgcacacagactgttctcacttgtggaacgaatgcacttccttctaccaaccattcctcctctttgatcatgatatcctccgaacgaaaacttgagtctaaggttctaggaaaccctatagatccttctaacagatcggcttctcccagcagactcagcaatagtaaggatttcccagaagctaccggaccgcatacaagtgtcaaagcatttggggggatcgagatagagatggatcgaagtgagaatggacgtagagaagtcgggggactactagtagtgacgtcagatcgagatgaagggtacaaaatagttgcatcgatgatcctaaaagagttgtccttgaaattctcagtgcgcgccacaggttgaacctcagacccgcgtagataacccgccagacgttgaaggctgaccagtccttcagttagttttataaaagttccaggaaggatggtccacacctgagtgagcgagttgaagatagctaaagaggggaaggctacggatggtataagatctccatgttggatcttggtgaagatagtgaaagtaatgagaagacaaagaatcggtagagagcccctgatagacatgagaggacgagaaaaagaccacatcgtcagcctcaatccagcagatatgatggcaacagtactgaccagatcaggttgtataaagtccctagatggtaccgcaatctctgcaacctaacctcattgttcctcaacatccctaattttttttcccaatggtgttctgcagcctcaaatttgacagtccttattcctcctagaacctcatccacacccgcaattctttgatctcttgctagacttctccttctatctacatcaaatgttattgaggctaggcttttgtttaacggaatactagctgtattgagtaagattccaacaaaagctgatggtccaagcaatctataaaggagagtcgtccctattactagatcaacaaaggcgataattactccagctgcatcgctcccaaacccagctagccgagcaacgtcaactgtaaacaagttgagaacttgggtcttgcctacacctcctgctccttcatcggtagaagtgggaagcgcaacgatatccattcggcgaagggtcttctggaagagaagagctcgaagttgaatctttattggctcagatacattctcaagatcccaataagcctggtggctagaaagaatcccggagagtgccccggtcgctgccagcgcgacacagagagtaatctgttctttggtcggataagaagagttggactctgttggagtcggagaagatgctatttggctgagaatgaacgaaggagaaaggctgggaatataactctttttctcaagagattggatgagaagagaaagaatgtatgcaggtagaaaggtgagaagcgccttgatgaccgccagtaagagcaagaccaagattcctgttcgattggtattccagagcaatcgcaagagaagtttccagctctcagtttcgttagtgtgcttctgaccggcaagcagtttatcgaacatgtcctttactgctggtctggacaagatttctctggaccgtagctttctaggcagatgaggaagatcggatggatatagaagtggtttagattgcgaaagccggagaagaggcaaaggctatatcgacacgccaacgggtcaaaacgatcctagagattagaattcaaagaagaaaacgggtgaaagaaggtatgaataccgacccattggaaaaacagccagcccaacacgctactgcttgcagatccaccaacgtttcctttgcattccttctctgtctgttcagtccctgtttcgctaatttggaagtccttgtcgaagtcctgagggatgaattgcctctcaggttcgcattgagctgttccactcagaaaaaacaaaataatggagatgacctgaagatatgtacttccggcctgaaaatgggtaaagtatattggaggaagcaacaagatggtgcttggcagatgccaccgcgctctgcctagtgaggagaggggtaagaactatcggttcaaatcaacacaagagagttgccgatgggtcctagtcagcattgaggatttcagggataggatacaagtgatccacctggacttgcccagtagagacaaaataaaatgggcttcaaagaagatgtttggccatgtccgatgctgtacgacagatgaagcactgcagctatcaactcagccagacaaccgagaaagttgagtatccttcgccggccatcagagacaatccaattggattcatcgataagatccacctgatctgtctgcatcagaaatttcgaccaagcgaaagagtcaacaagagcgagatgattgtgagagaggaagtaaagatgatgtaagttgaaactcaagaaggttgtttcctgacgaaagactgttgaccgcgttttcgcttcgaactatcatcaactcacaatccccatagactttttcctttcctcttcatctatagcctcttgattgctctcatatgaacaacgacgagtttagctacccaggtggacttccatatgatggcgatgatgaatctactgtcccactccctcgtccgtcagctgtcgacaacagcgtgtcttcttcatcgcgtgccgatttattagaccgtccgttggacgactttatccaggatgaccgatcttctcgacctcgaagacagaaccccgcttcgaattcgttcgacagaccgtatagacaagccagaccaagaaactactcggatgaaccacctaccccgaaaatctacctgttgagtgagctgaacccggtcatcaaccacaagatggtctgtcctccctctcgatcatgtttctcctccttttatattcccaactgtactaacatatgttttatgaatatcctgcaggcttcagatcttatggagagcaaaggccgtgaacgtgagatctttgtttctttgtctttcttgcatctgttgaattctatctgaatttgttcttccgtcctcatttattcatccgtctagccgagctcgaagaagagtctagtctgcctcctcctccattggacgatccgtccatccgtcgaaacgcgctctattttgaaggatcccctttgacggagctaccaaccgagaaagtctttacatacatcacttcgttttcgacctctcttcccctgggaatcgagtggatttcggatgaccgactgtgcgcggtatttccttctcagactagtgcctctgtcgcgctatctgcgttgttgctgaaacctgtggaagaggtgttggagaactcgagatcactgttagacgcgacggctgactctcaatacgtacctacgttcctctggccggcggagatgaggcccggaccagcaagatcaagagtcgatgagatgggagaggggaaggacgatgcggtgatgagggctaggatgggcatccgatgggcgaaaacgacagacaagaaggctggaagggttcgtcccgctattttctttttctttgctggctttcctattttcgataggaactgacgatacttgctgtcctgtctgtccttcctgatttatgcttcaataccgtgttcatcatattgctggacaccccgaaaaatatccaggcacacaatgcttcatcgttctatcgaaagcacggacaatctgccggtcgaccgaaaatcgagcatcagcctggtaatccgacagatgaccgtggagacgatctcctgtccggctctttcaccattgattcgaccgaccggcatgataacgaacgtcgtcgtcgtcgatcagatcgatcagcttctccccgtcgtcgagagacacttcggacccgactagaccgttcggcttcgcccgacgctgtctctggcgaggggagcaagatgcgcgcattcggaggggaccttgaaggccgaataggtgaattccatgttgaacgccggagaaacatcgagtatgaccccagacggtccgaccggtggactcgaaacggggaggaagaggtggatgactccctggtgcctgtacgaatgagtcgagtcaaagaagatgaggaagagagaagagacggtcggacgagtggaggtcgaggagggagaagaacggagcaaagaaaaccggcgaatgcggacgatctggacaaagagcttgaggagttcttgaaaggccgataaaaagaaggaaaagaggggagtctcaatgaaccatgacgaacttgatcagacgatccattgatcagcccaagacaactttatagacaaagagtaatcactgttgcaagacaacctgtgcaagaaaggtcaagcaagagacaaatccgttcaagcatcagaacagcacaatctcatccatcagaatccattgagtatacactaggagcggacggaaagaaggtgcaaacaaaggttacatccgtcgtaaccaacgaaaggttgactttccgagttcttcatctctctctctcgttggcatcgcccattccatcagcatcgatctatccgacgatacacacgcactctctgtccagcatcgataagacagtatccacgagaatgcctccccgtaaccagccgactaatccggcggagattctgccatctcttcagtcactcgtccagacaaatgcttgtacgtgttcactttgttctttccctcatgaagctcctcatgtgcctgtgtgtctgcttgcttcagaacggtagcatcgattcactggattatctgatctggtctgtttggaaatatcaaacttgtgttctcaaagactctgcacaccagaagaccaggacgactgctgcccgactttccgcacatggccatgtggacgctgcaacagaggtcctgttcgagatctccaaggctctgctcaagaaaggcgaggtcgggagtggagttgatctggcagtgttcatgatcaatactaccgagagcaaaaacgaattgtttggtgacgttgttcgaggttagtcttgaagcttgagatagcggtgtccccgaaaaacgtttcctagctcacactgccggcttcgattctctatatgacattctctctggcggctaccgagcaggccgagtcaccaacctcatcgcgctttgcccatcgacagccaactggaggaagaccgttgtggacgcttcgataaagtgggtgaatttcactgtcacttaataatgatctgcagttgctgactggacgcgttctgctctctcttctcgattgtcaatcgtgcttggtagcctatcgactaaggccccgaatctatctcctgcaggagatcctctactacttcagtacattggagagttatattacaaggaaaaagattttgtcaaggccgagcctcacttgatctcgagtggaaccagagattcgggcaagatcctcggagccatgggtttcgaatggttcgtttctctaccttcaggtctccattcaagcatagcgttcaaatgattgtaatcttctctatctatcgctatatctcaaacatccctacaggtgtcaagaaggagcagtggatccctctccttacctgctccgactagtccttcctcacttactcctctcgcctccatcaatccttcctgcgcgctccacgctcgatactttcctctcccatctactttctagcaacccatcgtttttgatagaacgaatcccattcccctccgccgacaacgccgatgaaatcttgtacacgacgttacctgtcgcaaactaccttcagcttttgatccggagcgtccagaggagcggaagtgagacggccaaagtcagctggactgagcttggaagcaagtaccgaagctggggtaagccttggttacgagatgaacacatcaaggaggttggtatctttcttttcattttcaagaagacatgaaagatcttcaccgagcaactagctgacatcagcttgtcgcttcttcttcggctaggctgtccaatatatctcgacaaacacgttcaaaattcctgcaccacgaggagctggtgggaataacatgatggcggacctgatgagcagtctgtttggtggaggaatgtagacatggccaaactgagcttcgttttccattctaaatcttgataatcttggttcaagctttttattaatatcataggaaagataaaacgatttttggatggtcaaaatatgatgagtacaggtggctttgttcaacgtgatcaatgatgacaatgagcatggaacaagaataataggtaaagaaccatctggggaaagaaacatgtgtcgtgaacattactgtttcaaacacgacaaagaagcagaggccagttgcaaggggagggaacgaacggccacgtccgaaccggcgaataaattgaatggctcgttaatcatactcaaacggactgattggacgctcatccactctggtctacgcgatgattcgcacatatgagatcgtctaggaggcgctcaacattcaaagtgatttgtaagagaacttctcatcaaggagtggactgtagaaagaacgaaacagaacaaagaacggcttgtttgtcatccaaaacggttttttcttgcttagtcaggttcgctaaatggttttttttccctgaaatatacattagtcctttggcacttctttctactctggtaaaggactatctgttccctcacctccggctcttgttatccctacatggactctcagacacttctagaggcagagcgctcgctcctgtcggctaattggtcgctcagctcgtcctcttcctcttctgctctagatttggtcaaacagactaccgaggcagcttatcaacaagttctttcctctcctctggcttccaaggtccttagctttactcccttcaagacattctcttcagagtccgactcggcctcattcgaggccacatatgatattccttcccgacttgtttctccctggtctcaatctcctccggaaagtttgtccgaggccgaatgggagctagttatcctctccgttggggtgtccttccttcaatccttcatacaaacgaactatactgggcctctgctctcattccgaattctcgacttgttgccgtcctccacgtttccagagtcggagggaagcgctcagaacgttgatcaggctgcgatctcttcgttgtcataccttggtgaacctgcgtaccacctagctcagaacccggctttccttgttcttgcttcgaggcttctctcccctccgaacggttggaagcatgtcaagagtggcccttggtggttgctccgggctactagagcgcatcatcaaactctaatgctcaacggtcctcttcctcttcctgattctgttctgccaggagcgagcagccttctctcaccttcctccgagcttcttcctctttcctctcctccggtctcactcattcaagatcttcgagcagcactaacgctagagatcggtctcgttcaccaccttcttctcgggtcggagaaggaggcgtccaacttgtttatcaaggcggccaaagacgaggcacgtcttgaatgggagcttaccggtgcgcttggtaagcgaactaagtggcaggagagggagattggtcagctcgtcgtcctcgctcgtggccgacagagaaaagaatgggttcctttggagggggataacgaagttggtatctatgacagggccggcgtcgttcccacagagggtgtcgtcaacgaagcttccatccaggactctactgaggaatcagatcaaaaggatacatcgacgaaaaactctctgattcccgagaccttgctcttgaacgatgacactctattggagaagactgagttcactcctacgacggcttcttctggatcgactgcttctctttcttcaatcgatccctccaacccacctgtgcttcatccgttggatcagtcgcatcttctttcgcttccgttgattcagtcccagcagccggaatcgcagttgacgacttctcagcttactcctttcactgcggtcgtgctttcttctcctcagaattggtccgttcatactaccgcgcttcttctgaggtccagagccgaggcaggtaggacgaggacggtagagcgttcagttttgcagttacaggctctcgtcgaccagattccattgaatgatgatggaaaggccaaaggaattgctccagccaaggaaaggcttaggttcttttgggtccttgtcttgccatccaagtgggacatggaaggtgaactcgccgaaaggttagtcagtctcggtgtcttccgaagtgctcttgagatctatgagcgattagaaatgtgggagaaagttgtggcctgttacaacgtgagtgaattctttcctttctactttcacattgttttgggtttgtcaggacgatactcatgtcatacttcgctctatttgaatttggtagcacctggagcaacaagaaaaggcgcttgccatcgtcaatgatctcctctcgggatccttagtcgaacaagcccgagtgaccgcgctgagtcgaaccggttcggccgcgccgtcgcaacgacatcaaatccggatgtcggtagcccgacgagctaccttgttatgtatgctggctgatcttgaacaggagggcaagctggaaagatacactcaggcctgggagggtacgtccttcgttttctatgtcatatgctcgcgagatggtttctttcccttcaaccggtattaaaatacattttgttgccctctcttctcaataactatttggtctaattgcactcagaatctaaccacacttcttctcgagccgcccgatcgattgccgctatacattacaccctcgacaagcctaaggatgccatccccttttttgaagccgccctggctatcaatccgctgtactctcggtcttggtttgttctcggatgtgcttacgttaaggaggaaaactggaaagacgcagtcaacgcattccgaagggttgtctctatcgaagaagaagatgccgaaggctgggccaacctggcaagttgttatctccgaatgggtgacatcggtggtcttgtaagtggcacatgcaataccatattctaatctgtcaattagatccatattcaaatcttggtttgctcttttcaccctttttttttgttaggacggtctcaagaaggtcgctgcaggggaggacctggatgatggcctggataatgaagatgttgatgaagtgtctgagactgccaaggaccttgtgagtgatgtctccatgtatgttgagctctatgattcaactaaccaaggcaaggtctatcaaacagaacacacagccagatcgaattccgcatgccaacaagatcctcgcccatcgtgccttgggtctgggtttgaggcatgctcatcggaactggaggatgtggtcgaattatctcctcgtttgtgtcgatctaggagagaacaccgaggcgtgtcgagctttaacccgtgtagttgaagaaagagccgacaaggtcggtgaggagtgtatcgatctcgaggttctcgatcgacttgtcgcctctgtcactcgggatgcagctcccggctcggccgaggctatcgaggaggcttcgtccggagcagagcgggcgcatacgtcaaattctggtcgtggtcttcttccgttcttgtccagggtgcttgaagatgtcatcctggctcgaatcactacatcgcctcgaatcttccaggctcatgcaaaattgctactctggcagggtcgaatgggtgataccctcgatgcgcacctgaaagcgtaccgggctaaagtcagctcagacgacacagttgagagagacttggcgagatggaaagaggctgttcaggatactcaggatatcatcgaaactcttatcgcatttggaccgagagccctagaggaggaagagaaagctgtcttgaagagcgatgaggaaggagccaagttgaagtggaaggattggaagttccagggaaggagtctagtccgaacgttcatgggtatgtttttatttgtcgatgctctcgtctcacaagatgactgactgaaactggttttctcctctcattctatcttggccatggttgtttcttttctggaaccatgctttcctcaggtcgaaccaaggattcgttcgaagatcaaccagaatgggacaatctcaaagaaactctggaggatctgaaaaacgcgtgaacaataaatgaatgaacacgtccagacagacttcatgacagccattaattatacaccataatgataacagtcatatagacatggacgagaacgatacaactactgaagtttgtatgaacaagccttctagatgagtgaagatccgtaagcgagggtgtatagacgacaaaatactgcgccatctatccatgatgtcaccgtcgttgcgacataagtcaacgtcttgtgaaccagccagccttctctaattccctccaaccaccatccacttgaacatctaatcttgccatccgagccttccttatcaaccaatccactcttcaaaatacatcttctatcagtcagtctcttgccgcactcatttcagttgggaattactctcgtgtgattgtttgctagaaggctgtcgttcttactgctgttcttccgtcgtgtaccgctatttagtggctttcatcggatccgatattatcaagatcatctttgcgatcctccttcctcccgttggagtcttccttgagcgaggtacgcatgtttttgagattgttccatacagagagtatttagatcctcctagttgagaaatcggtattgacccttccacatcgctttgtgctcacctgcgttttaggctgcgtgagtcatcacctaagatatccgggaaggcatcctcattcctcaccacacacagcctgactgattcaattttttttatattgactctgtaagaacgctgatttctggatcaacgtcctgctgaccattcttgggtaagttctgtgatgtttctatttctagatttggtttgagtacgtttcttactcattcacttcctttgacggctttcgtacctcaaagttacattcctggttcgtcatttcttgtttgatctgagggttcatgacgatggtctcctgctgatatgaaaattcatggggtttcgtcttccatccatcaggaatcatccatgctctgtacatcatcttgaaatattgagcttgaaacattgagccaacgatagtcacggctatatgctgtaaaatagaccgtcgttcgttctctgtttggcccggtcattcataattcagacactttcttctgagtcatatactgtatctcgttacgttcttagcatatgccgtttttttgatattatgactgctgtaattaataatgaaaagtttctggcatacgacctgatcttggaatcgaaatgagagaaaatcgacgaggaagaccagcatatatagatgtaaatacacgtagctgtgatcaaacaagagggagtttgaatgacgcgggattagacttggtcgatctatatcgcaatatgaagacctaaagagaatgaagcggtccaggacacaaattttcaagctcgaccccgacacagatgctcagcatgtatgttgcctcaagactaggaaacaagggaataggcaagaggcttcggttttcaagatgcgtagagcgaagcttgggagtttactcgacggacacggaattcagagtctggaacgcgtgagttgatcgggctcgtaggaccgcgctcgagtttgaaaactttcgtctctatgacctctgatatccgagacctatatcatcatggaaggcaggcagaagggcgaaactccgagtggcttgagagatgcgctaaatcacggcgtaggtgagcagaggatttagcaggccgggagagcttcatttttcgatctttgtgcctgaccctaagaggattgatttgggtatttgatgagtcggtcacttagttctgatacgaggaggagaacatgagaatgaggattagtggattatacaatgccgtgctggaacgaggaagatttgcacataccaaaccgtaccgtatgaaggtcgctcaaaatgacttgtttataaaaagaaagagtgatcaaccccagatgagccagccccagatgatccagcaaaaaaccagccccgatacccagccccacctgatgtctttctcctcatcattgtccgacttgatatgatcgcctgctgaacacgctgactccggtaaccgggtttcaatcaaatagatcttgtctccgggaactgtaaaattgagggcttggccgttgatatacattgtttctaccgacggagtttcatggtgagttgtcacatgaagtatcggtttagccatccttcgggcggtcgacatcgtcccgacggaaggtgtatcgttgatgggcggcactggtcaggttctttggacctaggctataacagcgatgcttcatttacatatacttatgtgaaacttgaattttgtaaatatatcaaaaatatcaaaaattcaaactatctgggatatttggtatttgagaaaccaacgactcaacgaccaacattcacacactgtacatcaaacttggttgattgccccgtatttatcgcttggtcatggcttttgggaaacagaaacgatcgaacaagaagcacgactcgaaaccgtacgaccatccaaactcgaacgctgcctctgagcccttgggtgcaactccgttcgctcctacggacgaagctctcaagggagaggaagagaaggaccttgagtcgtacttgtttggaaagaagagagctcccagggtcgacaagaccctgttggagctgaacgtcgagaagaacaaacagcaggatgatgcagtggtggattctgttatgggtgggatggcagattctgaggtatgttctaattactttccctacaaatgatgccccttccgttctctgtatattttgtgtttgaagattgatatggttgattctcgactgtatggcgctacttttcatacgtgccttgattgttcaaactatgaaagctcttcttcatggacgcgcctggccgttcaaaaaccggtgaggttgaccaagaggaaaccaatcctctagatgcccccttctctgacgatgatgaggaggatataatggagagcgataactcggactctgattcagagcccgattctgagtctggctctgaatcagattccgattcagagtctgaatcggatagttcatcttcctcgtcaagcagcgcgagatcagtcaagaagtctaattcgaagaaggcagcgtggcaggacccagatgacgcaaacatcaaagtctcgttaaagagtcaagccaagttgaagaagttgaggcaggacgcggatgaggatgtagttggtggcaaggagtacgagcgaaggttaaagacccagtatgtacaatcctctctttctcattggatccagaatacctgcgtatatgtattgagctgattgtttcgatgaacaggttcgaatcactcaatcctcgtccccagtgggccaccgcatccacttcgagaggtatcgccggtcaggatccgcttcagtcactactttcatcctcctccccgttcatcgcttcatccagggcccgacaatctgtcctgccttctggagagcttgatatcgaacgtatcaaagacgtcaagggtggagaggaagggccggtccgatgccttggctgggctccttctactggagatcgagatatcctgacagttgctggaagtgatagacgggtacgaatctacaatgtacgtaatctctatctaggttgggtttatagattcttcatgatgccatagaatgctcaatcacaccctcgaacgatatccccagatcaacggtccttcgaaccctttgctatcgacgattcacattccttctttgccgatagacaacctcaaattccacccacatctaccccaagttcttctttctggtaaacgacctttccttcatgtgctttccctcgccacgtcgacttctgctcgattgccattgctcccgccgtcgtccaacatacctgccccgaaatcgctctcgtccgtgtcgttctcgcctgatggaaaaattctcgcctgtgctggtgcgggtggaacggtctaccttgtttcttggggagctggaggacctcagggtttgattgctatgttgaagaacccgggaggcagcggtaagggagatggtatcgatggacttcactgggccaaggacggaaaggagctctggactatgggcgcgaacggaggaga

SEQ ID NO: 1764 - DNA, 33462 bp, Xanthophyllomyces dendrorhous
gaggagaggtctgtgtatgggacgtcggagcaaggagatgtatcaaccggtggagaggtaccaacggcggtgatggctggggtggatttggagctaggattctggaaggaaacgagcgagccgggctgtgtgctgttgggtaagtatttattcacagagcgtaatctcccatgaacgtcgcgagaattaaatcaatcgaacgttgtttgttttcacccatcagatcatccactggaatcgtcaatttgtacgagaacgactacacaaccgaggccgctcctccgaagttggttaggacgttcgacaacatcacgacctctatctcgtcattatgcttcaacccggacggtcaaatccttgctgctgcctccaaggagaagaaggatactctcaagctggttcgtctttctttgactaaactcgttgtactcttcaacatgaactgacctttcatacaacattcatctttcttcgcgtatcgaacaaacagtaccacaccgggtcgatgacaacgttccagaactggcctacggcttcaacacccttgggcgtggtcactgctatgggctggagtcaaaagagcgagtatctcgcaattggaaacaagagaggaaaggttttgctttaccgagcgcgggcctacggtacatattagaacagagaatatcgatggctatatacatgtgtgctttacatgctcttaaatgaatctgcaaattagaagagtctaccttacgtaacgtggtatccaagtcaggagaatcccgggtaagcccggttaatccttaccggttcaaccctccctccatcaaactcgaccacttcatataaatacaacgttctcctttcttcctttccactttcatcagcccagcgttccaagatcttgtctctcgtaaacatcctatcacaaacactaagaatcatagtttattatcatggcttttcctcgccccaagcccactacaggagagaccctcgccatggttcgtgtcgatgtgtcatatctgaaatcgatctgtccgagatcctttcccgcgtcgattcggatggactgattctcctgttcctctcttctcctctcctatggtaatatcgactcccatctgataggagcgagctagccctccatttaatgttcgaaaggtatgtctagttccttttttctctctcttaaatcgacatcgagggtacgttcctttctcacgtgtacttttcgcattctgtgcagctcgccgtcttgatgcacaaaagtgagaaagatctggcaagaaaggaacgatttatggccgaggtaatacatatgttcccttctcttgacatgatatccctaaccaaatactggacggttgtatctaactagttttcatgggaatctttcttatcgcggcgactatagattgctcgaactccggctttccggctggatgatattcacgacctatcgaaggatgagattcgagagagaacaatggaaaagtttgcaatcatggtaggttttctaatggagtttctttcttttctgcttctaatggcttgggtgatgagagcttccgattaatctcttttcaaaacaaacaattaaggtccattacgtgacgaatgaatctttagaaactttcaacctcaggatgcaactgattggtacgttcttggttgaacatctcttccgatggtctactttgacatacacgctaacttggtctgtttactgtctgtttggtaggtatcgccgatcccgctttttgggttcgttttcttctcagaattcgagtgatgaatttgcattgaccggattgtacctgaacgaaatctatctcatccgtagacaagattcggggttcactacggtttgtttttaggtgcagtgagaggtggagcaacgactagtcaattgaactactgggtcagcatttttgcattctctattcggatcaaaatgtctcggcggtgcgtcactgactcgcaccactctgatcactaggtcgagaaaggtgttcttggcctcaatggagttatcggatgcttcggtatgaccgagctagcccacgggtgagtgttctgtttgtggtgagcttctagcgttgagtgaggacagtcaaattgaatgatcatcgttattctcttttatcttgtacatcagttccaatgtggtgcgtcttcttcctccttgattctcctctatatagttgtatcaatatgccatagatcagtaattaatgagttttcgtttctacaggccgggcttgagaccactgctactttcgatcgttcatccgatgagttcatcatccacacccctcatattgttcgtccgttcttagtctgttttgtccattcaagactatcttcgtgcgttctcgttttgacaagttcgtttgggattcttctcgactactcaagggtgcaactaaatggtggatcggaggtgcggcttccacagcgacgcattgtgctgtatttgcccagctggtggtcgacggtaagaaacacggagtcaagacgtttgttgtccagttaagagataccaagtgagtggcagtgattcattcgaggatgaagaacatctaagcttgtgctttcactattttcttactcgattggactgtccatctcaacaaaaagaacattccagcttctccctggaatcaatatcggagatattggtaagaagatgggacggtgagtgtctattcttcctgacgggaccgaggtccatcgataagaagaatatgtctataatttgctcatctggttcttcatttgcatggtgaagagatggaatcgacaatggatttatccagttcacgtttgttagagtacctcgaagtcacgtacgttctctattgatacactttggtttctttgtttgatcaggcctaacattccgtaccctttttttcgaattctgggggctgatgtaaataaatagatgctgatgaagtacacccaggttagcaggacgggcgaggtgttcgagccgccgctcgctcaactcacgtacggagcgttagttggcggccgaacgtcgatggtttcggacagtgcgaattctgcaaagaaggcgctgacgatcgcgattcggtatggagcagtcagaagacagttcagtagcggaggaaacgctgtaagtaatttttttttccctttttccatcatgtttcatcttttctttctctcgagggtagcccatctgaattttgaaaacgttttggtgtaactgttcagatcgagacccagttgctagattatccgattcatcaacgaagacttatggtaaggctccccttccttttttctactcctttctagggttaaggataggaggaaaaccaatgcgtcttcttcgtcctctgttaaacagcccctactagctcaggcgatcgctaatgggtttactgcccataagatggaggaaatgtatggcgagctgtcttccgctttggagacattggaacctaacgatgtgagtgtctgttttctgttgtcctgctttttggtggcttttgttgtcactgacacgatttgcgcatgcgcatgctctataactcagccaaacacccaggatgtgttggacaagctgaaagaagttcatgcgacgtcggccggtctaaaagcgttctgtacatggtcctgtctgagtacaatcgacacctgtcgacagactttaggtggccatggatacagtgcttattctggtttcccctcgatgtacaacgatttcgctgtccagtgtacttgggagggagacaacactatattgagtttgcaatctggtagatccctcatcagtagttataccgacgcgatcaggggtaagaagctagcacccggggtatcctatctggcccgaccgaacgtgtttgaggcaaagtcttctgggaagcttgatcttgaggacattgaccagggttgggcttgcgtagcggcgaatctggtgaggaaggcggcggaggattatgagcgattggtcaaggacaaggggatgacaaaggagatggcgatggaaggttgttcccagggcagatttgtcgccgccaaggtaggtttctatcgtatctgcctggactggcaatatgagaattgtgagttggctgacgatgacattgcttctctaggctcactccatcggttacatcttccggatggtaagtcaagagatccgcgttggatgatgaggaagaacgttagctcattcgacgtacactgtgctgaattttcgttctacctacccttttcaaagttcaaatccgcactcgaagccatcccagcagagtttgagaacgagaagaaggtgttgttggtaacctgcaggctgtatggtttgcaccagatcgaagagcaggccggcggtttcctcaagtgtaaattctttttttgacggcagctttaaatacaagatgtctgctgacaaggtcttctttctttgttcagacggctactttgagagaaaacacctggatgcgattgagcttgaggtgaacgacctttgcgcccagcttcgggctgtagccggtgagttactatacaagcactggatgccctacgagaacggatgaagtctaacggtgttgcaatcaattgcgtcgccctggtggtagtccctgtggtggatggtttcgcgttgagtgatcatatcatcaactctcctttcggccgatgggacggtcagatctatgaggcctactttgatcatgtccgacggtcgaaccctcttccgaagagtgagtcctggatgaaggagagagacagaggaacgaagacggaatgctgatcatgaactcttttattcctgaccagtccatccatactttgaacggctgatcaaaccgttactcgagcgacaacccgcgaccgactttggcgggccggagatgagaaccgagctggatgaggagattgccgagctcgctgctgaggccaagcgggccaagcagacgaatgcgtagtttggatatttgggcgtccgagtgttttagtatattgccaaacattcttattcttatttttgttttcttgtgctctggttgtaatcatcattgatgtctctgtatataccttgttctctgtctggctgaggatgagtgtggcctgaaatcgagacagaagagcaggctcgagacaagagtggaagaagacctggggaagatatatacaggagattgtgagagacactttacgaggattactacagaagctctatatcattgccacagaagctcgatgtcgatatcttggatgctgtacatccataggtcgggtactatacgggtacaccatcgggacacccacaggcagtacggatgatacattgagaacacgcttacgactagactgtttatatgtatattgacactctatacacacatactgtgacacgcacggacgccactcaaatacacatcgatactactacacacacatttcctccaagtgcactcagtgtatgaagagacccaagatcgggaatgtgttccgctgagtcgatctcgatctggacgagaggagagagtcgatggatcgggaaaatgtaattttcaggaacaggccatccgaggcggcggcgaggaggagaaaaaaaagaaaggcaataaggcaataaggcaataaggcaataaggcaataaggcaataaatcaatatggcggcgccggcagagaagaagctaataagccaataagccaccgaaaaacaccagggcatcagggcactagggcgccagtcattctaatccaccggccggtgacgttgtggatgatcgatcgagcgagccagggcaagcctgctgcgcttttaacctccagacctcccaccggtcgatcccagttcctgagcggggagaacgcaagaggtccgtgcgagggtgcgtgctcgctaattcggtctctccaaaggaacaccaccaccagggaaagctgaagagtttgtcgtttggtctcttgtcttgactgctctctgtcgtccatcatcatcatcatagatactcacacttacattcccactcacacatcatcttactctgtacaacgataccattacaagcaggtttgactctctgcttgaaaagatttcgtgaattctgccatcctcgcatggacttgttgcctttgtcaccaggccagcggcggcagcaacttcaagagcaacagcaactccaacagcatcaccatcagagagaccacctccatcatagggattctcgatcggtaagtatcgtcctggccgagtatttctcgttttctctctgtctctctgcctgtttctttttcttctttcttgtctgttcactgtccgttttcctcgtctggtttcggtcaagtcccgtggctcacgctttcattcatttcttctctttgggtctctccctctatcttttgctcctcgcagtcgtctccccgggatctttctgcccaaccatcgtctcagtcacctcgtcctacccagtcggccagtcaagatagctacactcaaattctggacctttccggatatcctcaccagccattccctcacactttcaatatccaaccagagcaagaagtcatgtcgtccaccagatcggccgatccgatcagaactcccgatcagtcatctcccgatcaaaccttgggcgatcagacgtctacacagactctctcccaaactattcctcaaccggtcatgtccaacacaacccgtcccagtctttcgttgacatcgtccgctctttcttcgtccttaccggacacgtctgctctgccttcgctctcactctcgttattcccctcctcctccgtctcctctgttccacacagatcgtccaacctagtggcctgtcctgaaccacatacggaccttccatcgccatcggaaaacagcaaagccgaccgggaagttgaggatgacactgaagcagacgacgaagaagacgaggataacgataatgacgacgaagacagtgagagagaacacagacggtcgtttaaacggtggagagatcggtggaaggttgttcaagattgtctcaagtggtgcgctcgtcttctttctatctgtttattctttctttgttcttgtctcgttgacatagttttttgtgttttatctgtcctgccttcccacacataccggcatactcataaaattaattcaccactgcatccaatctctcagtcccctctgcccgccggaccacctgttgactcagccagagacgatcgtatgcggtcactcgatctgtcacctccactactcgctcgcaggataccgatgcccggtcccaacctgtttccttcctccacagaccatcagaccggacaccttacacgctcagtttaaaccggatgttatcctctccaagcttgtcgagcttgtttcggcgagagcaaaggcgattgccgagggtaggctgatcgagatcgaaggttctctttctgaaaccggagaggaaagcgaggtcgaaagacttgcgctcggttcatccgatctcggtccctccgcgcggaccacgcccaacccttcgccgctcggccgatccactctcgacccatccacatcgcctgtggccgaaagaccctcggcagccaaacgagccaggcgtcatcaacgtaccttatctgcctcctcttcttcttcttcttcttcctcttctttcgcagcgtacagcacacccactgtcggtcttcatgatgactccttgcctcggccttcttcttcttcttctgtcccactcttgcctttgccctcctcatccaacctgcccctcttatctaccctgcctggttcgatctctcgatcgccctctcctgcgtcctctgtgagcggtcgactctcgcggacttcgtctttaaaccgccaaccgacgcatgcagcatcctctaggaaaggaaaacctagaatgaaacccgtttcgcccgctcaatcagtcgattcctccgccgatcatcttcgatcgataagaccgacgacgaggacaagaacgaggacgaccaaaaagtcgggcatctcagtatcgactgttggaaaacaaacggacagctcgtcagacacgttgggcatcggaatgttcgaaagagatctattaggtctgttggaatgcgatatttgtgctagtatcctctacgagcccgttactaccgcctgtggtcatgtatgtttagtcttttcactcctcttattctttcttcctctcttgctgacacaccatactttttgacctttctcagacatattgccgatcgtgtttgtctcgctcaatggatcattcgctcaagtgcccgatctgccgatccgatcttcagatgatgagctctcgaaatatggccctcaacaaagtccttcatgtcatccgtaagtttatgtcctattacagtcggctcaaccgcctctccatgctcatactttcctttctccagtcaattcggcgtttgcagcagaatgtacagaacgaaaggcgatcctggatcatatcgaacaagaggcctcacaagacactccgatcttcgtgtgtacactggcgttcccacacatgcctactattcttcatgtctttgagccaagatacgactttccttgacttcttgttgtaccaatttttgatcaaccttgaatgaatttccttatgtttctcctaattttttcctttctcgtagataccggctcatgcttcgtcgatgcattgagtcaaattcgcctaggtttggaatgacactaccacccagaccaggctcgggcgtcaggtatgggaccatgctcgagatcagaactgttcaggtcatggccgacggcaggagcatggtcgagactgtcggtagctggcggttcaaaatcttggagacttctactctggacggatattctgttggcaaggttgagaggttggtctttctgctattctcatgttacgtgacctcaccttcgctgcattcaaccacacatatttatcgctttttgttttggggttgatacaactctcgatagaatcaacgacatcacgttcgaggatgaagtcgagttggaaagagcagccttagtaagagctaccgccgctcgacaagcccgattgcatgcctcgtcttcctcgacctcggcccattcttcatccattccgacctcgtcgtcgacagaacattctttgcgaacagacatcggcgaagatctcattccgaccaccataccgacttctccgtcccgaacgacaactcgaccaaacgctcgctctccacatccaccccctccaccaggattatcatatccggaaactaaccctgatggaacactcaaggatacaccggcggatatgtcgacggtcgatcttttgctcatctgtagatcgttcgtcagccatctccgctcaggaagcgcgccttggttgctgcaaaggttgaacaacacgtacggaccgatgcccacggatcctagtctctgtagcttctggatggccagcgtatgtccttttctcttcgctccttttctgccaatatcactgacgggtctgagcatctcttttttccatctgaacaggtcattccgatcgacgaattcgaaaaggcaaaactcttgccgataagatctccgaggttgagacttgcgcttgtcgtccattggattgaacagcttagagcttcttggtggttctctaggtgtgtctctttctctctctctatctttttctttctcttgtcggttatctgtttgtttgttttttaattcaagacgtgggaagagatctctaggctgactgctgtcttcacttttgtgcaaatagcggttgcgtgtgcaattagatccccctcttcataactcattatttcctgcctttcgactcccttgctctcaatcggttcattttacatctcagtttcattcaaattcgatctccccatttgatttctttcaattcttccatttttgctcgctcgtctcgactggaccttcctctctcatcctccactcactacctcatcagctccttctcgtttcttgttttcactctctcttcgtccaaatccaggtttcgattcatcaatctcaagttcaatccacgggtttctctttatcttctgacgtctgttcgttccatatagccagctccaagttgtataccttcatcaaacccatctgtcttatcgtttcccttgtcctaactgaatacgaaatacaaaacatcaaccccttcagcttttttgcacacgtctccgttctgtgtttcgttaaacctgccttggctgcttctgctcgatttgaactggcttcctgattctctgattttgaagatgggacgtcggttggtttgggcggctttgcgagtgacgaccatgtttcaacatcttggattttgtgtgccgtgtatcttaggtatcatccatcgctcgcctatcttgatagttattctatccagctcggtgaagccggctggagttacgtatgctcaaaatttaatgatcatctagtggacaacagaattaaaaaacgcgaaaacgaaaacacaaaggatgttagtacagaggctcgtttcgactttgaaccgagtccggtcctccaatgcctgccgttcttctaatgtcaaatcgtaagacgggggtgactcgtggaaagagggaactcacttcttcacccggacgacctcctagattgacgaccgttcctttccaaacgttcttatcgtccttctcttcaccaccattcgaaccatcaccgtctccctctggtttcgaggccgcggaaagaacggtatgacgggcatcccactcgatgaccgacggatggactgtaactctatatgtggttttccagcacatgttcgttcgttttcccgatcaaccaatcaactgatcaaagaaccgatcgaactaaagaaagaaaaacaaacaaggggagggagtggactgactttgaaggtagaaagttcacgatctgtaatgtttcgagtgacgtacacctgtttttatttcattttattttatcccccccgagcgcccgaagttccgataacccagaaagaaacatcacatagcagaaggatgacaagatacgcttcaggactctctgtatgtggggaatcaattgaacgaagaagggacgataagaaccttgagaccgcaacgtatgtttggcctggtgatgccatccggaaagaaaagaaaaaaagagaactcgatcagttcgtaccgatcaaatcttaagaacgacgttgcctcccctccttaagtcttctttcctgactctccagcgttgtcttcgtcggcgcgcacaacgtgagtaggagaaaggaagagaacggacctttttcgaaagcgcgagctaggtcaatctttacccttgagagtgtttggccttggctctgtataacgttccgatcgcccagtgtggtttgttgttattatatttcaatgagtaaaaagaattaacgttagcatcttggtatgttgtccagtgagcgcaagagaaagagggggaaggaacgataaagaccttgtgaattgacatggcccctttctcattggaaaagattaaccagagaatcaaaagttcatcaaaaacatgcgtactgaaagcaaaagagaggagatgatggaaatgtcgtacaggccagaatcagagggacttgtcgtctggttgcctctgttatgagttctcctttcgtgaagcgttgtactttaaagtctattggaggcatcaacatcttctgtcccgagacaaactttacgtgtaggaccagatcgaaatatcaatttgagactcaataaggacagggtgaaacgagaattcaagcggaaagaattgcacagacctgaacaagaggccacagacgttcatcttctgatgaaggtgcgttcgctggatccctgaatgaactcaactgtccgtcccactttccctgcctagttgcaaccgtaagtaacacagcgaacatcaccgcttccgagatacttcacccataaagttgaccgaggcactcacttaacaccaaatgcattgtacatcttggagtcttgaacaagcgcattgatctttggttgtccaagccgagctctcttgttacagctttcaccagtggtctcttctggttcagtttcctccaacttagcgacttcaatactgttatcacccactgaacagaccccacaaagaaggaacgtcaagtcaacacaacacataggaggagatagaggagtgatttcagttcagcagttggcgtacaggctttctcgattgactgaaagtcgatcaccttccccagcgagccgttgaccagcttcccgttcgtcaagttctgttcaccgtccaatcagctgtgtgtttagtcttcactggtgagagaaaaggaagcttatgagcactacatggtgtaacaagagatttctcacctgaatgagcatgacgaccgctccgaccttgagagtgagctttttgatggctctgcaatctttcaatagtcgatcacatcgctctggtgtgacaagacggtgattgtcgtctttactgaatataacggatccattgcctatggtgagtatgccgacatctggacacatacatatacacggacactaacccaaggatatctatcggttcaaatcagtgtatcagttcaaggaaagcttacagaagcgttcaagaataacaactgaccttcagccagaaatatatgaggcgatcccggcaagtcatctaatctttcatcattggcggcttcgactttatcctttgttggatatcttctatgcagaaggagacagatccagacaaatgagtaggtcaagtgattatcgagaagtatcttacatctacatacagttcggaatagatgccatcctcataatcaatctttcttttgagactaaacaggatccgtctggcttgtttgtcgagctaatgtgcgcaaaatcggtccccactcggacggacacggacgtgagttggtcatcctgtgaagagagagctcggagaaagagcacgtacttgacccttcctcatttggtctaggacacgcacgaacgctgataaagcaccaaaacataagaccgcttgctctcttgcataggagctcaactttaggagaaaaataaacacacaccatcatctttctgccggaaaacctagcggagatatataaattagccacaaaatcaacgatcgtctcgtggagaaactttaagtgcaaagaaacaaacctgcttcaaagcaattgttttgggtacgcatgcatcccacgtgagggcgttgaacgcgaacacggccagcccgtcttctggcactggtggaagttggaagaaatctccaaccaaaaccaactgtaaataattcagagatcttctcggacgaaggatgaaaaaatcagatgcatccccagcttacttgaatccccccgaaaggctcctgattccgtcgtgtaaatcgggcaacatactccaacttgtcaaagaatcgtccatcgatcatggatatctgtgaacaacccttggtatcatcagcaggtgattcgagaaacacaacggctgtggaacatacttcatcgatgatcaggacatcagtgcttcgccagcgttctaaagctcgacctgtttaggtcgccgagatgtgacaaggttgttcgaataatgatcgaatataattctgaagagatcatggagaggggacgtgagcgtacgatgattcttatctctgtgtatcccgaaggttgaaaggcgaaaatttgagattggccacagatgctaggatatatttagtatgatagatctagaaggtcataccgatgaagcatgttctctcccagcgtcttggcgtcttctaaacccagtcctactcctgcccaagaatgaacggttcgtcctctgattccaatagcagctatacctgtcgaggccgtcactgctacttctctacgtgcccatcgaagctgcttgatgatcgctttgagtaagtatgattttcccgttcctgtcatacgagccgccgagtgaaagtaaggcgacaagaatcccgcatcaggtatcaggtttctagagtccgaggccgaaccagagacacaaaagggttgttcacataccggcagatcctgtaaagaaaacactagttccttccatgactaggtctagtatttttctttgctcctggctcaatgatccagagctttttgacatgtctgtcctatgcctaggctttagtatcctctctggatcatccgttgaggccgcttttgagattgaacactgttcttccagtatatcataggaagagtccacgtcgatcgagataaaggaagtgggtttataagaaggttctactggactttcttcttgtgaagagtcctcttcctcttttgccttcatggttgttcatgtatgagtaggtcgaactttgttctttttttgatcgctcaacttttggacgcgacgggactgtgtgcgtcgataagactagctgattagataaggatcagccaatcggcaaatatcacatctttgcgcaagcctgttgcagttactttcaaaggcaagagagaagcctgaggctgcatccgagagagagaaacatgtagaattctatattgatacacctggcattgaaagaagcagaagatacaccgaacgcaaatacatttccaaatctctaccaaccccctcgacatcagtcgactttccagaaatagaagggaccagaaggtgattctccatccgttgagtttgggatagaccaaactccgaagatccctcgtcgaccacctaaccctccaacctgaacaccctctagagaccatcgatcctctctgtcgtagctgatggtaaacctcgctcgaagctggggaggtgagtcaggtgaaaggaagaactcggctcgaacctcagtggcatgatctggactagacatgaatgaagatccagtgtagtgaagaggatgaaattttgtggaaaatggagaagatgaagaaggggaggtgccaggtgagctaacagaagacgggagtttggatttgggttggcttgaagcaggaggattaagggtcaatgtgagattcatcaaatcgccagtctgtaatccagattaaatcttcgtttagaaggatgctacgccatcctatgattaagagaacagagactcacatgttcctgttcatcactcagtagtggaggaagatttcttctaactgtcctaggataatttctacatagaccattttagagtcgtatagccagaaagaaagggaaaatggtcaggacgggacaagagaatgcgccgcacacgaccaagaatagctaacagcatacgcacagttgcatgaatactggataatccaagaaagcgtacatccctttccattttccacctgcgttcgcccagtctccgtcgtttttagtagatgtaccatcggcaagcccctttggacgtgcgtgctcaatgtcccaaggcaacggctgcccaaggtctgcctcgagaacatcttggaagtctgagatgttgtatctcatcagagtggagattgagttcaatatatcccaattgacggtaccatccgcattaaagggtccccgattgggatacggtgagtaggataaaacggagtaagttatcttccgagcctgtctaacgagtacgttaggtgcgatctcggtacgtggatcaaggtgaagttgaaggatagtcagaagtgtctgtgcctctggcgatagaggagggaggggaggagaggttggcaggagccgtttggacagggcttggatattctttgacttgtggggagccggagcagcggtgtgtaacaaacgaactagagagagaaagactgatctgaacgtgatctggtttgatggaactcaatcgaattcagttcggcaagatgagagatgatcagcactcgttggataaagatccatcagaaagagcaaaacgaacaagaagagtggtagaatggtatcttgatatagagatgaaggtgatagcaaaagagggatagactcacctctttctttggatcatctataaaaccgttctcccatcgattcaatgcttccaccgctccttgaaggttttgtttccaatcataagctttgtttccattggatgaactgtccgacgagtccatccctggatcaattgcccaaccactcgtccgagggtcgtcaaacagatttagataaagtgatctccaaaggtaagtcgaactgtcgggtccatagatgagctctctagcctgagagcaagtctgagcaaaacccgagaccgattccgtaggaagcaaggcaagaatctcgaccagaatcttcataatgtccagaaggtggccgaagggtttttccggaagtaagaggagagaaggatggttgcatgatcaaggaagagaacattacaaggatatcagtacagtgcagcggtcatgacgctgctcgactggaaatccgtcagccatcagccatcagccatcagccatatagaaaagaccgtcttacctccggaggaatcttaaagatggttggagtgtccatttagattgactagcacgacggaatggttggtaggaccaaacttggtagatgagcgttcttccccgaccatggaatttatgacgacgaatttaagagtggccaaattccccggccagcgccgaacagatgagacctccactttggaggactggctctttctcttcatccttcgttctacaatccttgctctcggaatgttgtccaggtctttgtctcgcacctatgtagcacctgtgctcagtggcacaccatctggtttgatcaccagtagattggcttcctttcattcctctgccttttcctcgtccttgccgccaccgtcatctgcaccaccaataccgcagaaaccctctgctgaagacgaatcagctgaaactccttccgcttcggcccacctatttcagcaggctctagaagaagaacgcgtatcgaaaccttctaagcctagtgtttcctccgctcgattgctcgccgctctcgaggaccaaccatggacgggagatgagcctctcgaagcgaccgtgcttcgaatgctagtcgataaacacaaaccagctcgatcgggcaagattcgctcatcggatgacaagattcgtgaagaagtccaaaggggtgcgctgaaacgaatgatggagtttggatcgggaggaggaaccaaggggatgggaggttcagctattgaaggaggtggcggacaggaacgactaccgactacagatagccgagtcgactttgttccccgagtggcaaaagatgggtataccagagtagctggagctgaagaagaagaaccatggccgggactgaaaggaagcccagatcatcgaccttggcattcgacctatgtttctcccactctcgctacctctcctctcatcaaacggggaaacgtcacatccgatcagccatcgtccgtcgaacgatcggcccgatcaaattatcagatctcaacggatcctcaggcaagagctgcccttcggagggccagaaagcttcaagagggcgccgttcgactgggtagagccagagaaggggctctggactatggactcggaggaggtgagtgggcagaaaaggacgaggcccatagggtcaacacaaaaggaatcggtaaggtcggagaggaggatggaatgggcggaaaattagaggttagagttggagctggtgatgagacattaggcgctgggtggggatcattggtggaactaaggatagaggtgcgtctcgatgcctgcttcatttccaaattgttctttccttccatcgaacctggtctgatcaagtgaacccatctcaacagagagcaagagcggagggacatttcaagaatcttccaggacaaggcgctcccattccgcatcatgtcgaacagcataatcccttcattgggcgtacggccttctttatgtaggtcaactttctccccagttgaggatatgtttatcgtatatgtggcactggcatgggagtcactgattctctctttccgtgatcaaattaaggaaccggatcgtccagaagaacgaagcgcttcccatgtggatagagtaccaaaaaggtaggcattatcgtcctcttctccacttctcctcttcttcttcctcctgaaacgagtctcatctgatcgggtttctccgacgttctccgtatgtcaaataaactacagagcacaccaggaccatagaagagtttcgaactcggctggaagactttctcgtcaagcgattacacgttcatccacggctaagaatgagtttgagccctgagcagattgctcagctacgagtagctgacgtcgcggagaacggtgcagagcgaagctactgggaaggatcgctgaaagaagtcaaccaggttggacgaagggcagatggagtagcgcgtgtgtattcctctcactctgtctgtatgaattatcaagatccagggctgaccgaagctcacactatctgattcgtatgttcctatcggatttctcagcgccaacggctaggagagggttagtatcattttgcttgatgtcttctatccgaacgacgatctcaacttgactcatctctttgcttttgatatcgtagacctctctcgatcgaaccagagatcgaacgagcctatcggacagcatcggccatcgtacatgccgagctacatcggcctcttcctccacctgtcaaagacctcgacaaaatcggatccgacaaggtcagttggaagatggatcttccggactggatctgggaaagttggttggtcgttctgatccgcgggttgagagagagtctgtttgggggtcgacgaatgcttaattctcagggggtggaagagtcaagaggtactcaagaggggaagaaaagctagttagatatcttttcaccagatatacactcgccatatataaaacaacccaataagagagtatcgaacataggtctcatagcgagattaacacccccattgggcttatgtataagacggatagttgatttatatatataaatgttagggttaacccaagaaactagaacatgattcatgtcgaggcgtatctacaatcatctgatgatcatattagcataagatccattcgaaacaatacgcaggaataaccaagcaggtcttagttgataacttcggatcgcatggatgaaggcttaacacaaagtctgccttgatcgccatcgccaatatcagtcgagtctagtctagtctctcatgatcaatacagaccacgcgttggttggagacttcacagaaaacatctcggcgactgaatggcaggttgaatgtctcacaaggggaacctaatgaaaggaggtgtttcactctcacattcactttgcagccttggtgtgacgtctctatcagtcataagtcaatggacaccagacgtctacaaagactcgtttgaaccagaggtaggaccaaatgtgccgttcgattgtaccaagccgttgtcaggaccttgtatgagcaaactcagaggcacacacaaaaacatgtaaaagagtatgaatacctccaaaaagaaaatagatttgtcaaaaagaatataaaaaaagccaggaaagatcgagtgtaggaaaggacgtaaggctagagatcgtcatgtaatggtacttggaatgtgaagaaggcgagctcaggaaaaactcaagaaggcgaggaggcaaaaggagaaaggctgagtgaacaaggggaaaccaaaagctttgtcaaccgttcgtttttagattatccaattagtttcgtcgcttgaggttcacgctaagccactcgagacctgagagtcgtcgcacgaagaacaaaaaaggactctagattagttcatgaatcatctactccgagcgaaacagagaaatatcgtaccctcgtaaagaccgtcaccagaggtagcacaggtggcctggatgtaccaagtcctctgtcgaagtccgtgaagtccaagcttgtcggtgatctcagcagcattcatagcgttaggcaaatcctaaaagaaattgaatttaagtacaacacgtttgtcagatacttatcaaagagaagcgacgacgcgaagagggatagaatgacaaacctgcttgttggcgaacaccagtaggagagcgtccctgagctcgtcctcattgagcattcgaccaactacagtatgtgtaatgatggtaaatcagatactcttgcgtatataaacagctgtttagcactagtatgaaacagacatacgctcttcacgggcctcagacactcgatctcgatcgttggaatccaccacgaagatgataccttgggtgttctggaagtctgtaggataaaagttgatagttaaacacggtccagttctgtaaagcggacagaagcactgatgacgttctgagctgttggaaggaagaacaacaacttacaatgcctccacaaaggtcggatcttatcctgtcctcccacatcccaaacagtgaacgagatgttcttgtactcgacagtctcgacgttgaaacctagagattgtggcaataggtcatgtaatcagtaaatcgtcgtgacgagagttgagttcagagcatcgtgttcgtgagtgaggtgcgagaacactaaccgatagtgggaatggtagtgacgatctctccaagcttgagcctggaaaaacgaggagtagaatgtaagactttgcagtgggcgtcgataatgttgcaaacttaatacttacttgtacctggaaagaagaaagacgagagaaagaaagtcaataaagtttgagatctcaatcgactgccccaaccgagttgttttgattccaatcaagacttacaagatggtggtctttccggcggcatcaagtccgaccatgagaattcctgtaacgatcacccagtgacaacaattgaaagtatgttgtgagaaatgggagctcaaaggacgacatggcgatatggaaaaacatgcgggtgataggcagatgtggccgatggagagggactttctccaagacctcatctctcacagaaggcccgagagggtcgatcatcaggatgtcatccggttaaaaggagaataagatctccagacaagagcaatggaaaagggaatggaaagcccaagattgaaaagagatcttgtttgtttggtgataaagatctacgtccactatggatagcctcgtggatatcactatcattctctacagtcttgtttccttcccaagactaggtcggcttgtatgaagcctgtatgctctgagaaatgcatatacagaaggtctagccagagatccaccatgtgtctgtcggtccgttccacccagatcggggacgcgaaaaaggagatggcaggcgaccagaagaaaaacatggtggaagaaaaaaataaaaacaaagcaaagaaaccaaagacacgtacgcatttccttcttgccgaagaggccggagaggagcttagagatggagagtcccattatgaagatggatgtacgtggatgtgtgtgttgtgggaagaaacaggtctgagaggatgtgaggtgcaggtgtgggtggaagggagaaggaaaggaggggaggaaaagaaaaaggacaagattcagggcggacgtgtgttggagccatcgcccgagctcaagccgcccaacgaggtttgcctccgaaactccgaatgggtttattaggaattttgttcttgtttcctaatcggccattacaaaatattccctaatgtcctcgaccggtcgtcttcctagtcactcactacacacgttttgtagtgtgcacactacgacttttcaggaacaacactcaaagtacgaaccgactaaccaaccatccgactaactaactgactggctgttcaactaacccttctgactcagagtgctcatggtcggttcagatcctatcatgttgagtgtgacactgatactcttgttcagctggctgagcagattctttccttgctgtacccatagaaaaaacacgtcgacgttctctttcttggaacatcagctggaggcggtccaacccgatcgagaaattgctcctccgtagcccttactcaagatggaagatcgacttgttcgtcctgtttcttgttgaggtcctggcctagaagaaccatcggatttgtatatgtgtcctttctctgtcatcttagactaacttgttgtcagatatctccctggctgtcctacttgacagtggtcgactgtgctgatggaacataccgacaaatgatcacgttcgggttcaaaccctcgagcgtaaacacaatattaatcacacatcttcatggtccgtttgtctatcgggatatttttctactcatcaatcaatgatcgttgatccgactgaccaggagcaaatgtgacgttttatccaggcgaccatgtcttaggtcttgtacctctgctggccagcatcctatctggcgtgtctaattcgaaagagttcgttgcaacattaagaacacggaacccgtctccaaaagtatgtcgtcccctgtttcctcaaacaattatccggccgtgttggcctatcctcattatgttgatgaaaccaatctcatcttcatagccctcggtcaatatctatggacccaaaggacttcgttctcttgtccgaatcacactctccctcacctcgatggagcttggcggagtatatactgttcatgaactcttactgccaggagaggaacttacttcgtgcgctgcagaagacatgcatctaaacgaagtcccagggaaaaacattttcaaaggcgagaatggatgggaaaacatatctgacgatagctttggtctggtcatcgacgcaggagaaatccttcatcgtggtacgttcaaaccgaactttatcatcctcaatttatccaagccatttctaggctcgtctcgcttggtcccatccttgactcactcgtactgtgctgtcaatttgtcatcggttacgcgcacacatgtccgatgcttcagtaacttctctgggctacgtccttcgttatcctcgcacaccactgtgcgtacctgtgacatacctcgcttcactcaaacagcatggtctctctcctgcgctacttggaaagatgctcagaacgggagaccccatcgaactgccgacgggtgaacagttaaatcacccagggtgggacgaaggctaccatatagccgtccttggagatacgtctgatgccagtgggatgcttcgactagctcggggagtcaatctgtatgtactcagatgctttctgatagattaaccaaacacacaattgtcttctcgtcctccgctcatcatttatttcgtctctctacctttcaggctgattcacgagtgcacaaatgcgcacataccaaaagatccgaacagtatcacataccccaattcgaaaggcatggcacaaacgtttgattctattcgagagaaatcagcgctcagaggacattccacaccagacgtcgccggtggttttgctcgggccatcatggcaaagcatctcgttttgaacgtaagtactgagatttttcttatttgattttttttttgtttccgcttgttaagaaacccctccaaggacaataccaaaactaattttggcgttcctattctttggttgaccttagcatttttcaacaatgttctcgacctcggaagaattttcacagatcgctctacaagctcgtgttgctctactgaacacggccgctgttcccggaagtgacacaaccaatcatagtgatggcaatgatgctcaaggagatcaggcagatccaggccgacgaaaggtcatttgttctgaggatggtatgcgtctgaagcttaaaagtgtaaagggggttcgtgtagatgaagtcgacgtagatgatgtgttggagatcacaaggtcaacctatcagagttgatagatgcatttttcaagattaaaaaataacattatctgctcatcgaagagatgcgacgaaggactcgaacacaatattcagggtcaatacagatactaagaccaagctcataacacatttatgataacggatacatgatgaaactttcgtgtgatttgcagattatcggcaacttcaaactgagacctcaggcagaacagcacggacgtagtcgagtcccaaccaggcactcgcctcccatggtctcagcatgatagccctctgtgcgtcactcttcgccgacatcttagcagcttcctcagcagattggtctccaatagtagcagcagcttcagaggcacctgcaatcgctcggagatgtagagcttcccaaccggtttcaacgtctccatcggtagcgtaagccgctttagcgagacgagatccacgcgtagaatctcgctgttgaaggtggagcttggagagcgcgagaagcggttgggatgacgatgggtacagatgagcagctcgagtgagcgtagcctgcgcagtagtaagatcgttctacaggaacataaatatgtagagtatcttagatcccacatgactagaattcatagttgtaaaggaagaaggacgaacctttccaagatgatgtcgaaccaaaagccagtccagatcatcattaggatccaaagccttcttcttgtcctgaggaagtccaagaatctccgacagagtggcatcaagaagggcagagtctgacgagagtgtggctacagcagcaagcgtagccacggcctccaggttggtagagtttgatgagacactgttgaatccagaggtgtgcgttagtggcactaattactcgaaaagggcaagtcttgtttcagcgaatgataaaaactcaccactctagcaaagtctctttggcagcttccttctcgtcagtaccaccgagactccataagacccgagcaagcatgaccgagacctgatccttcatcctgtccattgggtcttcctgcaactcgtctaaagcggattggaacatgtcgatactctcgtctagctcgccttggaagtagtgagccagaccagatccaaacttagcgtgcacccgtaatcgacgggcttctttctctgtatcctccggagtaacaagtccgagggtacctgagaacgcttcaatagaggcagtgtaatcaccaacagccaacttgagtcgaccaaggttggactgggcaatagcgaactggcgctctgttgtcggatcttcagattcttcatacacggattctaaaacatccacacacttcgagatctggatagaagcggcctcgtagtctccaagacgttccgagatgagggcaagcaagtgaagagctgtagcatccttcggccgctgttcacagtatcgttgaagagcaaacattggagcagcgaggatagactttgaaggaggacggataggcgcggagaaaagatcgtgagtggtctttgagaacagaagatttgcttcaagctgagaaatagcaaacaacgagcgggttaaaaattcagcaatttagccagatcgcttttcgaacaatatatcaagtatcaacaactaaccaaagagtcattcgacagctccgcagcatgttcgaagaacggtctagcatcggcacttcgtccagctttcaaggtcagaataccctgacccatccaagctagagaacaatcaggatcaatagtctgggacttgaggaacgcctgagctgccagatcagtatctccatccttgagataaaggaagccaagattgctccatacaatcgggttctgacgtaaaaacataaaacgttatctgagctgatcagaatcacacagaagaaacgccacgaaaaagactacataccttgtggttaatctctagagccatgataaacgcgtgttgactaagccgagaactggtttcaaacacaatagttcctagcgagacccataactgctcgtccttgggtcgaactcgaagcgcagccttgataacgaacgtggccctcttgacgcaagccttcttgacctcttcctcgctgtcgggaagcgagcatccaagatgatgcaacgcaatagccatgtcgtgcgaagcagaggcggaggacctatcgtctccgacaagaagctggtgcctataagcataagcgcaagccgcgagcctgaggatgaatgaagcatctactttcgaggctgagagaagatgtgcaggagaagcgacaccatcaatagatgcactaccagcctgatcttctttagccaacgtctcgacgaaggggaggaccgtttgcttgacctgttcggtgttgaaggaaaaggccaattgagatagatgtacgcaagcatccgccaggagcttccaagcgatagctccaaacccttgtttggcatttagaatggattgcacggtttgcaacgcgtgaataaacgagctttctgctcgagcgtggtaaccagccatagcttcctctatagcaatcgctatggaagaatgagccagagcaatgagcactcccacctcttctggtcgggttgttaaaatcttttcgaagcattgaaccgattcggaatggcttccgagttgagcatagacatctccggtcacgaaggttacgagccagttatcgggctccagttcagacgctcgggaaagagtcttgagagcggcagcctgtttgcccgatttagcgtaagcttcactgagctgaagccaagaggacacgtccgtggggtcagatcgaagggcaatctggaaattttcaattgctttggcgtgtgcgttccgagtctatatatggataacacatatgtatatggtttcagtatgattgcatatcctttctaagaagtccagatgggacaaagatagacgaatgtcaattcaacttactaaagctacagctcccagagccttccaagcccagacgttttcaactaaaaaccttcctttcacctctctctctcgtttgtttgctccactgttctctaggccaccctcaagtccaccttcaccctcaatgactcttttagagatgatctcaaccagttcccactctttagcatcggcaaaattatcagccagtcttttagccgcttcgccttgtcgggggtcaagctcaaaggcatgctggaagcatcgtgaagctcggacagtgtccgaaggggaaacaatatcggagtagtagattcctagagaggtgaacgaaggagcataggttgggaagtgcttcaaggaagcgacaaacaaatcgtgtgccgtttggcggttttctaaacaaattggagacaagatcgtggacaaagaggaagatgtcaatttctgtaaaccgctttgaacagactgatcgaaattcacataccaggcgtcatctcccaggcacacatgcccaacttccagagcactctagccctttgctcgagagacctctcgtcctcaccttttctctctccaagctctgtttccagtttgaacagcaaaacttgaccctctttgtgttctcccagtttgaatgagcaccaagcggcctcttctctcgcttcttccttcatctttccctctccattatctaacgttgctaacgccttatcgaatgcgaccttggcatcggcccaatcagctctggcctctaacacataagccttgcctatcagagctaatgagtcttctggtcgagtttcaagaacaatgtcgagaagaggttcagccgtaggatggtgcttgggcgcatagaagtgcacgtaagaagtcgccaagatcgtttgaaaggctaagcgagactgagtgaatttgatgccaattcggcgctccatggaggctaccacggagagaccctcaagagaagtcgtgattgccgattggtaatctctttcaaacaaaaagatttgagagaggattcttcgacagaggagggattgaggggatccatcgatcccgtcctatggtatcaataagaaatcaatccaaaagaagtacatgatttgcgaaaacttcagcctccacgccgccatttgcaaacgaatcagctgcttctgacttacaaacatcaatttgaagggatcctctccagaaggattcgttgaaatttcctcagtcctatctgtttcggcgtcttttttgctcttgttcttccggcccttcctgtcttttccggtctcgttatcttcaagttccgggacgtcttcgagcccgaagtactttaagtatcctcgcataaacaaagtgagatgggcatctggaaatagatcaatatatttcttgaagtgggtcgtaggatattgatctagaatgtccgcaggattataccaatcataatatcagatcgaacgttctccgtgagaagatgagaaaaaaaacggataaacgtaaacaagactgaccaatcgtctcccagtcaccccattccaaatccaccttccaagcatctctatcgttcgattcgataaggactgctcccttcgcgaggtcttttacttctttcctttcttttgccttatacggggaagtgatagggagcgcgtaaaggagcgcaagatggaaactgaacagcttctgctcaatctccctgtattcctcgagcgctaaagaagggtgatttagcatgctctggtacagctcaggtaaggttgattcgaccgcattttcagcaaagacggcttcttccacctgactctttgtctgtggttttccaccgccaagtcgcatccgacgcttttcgacttctttagcgcgtatctgaaggtcttccttctctgtaagctccactatctctttcagaacacaaagttcgtcttgaagtactgtttgaacgtattgggtagttgtggatgtcggctcgctgggcgtcgggggtggcaagagggaaagagtatggtagtacggagatgaggaccgaaggtaggacaaagcggcaatcaactaggtattgcatagataacttgagatcaatctctaaatcgtggactgaagaacaaagcatcaaaggtagagattgagccttacctgaattcgagtgccttctgctcgagtcaattcaatgagtctttgaatagcctctcctaacttggtactctcctccctgtgagatgtggatcaatcagcatcaggatttttgtgtccaaggtgaataacttggtcttacaattggtcgtagattttcagttgcctttcgaacacgtctctcagcttactccacgctttctgcttcgtatagaaatcagccaaaccctatcgtcatcgtcatcgtcattaaaggagaaccaaagatagaaagaggtttggttaatctgttgagcggcgacaacgtttagagattgtttcttttgtgaggaaaataggaatggaacatacctgccaagcagtcggaagatctgcagagacaactgtagcttttcgatatgcctataagatcataaagttcaagaaagaaatacttagcacatgatggtctcagtaggggaaagctatcgatcagaaagtatacttacggcctcactctcattcaaattacccgtatttagattggccagacctaagaacaccaagctgtatagataaaagtaatcaaccaaaaacaaaagacaagaaagaagaaggcttaagtatttccatctttgcaactaaaaaagggcaggaaaggagcaagcgacgtacgcagtgtagttctcaggttcatgctccacgatctgctctgccagacttctaacagttggccaatcctttttcgagatggcttctttagccgattttagtttgctctttgcaaacgatgagctcatctaggtgtaactgtagataaatacggcgacggtggtggagagaaagaaggaatcggaggaaccgatggaaaagacaatgtcgatgacgggtgtagtttgttgttgccatgacgacaggttattcatcctttttttttttaccccagttcacctcttgcggtctctaccaactttctactcaaaacctcgttcgaaagaaaagggaatatatgtggaggccttgttttcgacaacccatccttaatatcgttctcaacaaatctacacccacatctaaatctataccctatcactcaacacgtttgatgtccgaccgtgtttgctctgaaccatctgggtttacgactcctctttcttcttcccctcctctcaagaaagctcgactaaacagtccctcgataacggtggcagtaacaccaccaccattattactacaacagcctacgattatggaacccggtgcaaacccttctgccgctcaggatacgaatggtgcaagtgaacgaccgatatccactgtagactatcgaaacaaggcctgcttggctcctatggtcagaacgggaacctgttagttcaagtctttgtccgcgcgcttccgttagtaacaagagataccaaagtatcgggttgacgttctaacatgttctgctttctttttgtgtgtgtttcggacttcctccagtacctactgtatgttttctcttcatgtttccagtacccttctgggataactaattgaccaagggtcaagggctctcatttcggggatgattgacacagcgcttgctagctcttcaatatggatgtgacttggtctggggtccagaaatcgtcgacaaagctgtttgtcctgaaaggttcttccggctgtctctttattgtagttcatggactgactctcaactccaaatggtcttatccacgggtgtgtagatgatcgggacaactagagtggttgaccgtgcgttctgttcttgcgcgtatctcttgtaataatcgaagattgaggtactaacaaagtctgaccttctcactgcagaacgaaccggattgatcagctataaccgatcagacaagctggtctggagtacgcacccgattgagaagccgtatctgatttatcagatcgggacgtccgacccgtaagacctgttttatgtgcttttctcttcacaagtcttacgtattgacttgattcgggcctcaacttcacatcattctcttcacgcgcgcgtgtatgacagagaactcgcggtgaaggcggcgttgacggttcaacaggacgtgtccggtgtagacctgaactgtggatgtccgaaaccattctcgacacattccggaatgggggctgctctgttgtcgacgcctgatctgctgtgtagtatccttcgagcacttgtcggcgcactcgacgtaccggtgagttgcaagatccgattattgccctcgcaggaggacacgttggagttggtcgaccgggtttgtcagacggggatcaagtgtctgacaattcacgcgcgaacgagaaacatgagaagctcggagaaggcattgatggaacggttgagggatctggtcgaggtggcagaaaagtacggaattccggtcgtagcgaacggagatgtaggtgggatgtgggattttgagaaaatcaagcgcttaacgggtgagtatatatctttctctgttttcccgttccgctcggatgagctgtcccactcatctactcttgtttgtactcgtcccattttcttactggctctcactcttaggagtttcttcgatcatgatcgctcgagcggctgagagcaacccgtcgtgtttcttgccggaccggccgttggacacgtctacggtggtggttcctgaactcgtcagaattgttcgtctggttcatattttgtctgtttcatctggtatctcatcaaatacttacagcttttgttttttggttatgtatttctaatcctattccatccttaacctgatgatgttccctccccaaaataaaatactaaacaaacacattgatcatttattgtttattcgtgatcggctcaaaatgttgcctcgttctattcaaacaacaacaacaaaaacgcggacaaaacaaatgactttattcttcccctgaaggcctaccattttgaaaacccatggggtaatacaaagtttttgctcggccaattctctccgtcgcctagcccgttatcagttctatcaaaaaccgaatccaaggcgctccgggaacgtgggactcgatgcaagacgatagaagatctggccgaggtatatggtgtctcgttgaaaagagtcgaagacgaggaggatctcgcgaacgaaggcgatggtggcttgggggcgatagtgttggcaaaagtccgacaaggcctcgaaaggaggagaaaggagagatcggatggggtgttgcctctgggaggggaaaccgaaaaggcggacgtgttggggagaggaacagaatatgttgagcgggacaatgacgggaaggtgttgcccgtgttcaaggtgctcggggagaatgcatgaacaatcgatatgcttacaagacgtatcacattgtctgagctatgtggggctcctttcagcatttggtttgcgcaaccctggtctccgaaagtaccccgttctttcccattcccccgctctcttaatccatcttccttccgatcatgcccttagactaaccccatctgcactcacgttgttctttcatctattctttcatctatttatcccttcattgtcgcgatcttctgacaggcaaaccttggtcagccaccgccactctctctaattttggttttcttcgtgctagttttccatgtctacagattaatctgtttcgcgttgattaatttaatccgcctttcgatagtgaacactactaccgtgattaatctagacactggtttcatcaatcttatttcgtcttagacaggagattgaaagacggattatgcacaggcagatctcccgactactcattcatcatcgtatctcatttgagtttcatcggtatcaaaatccccgcggaaaaggtttcacttgttttaatcatgcccaagtatgacgattgctgagagcagagggcagtgggaggtgtaggattaacacgatcgacggcgggtgagaaaagagaagttaatgaagccgaaagctcatcgcctttggcaggaagattttcagtaagaagaattaacaagaaataaaaaattatcttttcctttcagctcggcttctccgcagtttatgtctgcggacaattgtggggtttcaatggaggatcgatcagctatcatgcatcttatccataaggttatcaaccgatcagggtaacgtgctgcggagcgccgacgtaatattttacctttggccgaggagatcttcgatcgaggaataatttctgcgaaagattgtctgctgaatacctcgggatctgttggcctctagttcaggtgtgtggaccagccggcttggggcaatctatctcggttcttcttttgatctcactctgttcggtgaaaatttccctcagtatcttatgacgataaagctcactcatcttgcccactttactcgcttcggtcgactccacgtaaagcatactggggaaaactcccgcgatcgagccggtcggcacgttagattcatctaccgtcgagcgctcccttttcatatccctcattgattacatgtcatcatcgcctgcctgctcgcccacccactcacctgcctacctgttcgacgtgcgctccttattgttctggccctgtccctacccctgtccctgcctgcccctgcc

SEQ ID NO: 1765 - DNA, 51502 bp, Xanthophyllomyces dendrorhous
  misc_feature (15875)..(15884): n is a, c, g, or t
acataaaggtttctatacaaaagtcccggccgaaaaaagagaaaagaaagaagggattgacccaaaagaatctcgatctcgttcctgtcccggtcactccctcgttcctgtcccggtcactccctcgttcctgtcccgttcccgacgttctctttacatccaattcttccttcttggccaattctccttcttggccaattctccttcgggtggattcttctctgtatctttatcctcttggttctccgtcatagagtaaggaaagactcatcttggtcgtcgttcattcttgatctcaagctgacggctcacgtctcgctttcttgttacgcgtggttgctatcattcatgtgattgaattccggtgtcctactcgctacttcatcttccttgatttcgtccgaacccttcgattgacttttacccttcgtacccgaacgtcacgttcgggactgttagccagcacacacacatcttcattctcacacacagacaccagaaatccttctccttcttcctttcgcagtttctgttctgaaatatattctgtcttatctctcccgcccctcacaaaaagcacatacacacactcttcacgctttcgtccatccttccttctttttggagcttgtctgactttctaaaaacacctcatctccgctggaccgaccctgccaactcttcctttcactatggcgcccgagtccatatcttctccaatcaaaaaaacaaggtcgccaaagcccatcagggtcccaatggacaactccctcacgcgggcaagaaaacataggcactctgcgtcctggtgcggttcgccgaccgaatgggatttcgaaccaagctctggtcacagtcagtccagtttctctcatatttgttgagaacctatccagggcgctgcggtctgttcgctaacacgtcgctccttctatgaacacctccttctctccgtttggtcggctatgcccgtctcacagtctcgggcgaacacgctcaatcaggacttatcccggcggaccatcagttaccggcatctttgctcgaccaaggacttacctcaaaaggacaaccgtaagaattcttcttcgtcttaactcttattctttctctctctcctttgctcctttgtcgttcatacttcaagcgctcactgtccgtctttgtttccttctccttcttcattgtattcccaatcatgccatctcagaaaacgaccgtaagtgtcaataaaaactctgttgccatctttctcttcggcatatactaacgtctgttcctctcccgatctgactatacttgtatgcgttcctcattctaccttccgatggatcacaagaatgaatgccttcttgatattcgcccgatggcgacggccaatactaaaagaagagaaccctagtctttcaacaggggaaatcagtaccttactcagtcaaaattgggcctcgatggatgccgtaacgcattttcttcatctttctaatctcacttatcaagcaaagaataaagcctgggctgattatttctattggtcattggtcgttctcaggttacaagagatttttacagttcccatgcactcgctttgaaggcgacattccaatctagatatcctgcctatgaatacactgtatgcaccttatatcctctttccttctctgtgctcttctagtgtcttaccacagtctatttgttcttctattcgttcttctgcccttgcctgcattctagcggcgaccgaataacacccgaaaacgtgggtctcgtggagggaaaacgtacatcagtcggcgagattcgtcttcttggaagtcgcctgacgatacgtcagcgtccacagtgctaggcggctctgcactcggactcgagagaatgaatcctagaaatcaagacggctcctcaggatggaatcgtaacggttacagcattggagaaacagagcaggattctgatacggacaccaataagcatgataacgatgggtcgtcctcatcccaatactctgaccattcacaaggtaatcgaccagcatcgtccattcactccgagctacctacaccacagcttccctattatcccctgacgacggagtacggtccaccaaacgagctgtcgagttccgctcctgcgtactataaaccggaaataactagtttttcctcaatgtcggcagctacttctgcctccgctactactcataacaattcctccgggacatatggtcactccccccatgtgttcgtcagtccttatggttggcgcgcgaaccggtctcgaccggtctcgacgtcactcatgggctcatctccatactctccttcttcttctctctcgtcgttctcgcctcaactgagcgtcaacggacgcctgcatggacatgggaaagttccggtcgagaacgggacgaaccagacgtacacggctgccacccaggattacccagtaccgcgtgcgtcatctcgtagaccggacgccttaattgagccgagcccggccagtcagagtcaacaactagctaccgcaacatctactgccgacccctcagccccgtcgtttcattcgagtgcattgtatcagccgtcagctagggattggtcaaccgaccctttcaggcgacattccgtccagagagctaggactggcccgttgcatgctcttgggtttttgaaatctgaacaacaacaaccacaacagtcatcctcgtacaaatggaccgaatcagacagtcatcatcgtccccattcggatcccgctgtcgaggacgagagcagatcggaaggagggtacagagccggaggtagtcaggctgagagtaggggttggaactccacttatcaggaagagtcaacctatccacctgctcacgctcaatcccacttacactctcactctcaatcctacactcactcccattttccctcggatcaaatgcatgcgtactctcctctccctccgctggcgacgacagcgacatccatagagccgtcttcgaccatgtcatcagctccgatcggagtgccctccacgtctggtcttctaaaatattcaaacaacgtctatccatctcactctcattcacagtcgttgatctcgacgagtgcaccgacaacatccttgtcgcccttcacatattcatcctaccagcaaaatacacaccaccttcaaccgctcgctcggacctcggcgctctccgctccaaaaacggaatacccaggatcatttgtcgatcagtcgtcgtatcatagctccggctctgatactgtgcatagagtaggcccatttgaccaggatcatatggccgatagagtcagggattctcagagacattcatatcaaacggacccgcaaacccatgcgaaatacgagtcttggtctgcaggcgtcggcgtagaagcgaatgcaagggacaggacgccgatgatggattcttactattacgagtcatgacggtatactccccagagacctgtgttgtctttcggttagccctttacgtttattccttcgtcgcgttgcttcgtgcgtttggctcttcgtctcgtgcttctttcttttctttgttcttcctgtcttaattttgtcagcttgagctatttctgttttttttttcgccttgtagcatatgatcttgtcctggttctcatcaagttaatacgtcttgttctgtatctctgtcgtatgatatctgtctttttcgttagttcctctattctacagacaatcgatcggtctcttaatccttattgtaattccagcttcatttcttccttctttttttcctatgaaaatagagaattgataaatatattcattggaaggcaaccgccattgatttcctctttgatgccctatgctttctttctccttgtttcctcttcttctttttattcccgctctttgtccctttttctcttcttttaataacaactttctcgtctgtttctgtttctgtttggggttggatctttagtattcatagaacgttcttttctttcgttcccttttaaagtatagggccttgcttgatccattctggtcaggcgatgttgtagcttcttaagatatatataactttttgttcatgctacttcctctctcttgagagtttctctgcttccgtctctccgctctctttcttggttttcttagcaagaatttcttgtacattttgttctgttctgctggttttttttcttccttgcactgctccgctcggcttttttttccttctctaggcaaattaagattgcatcgtgcttctgttctctctctctgtgtcttttctcttacgaacgtgatgtatcttcgagtgatcggtctgctatctggccaccagtcctctcctttctcctgtttccttgattcgtaaaacaatcgactcatgattgagcaggcaagggggtgagcagccgaagatgtggtacattctatcctatatatgaatagttgaacgtttctgatggtcggtacggatgatccgggagatccccagaagagatgatttacagcgagagtgaaagggagggagggagagagagagaatgtgtttaattgaggaacgataaacaacgatcggatgtcacaggacagaaaatgaaacacagaacagggcgcatatcagcccccagaacgacggttaacagtatcgtcggaccaagcaaaaaggtgggaagagaacgaacggttgtgtagttggaactttccacttcttgatgtagccggatcatgctcccccccatcgtctctcgctatccaaatctcgcatgtgagatcgtaggatctttgatcatttaccgtaaagtctaggaaacctaaatggtgcacacgtatatatatatatatttatgtggacgtacatgtggatgtgggtatgtatacattccgcaacaaaagacgaggtggatagtagtcaacgaacgttcgttagtctatcagtctgaatcgccacactgatcgaatacgaagattccgtaccttcgactctctcaccctatccaaccgttcagaaaggagagaattacttcagtcacaagcctttacgtgacttttttttcctaacgtttgttggtttgtatctcctgaaagatccgacaggaatgtactcacagagttcgtagccaagggctcagttctttttcgattgtttgtttgtttttaaattgttgcaccccaggcagatctcacagtcgattaatatgatacatagaagagaaggacatgggtgaaaataaaaggcacgacgcacagtagtaaacggcattgctgccaatgggtctttccagcatgaggactcgtgctcaacacggtgcttactccattggccggtgggggtggataaacggttgggccgtagataggctgctgggcctgttgcccgggtagctcgtttggcgaccagatcgaagcttgccagatcagttccgctgtcggatttggggtagtcgagggtggtgcagcaaactggatgtcaaacctgttgacagaggcaggcggacatgtcggaaatacgttcgcgaaagagatcacgtcagaacattggccacgagcgatgtgattgaaagagttgataggtgtaccaggtagctatgccgtgcatgagcgatgtcctctcgatcgcccaagatattggaattctaaattctttgaggtcctgataggaaaaaaggtaaaccataaatagtgttgattggcgtaagaatagcaaatagcttttgacaagcgtaaagggtttgaaattaacagaccttgagagatacgtcgtaaaagttgatatcatggattgctgtagtgcttgtggtgagttgggatggggggaatagacccaccacaggctgggcgaacacctcggccatactgacataacgacatgaccaagttgagttaagttaaagattagatataagcgggtacggtcatatgcatagaatagagccacttacgcaggttccgagagaatagacaggtccactccgtacatattctgtctaaagaaagaggcctagagaaagaaagaggaacctggtattgaccctcgtcttcttctcgtaataatcatttatgaggcgctgtgtactcataccttggtcaaagtttccatatagagtgcatcgtcggtaaacggggccagatggatcgcgcctccagaagggaacattgctgtttaggtgtagacgtgttcgatcaatactgacgttcttcaccatgaaggcagacgacagaaaaggatggaattacctcctccgggcttcaagaaattatctctagcatatatgtatgattcgacctaaaggatggatgccactagacgatgagccaagaaagtttcttcatgaccgaacagacgtactcaaacccaccattcgctcatggaggagtagaacccctatcggctcagacaccaacgtgtccacttttggccctttgcgagcctcaaccttgcctgatacgtatcccatcgatagcgccaaggagaagagaaggtcagtctttcagcgcaaacgagctccacagaatacatcgtcagagttcttcatacctcggttgactgtaatcttgtctttcaggtgaatattagcctctcctctgttggcttggtcaacgatcttgaagaacgacatatgcagaacgatgcagtcggagtacgtgtgataggagtcaggcatacggtcagcgtctgatccaagcattttgaaaaggcgcctgtacgatctacgggaactctgagtagaacatgaacgtacaagttgcaatttagatgccatatcacttgcttcacaggcatagacatgttttgcgccagcctagaaatagttacgtatggaatcaattttaacatgtttcgacgacgagaaagattgagacacaggctacaccaaaggacaaacctcgacagaaaagaacgacaggattcctgatcccgctccgatatccatcacggctacagaatgatggtcacttattattttaattcgttcgagtaggctgtattgaaaggaacccaagacgacttactcttgttctgaaacgccggaacagagttgcccaagatagctttcctagtgttaccaggttagagaggaaaaggaaggatcagcaacattttgagtagagtatagacacggaccagtattgaggtgaagagggacgaacctgtagcctgtcgtcctcaaggtgtcggacagcatgttggcttgattctgcaggctcgcatagtagctttgaatgagaagagacgaggcatgtgtaaaagttcaaaatagacacaggagatcagtctaccatctgagatgatgagagaaagttcggatgtagacaagaggaaagaatgcgaactgaaagtaggggtctagaccatcaagcaagaggatcagaaaagaggataccggggtggaggtgattttgttcagctctcgagacgatacaggttaaccgtcgaaagatccggtctccttagggtcgaagaaagacaggagcgacgtgtaaacgactgaccatcaactgtctctgttttgctaggtgtcttggtatcttgggctgacggcatgttgagagatggctctaccaacgctgctgctgctgctgctaatgatgatgatggaaggcgaagggaaaaatgcgcctgaacacatatttaaaagaacacgctcgatcattacgcgacaggcttcagcgaccgtcgctctgtaaattatgatgtacattctttctgctgtttctatatttcactcataaatttatttcatcttagtgtatgtatatatgaggaacagcaaggacaatcgctgtcactacattggcacggcgtcttctctggcctgtctctctccttcttcctacgcgagccgcattgatcaaagcgacctttcggcatttcgcacaatcataccttcctccacactgtgaaatgtcaaacaaaggataaggtctatcaaatgaggatcaggagacacgcatagattgatatggaaatgatgctcacagtttcattcgaaggatcgccctacgcgacgctgcttgacaagcctctccttccttcagtgtcatacggaacaaagacgaccgaggatctgctttctgtgtactcaggatctgaagatcgtcgatcaagaacaaggcatgcgatgagtgtcgtgagagggtagaacaagatagaaagagactgaccttctcgaccaaatcaatcttggcagcaatctcaccgctatccactagatatgttgcctctgtcaaaagcgaatcttcagaacaaccaaaagcatcggccattcttgacaacttgacggattgaaaaggctgatagtattgaaccaacgctcggcgacggatagaggcggttaaactagagacatggggcgaaagaaatggtgtgagtcgatgacgcgactgcacgatcccagaaattaggcaaaagaagaggatcaataacgaagttttgaaaaagattgctatatcggatgcaactcttaccgagtacttttcgagcagactcaaacaatctttgtattttccatccacaaacgcatccactagatcccgaacgtagccctcctcatccacataggctcggaagtcatcgttcaagagaagttcggacttgagcgctaaacgacgtaaggatgctagcgcacaaagtgagccgcagatagccacttctgtcggggaaatgacctgtacatggcacgcgtaaatttcccaagaacaacgcgtgttgagagaagaggcagctgagagcatatacgatgtggacatactgtatgagcccactcttcaaaatcacccttgacggccagaaactccctggctgccttctcatacgcacccaaccccagactagagagtgccctcgcgatctgtagtcttgtcaatattcttgtcctctcctctttccttctgatggcttcctcgaccttcgctgaaacttgagcagccgatagaggaacagatgaggtcggcgcggatggtacagggcgctcaagcgctgcctcggccttcacaacatagggtaacaattgattgtacgatccggaggcgatatgaatctaaacgttgtttgaagaatgatagataataaacatcgcatgtgtcaggagagctaaaggtgtgaccatcaacgtaagaaaaaaaaggatgcgaatcaagatcttgcgcacctcgataactctcatgcacatctcgagattctgagcggatgtcgagttatagtcccgcgtttttatcagatgttttaaggcctgttgattatctccgactttaatgaatagttttccgagatccatattgcacatctatcggaagagtgacgtgttggccatgttggttagtagcgcatccgttggagtacagggacgctagctcgttcgggacttacacggacgctctctttgatgagattggcctgaaccgatttgagttctgtttcgagtttctctagttcagaattagccgctagatctacctcttgtctccaaaggtcatcgtggtctcctccaaaagaatcgaaagaagcgacatcgaatgtctctgccttgatgacaggaagcgcaagggcggctgcttccgatcgaaggctcgggcaggaggcgtagatgagggccaaacgagagatcagagctcttcctgtagagtgttttgttttcagtggattatccataacacgctttgaaggatcatctaaacaaagcaaaagaggtgaaagaagttcagaaatgccaacctttgaattgagcaactacagatccaagatcgaaaggatgaagatcgtccaccggtacagtgttaagctgagagggctttgagtctgcatctggcgatggcggcctggcatctggagggaccatgtcctgatcttcagccatcgacatgctcgtgtcactgagattagttgagcgatgagtctgagaagagtgatggtgtgtacgtgtacgtgtatgtgtatgtgtgagtgagagattgagaactgaacgagggcggacggagtcgatgatacgaaagggttacgtaatattatcacgtgactcaaccacgtgataatattacgtaagcccaagtggaggtttgtccatctcggccaagcttcttttgtttgtctgctcttgattcttttgtctggagacaaccatacatcatcttgtttggttgaccgctcgttctctttatctctttcaaggatctcagcatgtcggctgagcctgtcgctacgcgttgtctttggtgcatctgatccagctaacctcatcgtttgaacgttttcccttttggatcgcacgctaatcacaaactcccactcaactactctttcttctttccttcgaagcttcagctacgatcgatctctctttacctacttctcccactgactgttttgcgcatttgatatatatatatatcggctggtagtataacatttttcgtatagctgttgatcctatgtcatatccttccatcaatgcaaagtctcgtgctctggtacgtacgtgtccgtcctctttgatccagcgtcttcttcctgattgtccttgctcttggcttcttcttcttttcttcagcctccggcaacaatgcctcctaggcgacgaacattcaaccttcatttacttgtccgtcgaaactcccacgagcttcctctcatgaagccatcgtacgctctcgacatcccctcagatatatctcctgtccggccttctcgacaactctcgtccagtgtcgacgagaccaaccaatctgtattcgatttcgctcactcttattcacatagccctcccccagctactcctcagcttcttcacaccaggagtgcttcatcaacccctcaatcgaggtccaacctccttccgacctgccttctcaaggaagacgagaaggtagaagatgagagtggtagcatcggtagccgatcgaccagcagtagtggtattcctatttttttcaaggagcgaggaggggagtatgaactttttgattctccattcacgccacccaccctgcccatcggacttgaggaagaagacaagatgaatgtcttcgggtcttacccgatctcaccccgcacaacatcgtttccccaggctaccgtccgaccccaacctcaagacttctactcacctcgtgataaattccctgtctctatgtcctacagctctagtttctctgttccgtccatatccgtatctccgtcttcgataccctgtgcccgtatgtcacccatctctcacgcaaaggcacccttcaacgcgatacttctttctcaaaagacaatgcagcttccttcgcaaccggctgggttcccatcaagccagcggaaaagcttaacactcatccaacttcaagtggccgcctcgacgtttgtcattccgatggagctgatcgcgcgttatccaagccatctggcaagattcatcagcggatgtaccgacgatgactggagggcgaccgatagcgatgattctttcagcgaggcagaaacagacttcgatgacgatcagacatcatccgaatcgagtttttcttatctatcgttcgttcgcctttcttttgtctttgcattcgatcctctctgtctagcacagctaggtctttctctataacaatccggtcccgtctcacgtctatcttgtaattgtaaacaagacaggatcaatcctccctttccttctcctccactcaacatccgagcgacatcagtaaacaaattacagaagctcggaatccttccttctcttcataggccatctggttttttcgtcagtgatggtgagatcgacggaccaactaccccacgagcagcgacgaccaactttgcacgtgtcccgcctcctcggccacctcgaccagagaccccaccgatgtcacccagtcgaccgtctatgcgtcggttagaaattcttctctgtcggtctccagagccctacattgcgatcgactacttcttctcgaccggcttgttgctgcctgatctgagaagcatgctggaaagcgagaatatgttgaaaggatgccctctttgtggagattctcaaagagcgagtagactacgggaggtagagaatgaggcatcctggctaggactcgactgcctggctcaggtctgtagagcggagaggaagaggagcgggatcgaggaaaccaggccgacaaagaaagtcggggatggctggatctagagacagcctggcgcgtgtcattccgaccttatcttaacataattcatgctggtcgtaatctcttcatcatccagtctcgttctcatttcatcatgcctaatttcgttctcgttgtgcttaatctcgttgtcgttgtggcttttcatcgatcacgtctctctccttggtttgtttctcacatgtagatagttgagcttgtgttcacctcaccatattcctgtttctttaattcgaattaatcttaatgtcctgttatatacaccttccttctcttaactctgattcaatgtaatcattcaacgttcccgaatgtgagggtttcattctcaatcctcacagatgattagatgtgtgtctggctgtacatcaagccaggatgtagagagtggtatgacgctagtggtgacaagctgtgcaatccctcagcctgatgtatgattctatgatcaactcacaacaaaccgatcaacatcgtcggcttctccgcacaaacaaataaaactttcttccttcgaagccaaacatctctctacgatatctttcattccctccatatatctgtagagatgtcctcgatttttaatctgttcgtgcttgatcgttcccgtggaggacagttcatctcgacagcattggttactaacatcgagccgaggtttgctttcttggtgtcaacagccgaacaagaagtgagttctttagggttttccgttctttcgatcatcctccttgtcatttttaggtgatgtttggtatatctgtctgagccttttttaattctacgctcctctagctttcaagcccaaacaagccccgtcagggtcaaaacaatatcaactcaagaagttcgccgagtctactttggtaagcgtctatgatgctcatgattggctgtgtctatgcacaaactagtgtagcctagctgatgttcgtcaagctgacgtgaacatctcactacctttgtctgcttgcctgtttgtagggatctggtaatttaagagcggctgttcgtcttcctgaaggagaagatgagaacgagtggattgcggttcatagtgagtcttgtctttgttcttcttctcattcggtttctacagaattggatagatggataatcggtgcgatgtttgttttcttactgtgctgatcaaacctaacgtacatggcaaactacagtcgtcgactttttcaaccatatcaacatgctctacggcacgatctctgagttctgtacgcccgaaggtgtgagtccaggccgatcgtctttctactgatgactgtggtcgcggccttccaatgcacagagcctgtgcgcgcggcacatgctgatcgtgtttgtatatccggacgcgtgaatatagtgccctatcatgtctgctggacctcggtaagtttgaaggatggtcgacgtgttgtttgcttagaaccggcgtttctgaagctcgcctgttttgtttccgctgttgacggtggtgcgttcgtacatgcgggcgatcacgttcccaggttcgagttcttgtttgaagacggggtgacatataagcgaccgacggcactgtctgctcctgcgtatgtggacgctttaatgaactgggtgcagagcatactggatgatgagactgtgttcccgagcaagatcggtgggtcgcgtcataagttctggcaaggttgattgtcgagcaaagagaccacgtcggtctgaccgccttttacctttcttgtgttctcccgttcttctgtttgctccttggccgattttaacctggtcgttgttctctctcctgttggtcaggtgtcccgttcccaaagaacttccgggtgatgtgccagacgatcctaaggcgtctcttcagggtctacggtcacatctacgctaaccactttgatcagatctgcgctcttggaatcgaaggtaccgtcctcttgtggcttggatttcgtgtctttgtcgggcaatgacgttccattcaggaacaacatctgacgatatcatctacctatttctttattttttttatatactttccttccatcagcacatctgaacacaaactatcggcatttccttctgttcgttactgaggtgagtgttcttcttttttttcttggatcatttcatctatctagatccaaaggtcaagcgatagccggtgctaaaccgtgtctggtctggtctgtagttccaactagtagacaaaaaggagcttcagcccttagccgagtttaacgatgccatcttgactgaagaaaagagataggcctgttggcggcttctaccttctctcttcgccttcttctttgtgtgctatgatcattgtcgcattgtatctttttctctcgccgattcactcctctgcgggtcgaaatctcatccatatatacctccatgttcgatattcgatatcccttgacttctataactctctacatatcacaaacatgcgagtgtccacccaagctgctgcgtctttgtagaacaaggatgatgaagaggaagcagcatagcgatcagtcggatcggatttatttatagtctaataagcgttttggttgagcgagacttctaccgagtgaccgcttctggactgattcttttttagagagaatattcaagatcaacatcctctcttgtagtgccgttccctgttctttttctttttctgttgacgacacgcggttgcaacaaagaagacgatcgaacggaagaggaaagaaaagaagaaacgcgctgtccctcagccagaaagagagagacaagctcacacacatcagtagtctttcccgtagagattgaagtaagagccgggaatggcaaccgttgggctgacttgactgcgggctaggtgagctttgaagagttataaacctttggaacttgtttccgtttgtttgctttctctttctttctgaccatcattccacccattctctccctcgctcgtgttttctttcaggcttcgttcccttcctattcctcttttccactctatccttcatcttcttgctcgcaactagctttgatagcagttgtcgttaatatctccaccaccacaccacactgcaatcttggaaagtcctgaaaagttcccacgttcgactctctctctctgttcttgactagcactacctatccggtctatctaaaccaatcactacccacgaagaatctcatctgctctttcgtaacaatgctcttccctactaccgctgctacccttcttcctctcacccttctgctggcttctaccgtggtcgaggcttcttcccataatgaccgtcgaagaatctctcaccgacgacggatcccttcggccctggaggtctacaactcggacgccgagaagatcaatgcccctactcaatcggtagaacgaagaaagagatcgtcctgctctgtgagcacggatgactcctcctcggtttacgcctcggcttccgcttccgcgtctgcttctgcccatggttcctcttctagcgctaccgctgcttcctcctctgcctctgtttccgcaccctcttcttctgtcgtaaagaattcctcgacggcagcagctgcctcgacaacctcggcggtggccgtccaggccgccgtgcaaagtgccaccgcaacttcctcttcagctgccgcctcggcttctgcaacatccacttcttcttggaagcttgacctcgaggctgtgagttgccgctctttttttcttctttttttttttnnnnnnnnnntctcttcttaaaaccgtccaacttgatgctgatgacgtccttttggcctttctctcagtctggatcgacgttccttgactcttggaccttctgggactacactgatcctacccacggaacggtcacctatgtcgaccaagccaccgctaccagtggtaacctcaccagtgtcaacgccgcaggaaacgttatcttgaacgtcgatcagtgagtctctcattcttctcggctctcggtgaccgcccgttctgtcgatctcatctgtgccttgttttcatctcctcaggaccgaagtcgtcaccggtggccggaagtctattcgactccactcgacttacatcttcaacggcggtttgatcattgctgacattgcacatctccctaccggctgcggaacctggcccgccttctggtccaacggtcccaactggcctgccggtggtgagatcgatatcatggagggaacccacagtgtctcgtacaaccaggtttccgttcataccgcccctggctgcacgattcctgccgactttggagcgactgccgtccttgcgaccggagacttcacttctacagactgcagtgcggccaataccggtaaccagggatgtggagaagtcgcctcgtcatccaccaacagtttcggctccggtttcaactcgcagggaggaggagtctacgccatgaagtgggacgactctggaatctctgttcactactttgcccggagccaggtgccttccgatatcaccaacggttctcctgagccctccgcttggggaaccccgatggccaacttccccagtaccacttgcaacacttccacctttttcaaagatcactttgccatctttgacaccaccttctgtggagactgggccgcaggcaactgggccactgctggcactgccggtggatccgagtcgtgtgctaccaagactggatactcgacctgtgcggactacgtcctcaaccagggaagtgccttctcggaggcatactgggaggtcgcttccatcaagtactaccagcctgcataaagtgatcctgctctttctccctatcttgtcttatccgcttgcacacacgctctgtctttttatgtcggtgatacatcactgtccataagaagtcgaagtgttggatgtagatcgttctattgttatttctaccgctttctagactgcaggttcatagtctagtcggctctttcgatacttatctcggacggctggaccgtcttttgtgatatcttactggttttagatttctttgttgtgatttatggaatatatgtaaccctgtacccattctagatgtgatggcattcttatagatacgtggacatgtgtatggatatcaatgtcgatgtcagacgtggaggtgctagtgaggacacattggaaaacagaaagagttaagcgatgactgcatgagtgacgacggtgcaagtgcgtcatcgaccaaaaaagccatgagaatgtggcacgcgggaatcctctcaaaaggcgagttctcttttggtctcgagcctttttctttctctttcttttcccccatctttctcttgcctttctcttgagctagcaatcaatcaaacactttgcatcttactcactttgttcttccttcttagtatctcttgaaagtaagcgcttcccttcgtgtgctttcgtgtcctttaggaagtagagacgcttatctggctttcgcttctttgtcccttttcttttcttttctcttctcttctttcttctccctttttttgcacttcatctttcaccttctgttccgaacacactgcctcttagaatgtccactcctgcttcccagaaccctaccattcgaaaggtcttgaaccacccagtggtcactaactctgttaacactgttaaccagcagctcaacactctcgacaaggaggtcagttctgtttcgtctttcatcgtgtctttgagaatccctttgctcctgccagcctactcgtctcatctcagtggagcttcatcgcctcgtgctgatacatcctttttctttttcttcttcttcttcttcttcttcttcttcaacagctcggccgacaccagatcgctcgggatttcgaggcaaagaccaaggtccccaagacttacggtttcctcgccctcgctgctaccttctttgcttctggtaagtgacattttctcgcgcccggcttgaagatggggcgttcgaagctaacgtttctgctctttctggtatcagtcttcttcaaccttttcggtctcgctcctgctgtcaccaacatcgtcggattcgctcttcctgccttccagaccattaaggctctcgagtcgccgtctaccggtgatgacaagcagtggttgagtaagtggtcgatctcgagggtcttttttttgtgctcctcagatgatctcaggcactaaccctggtcctttcatttgtagcctactggatctcgtttagctttttcaccttgttggagagccttttcctccgaattgtgacctactacattccttgtaagtgtctggatttatctactgcgaaccttcggataagtagcatgctaactgtgtctggtttccatccaaatagactactttgtcttgaagacagtattcatcgtctacctccagctcccatctacccgaggtgcctccatattctacgataacgtcatccgacctgtctttgtccagaagaaggctccttacgtctcgaccggcaccaccagcactacttccaacaacacttccaccggtttctccaccgctacttctacttctcacgccacccataccgagtcggccatcccgtcgacctctgagtgtgagttcttatgttgactctctctgaagtttattgcctgcccttttagtccctcgctcatcagatacatctgtttatgcatacagttgagcgatccatctaagtttcgacttcctcgaggcttgcttttcgcaggctgtgtccttttcctttttcgtcttctctggccagtacactaggtttttgcattcgtcctcttcttcacgctgcactttatccttagtttcttgaaaactctcaatgccgtagtatgatgttttaccactgtatcaatgtttcttgactgtttctatactcttggttctgacgatatgaggacgtaagaactgtcgaaccagaggaatacatgcttgagagaatgtgtcaaaagccacttcgaaagaaaacgcacaccaccgagtgtgtttaatcgtcgatagatactaggttaaactataaatgtgactggcgatgacatcattccatctcttccgattatcagtcaatccttcgtcgttcgtctttatcgtctttgtccgatctgttctgttgaagcaacgcccctatccatcatctttcatacttgtctaaacaatggtacgtttcatagtttgtctaagagttcaacatgaactcttttcaacctctcagaagatctatcgctgagctcttttcgtgttgtcaaattcataaacaccaacacacacatacaggctcctaaacttcgcgtgcttggctcatccggatcggatgctccaaaggtcttatctccaaactcatccgagccgacacacgtctcatctgatagattcgaaggagacatcctcgtgcggatcaaagacttttctggagagtctgccgatggaaaggaacgaaagagcccggagggagagacaggtttctttaccgcaggtgagagggagggatcttcatggagtatctttgtcaaagggtctttcaaagaagagatcaatggttcgtccgtttatctgtcctgtccaaaacaacaatgcgtgtgctttgtccgaggagacggcggactgatgatgttccttttgggtggctctttggaaatcatcttcctgtctagcggatgacctggtgttcggaaatgtgttcgacaaaccgatcagagatagcctcccttggggaacgtcagtggctcttaagtttatgaatttcatcgatccaaacatgaaatcagatgtatacgcggacaaaccatgggcgctgtacgttcatgttctgatacactgtgcctatgtccctcctgtctttgctttgatcccctgtgctgatcgccctatacttgtgtgcgtgtatcctcagatccccactgctttcgacggtgccttatcttgtttggtcatcgtccaattcaaaatggtcgacagacgatttgaagccgatcaaggagtcaacatacgagagcatcaaggatcgtctgaaggagtcgcctgaagggaaggatacgctggatgatttggagagagtaagtggcggtaccgaatgggacgctggaaagaggagaagctggttgacgaaggaggctaaccgaaaggccctcaagatcaaaccctccgttcgtctctttgtattcaagatgtttgatcgcgttctttgaagggttcggtttcggtagactgattggctgtttccgataacctcatggatctcaggataccatcactatcggttagtatctaaaccgaaacaagtagcaatcgtacacgtcgatctgaacaattgaatcttggtgatctctttttcttttttttctttattctttctgagtcatcagactttgctcagggatatcttgacttcaacgatctgtctgtctctattcctgccgtcaagtttcatgtgaacctgctcaagtactgggacggccagtgagtattgtatttctttctatctattctttctctgttctcgcttttttgtctttgttttttgtcttcccgtgtccgtcaacgtcgcatccgttcaagaccggttgcactaagtgttcggtggactgatcatctgattgtatgacctcctactccatctccacatcaaaattcacatgatcacacccatcgcctcctacggggaaaaccaactacagaccagtgacatttgtgtgtcggaaccgatctggtagcaaggagttcttcaagatcatcttccaaattatcaacgtcgatccggccgagatctcgaaggcgaaagaagaaaatgagcaggacgagaagggcgagaaggacgaaggagaagatcagcagattagtgacgaggttgattagattgaattcctcgacgggcgctccatgagatcatcagtgctgtttatgttcacctcgacctttggcaaaaccacatggtgtccactcgagaaatatagataaagtatccattctatacttatagctatatgaatgatgtcctcggctatgttcgctttggcgctcgtcgttctatgctgctcgttcttccccgtctggtctgtggtgtgtcaaattcgagagttgtgtcgctctgtctccgcgctcttcctctcgttcgagctggctccacagggcagctgtccgagaagagcgctcggagtattcggctgctgtttgcccaaccaaagttagtcaaccgctgagcgctcggaaacctattcaaacaagactacggggaattcagtgaaacgaggatagcttttaccggtatatattgtttctaactctccttgatttttcttcctcttctctttctcactctcattcatccttccttgttgggtttctcttgttataactgaagaaagaagaggtctgctcactccgtaaaggatatctgactcgtccaaggggatggttttgactgataggcagtgtggggagatcgttcatgatgagactcacacagtgcacttgaaacaatttttaggttgttatactatttttccttgggtctctgacccactgtcgtggctaaaatccgtctaactcctttctttttgttcattcaccatcactgattcctctcttttctcaaacagaatcacccctgctaactcatgatctttggtgtaccagcaacttgaatgatccctccctcctttgggacgggagttggaggaagcctatctcgagctctcatttctggaatgcaggcaacctcgcacttggaccaggttgctggatcgccttccctctcatgacaactttacatgcgctcccctcattttcccacttttttcgtattctctatgtattctctcttccttgtttctttctagtcttttctctctctctctctctctcctctatttctccacattctctctcctctgtccgtgtctgcttcctatctgttggatggcattggatgcttgatatctaaacgacattcttgatagaagtatgcagcaaatggattcctcaccatctacagcggtcgatgggattcacacatgtttgggcaagggcaactttagtggtcgtacgcttaggtcggtcctttcttttccctttttttttctcctctttcatcctgtcgttttctctctctctctatgatggctttgtgtcgtcgtagcagatgcaggactcttctcactttgatcgatcgtcttaacacatcatgtatctctctcaggttctcgatggaggtcgcccaacaccctactataggaagaaaggtaagcgattgataagcgtctctcgctttttcttctctcttctccttggggggaaagacgaaaaacacagccatttttaaagaccggaatgtgaataagtttagttcgacttttttctctttttgctaattgacgatgtctggtcttccatcctttgcctttcgcttctccctacctcaacacattatcagtcaactgtaagagatcgtcggccgatagctagcatacccatcgttcgacttcgaatttatgatgtcgagaccaacgaagaattggatgaagagtacgtttttcccccatctcttcttctcttcaaatccggaaacaatcggagatagagacttgatcctcatgacctgactatctcgaacgtatcatgatcaactccttggatctataaagggttatcgaacgattggatctgagcaatttgatgtgttcagtcgatctacatgcacccttcttttcgaccgagaccgagccacgctcggatacgtcttctaccggaactactaccacggcctcgacatccgccacgtccatcctgtcaaactcggccaacatagaagatatccgaccaggctactctgtcgcatccagctctcgggctcctcccatggatctggtaatgtcggccgtctcgatcagctcgctcaattccaaagcaacctcaagtgaacgtcagacaatctctgacaccgaagaagatcatccctcccaccagcagcaacaacagcaacaactacaacaactacaactacatgagtctatatcagtcgaaggggaagggtctccgtcgaggcaacaggaaccgagatatttactcagaccgagactctcctcgtcgtacatcttaccctcgccttccttcaaagaaccacccagacgaagccattttgtgctcctcccgaagaaacgatcaaagtctgggagtttcacttcgagaacgagctcaaccaagtcccaatcggataatcagtcttcagagaccgcctacggtagcacagatgctgaggattcgagcggatccgaacagctagccaaagtccaaagaaacctcttgggtggtgagcggagttctctctttccttagtctcctctgcctgtccttcttgctatgacgaaatggtgtactgaggtccccattaacttgttccctctctttccacttagcattgtatgtaactgcagtcgcgtaccgtgacctagaaggaacgttagggatatggttcatgttccatgtacgtttcacctcatactctacgagccagctctcacccagagggatcaactgactgatctttcgttgatccctaatgactcctctgtctctctgatcacccaggacgtcgccgtacgaagtgaaggagtatataccctgcagttcgctgctttcgactgttcggccgagacccagcagttttccaccgatgttacgcccatcttggcttggtgttattccaagccgttcaccgtctattcacccagaacgttggtcgatcactctcatttatccttgtttagttccacaaaagacgttagcaagaacaaatgctcatatatcttctcatcatctactttgtgtcgcctatctcttgtcacattctgtagtcacccaggcaatcctgttgtcagtgatctagggaaacatttcctcagccagggatacaaagctccagccaagaaggttcatcccctttagtatctttccaacccgacatctcctacattcgagtctagctcgttaggttttctcttccacatcggtcctcgaaatctcgtctagggttcttattcacttccttttcctttaatcaaaattctttaggagacttcggataccgccgggacttaccctagaggtctaaaagtcaagccgttgaccgatggagacttcggggatgtcgacgatgacgagatgaacaggtctatagagcatcacgagtaccaagaaagagcagaagacgaggacgatgatgacgaagacgaagagggtgaagttgggaataaatttgaagaggagttgagcgaagaatgttcatagcagttcggtgggagagaaatcttaaaagcgggaggtggtagtggtgctaatgattgataccgatcgggccctctttacgggcctgggatgtcttattgtacgatcccattcagttcgtttgcttctggacatgtggatacttccattattatatattttctgtcatgtttcgaagtccattcctcttgagtcgaccgtccaggaaagaaagtacgcgcgaacgttcaagatgaaccccttggagatacaacaaacatttcaaccagacgatacatcgatacgggactctgcgtctgttaaaagactacttttggtggatagtaaaccgatacaacaaagaaagaaaaggtatggaggataggaggtggcaagaatgttgatctcgatggcatcttgcgtaccatgcgtgattctacacgtgaatcaactctgcaaaacagacatgaattcagtccttggactatatcagaaaaggcgtgttcgtgaatgcgagggagcagatggtatccaatctatcgacgaaccttttatatcgctcacttccttgaagcgctcaacctctagtctattcgagtgcatacgcacacacacacacacacacatctgtaggaccctctttgatgctcaagaggacatggcaagttgtttacggacggcctcgttgtacagcttttcccgaacagccacttgagcctttttgagatctggttcctgtcgagccagcagatattgaagtttggtttctcgatagcgtaaactgagaaatccacggatcaggcgaacgaggaaagagtattgatacatcagttgattctttctgtcggggagacctgcgataggacgttcacaaagggagaagacaacgtcaaacacgtactctgagatcaagatattcctgttcttctccagtattgcccttccctccggagtctgcgcaagcttcttgttctcttcatcctcccatgctttcatctgccttctctcttcttcttcggcttgattcacggctagttggtcagcttttccctggtcggacatcaggtatgcttgatgttgacgatcctggaattctaacaaggcatcgatttgatcctttcgatagatctgccatgtagaaagcccatagtatgtagctagatgtggtcgatcgtttgctaagatcagtccgagcgatcaaacggataacaacaaaaaccgcgtcttcggaagaaacaaagcataccaaacagcacaccacctataaaggctcttgggtattttggatgaatcgtcgggagcctcatcttcaaagctgtagatgattaggatgaaggcgaaggagagtctctagctgctggaagagagaggtgtagagcacatagctgttagggttagaactacgaatcgccatcacattctatttcctcccttccagcttgccatctctctaccttcttcctatcaatacccaactcacaagtaagaccggcacatatcaagcatcatacagcttaaacacaatgtcggtagttgtgtcagatcctgaggggaagcttcttgctcaagctctaaagttcgtgtgtctaccctggttatctcattctgatcgtcctcggagcgaatcgtagctgaactcctacatacatcctgtgtatgacgatattctttgaatggtccactcctcgaacagtacagtcaagatcgagagtgttcagatgaaaagatgtctggtatgggttctatcttcttccctttggacataaatgattcggactggtttctcaccgatctgtgtctgatgcgtgttataggatgcagagctgctgatggatgctttaaagagtgcatccaccatgctcgctgaactaaggacatcctctctgtcaccaaagcagtattatgagttatgtgagttcgtttctgttcaaggttgtttaccttagacacgaaagtctactcgaaggctaatttcaggcgattgtgtctcctcttctcggtagacatggctgtgttcgacgcgcttcgacatctatctacttatctccatgaagctcacctatccggcaagcaccatctggccgacttatacgagattgtccagtatgctggaaacatcctccctgtaggtcccctgaaatgtctcaaatgaaatctgaaaagacaataggatcgagccactcataaatgttctgtctcccattcagcgtctatacctgatgattactgtcggatcggtctacatgtccatcccggatgcacccgtcaaagagatcatgaaggacatgatggagatgacgagaggtgttcaacatgcgaccagaggtttgttcctcagacattatctgagtggacagaccagagactgtctgcctatcggagacgatcaagggtttgtgtgtttctcctctacaagtactaagttgatagacacgaagattaaagtctacttatcttcatgaccagatctggaggaaaccttcaagactctatcggtttcgttcttacaaactttatcgagatgaacaagctctgggttcgactccaacactctggccactcgagagagcgagagaagagggagctagagcgaaaggagcttcggatcttggtaggaacaaacctggtccggttgagtcaattggaaggtgtcgatctggacatgtaccaaaaaattatcttaccaagtatcttggagcaagtagtcaattgcaaggatgtgattgcgcaggagtacctgatggaggtagtcattcaagtgagcctatttcgcgaccgtcttgttttctttgcacaaatgatacatctgctgaaaatctgatttgtactccatcattctctcaggtcttcacagacgagttccatctgttcacgctctcacccttcctttcggctactgctcttcttcatcctcgggtcaacatcaagcagatcgtgattgctctgatagatcgactagcatcttatgccgctcgcgaagccgagaacgaatcccccgaagagaaaaagaagggggaagaggaagctgcgaagaggctagctgagagagtccaggcaaggaagaacggaacggatgtcaaagagaagcctatcaacaagcaggctggagccgatgtctggggtgctgcagaagttgatgacgatgagcccaccaaggacaaggaagctccaatcagcgaaccgaaagaaaaggagaaagagaaggaagaagaacagccgaaagaagacggctcgaccgcggaatcgacgacacctgctcctccagttgtcaaaaagtttagaggtattccagacaacgtcaaattatttgaggtgttctggcaccaggttgtagagcttatcaaagttcgtctattcactatcctttcgttcgcgtgcgttgctttgatcactcaactaacaaccgataatcactgttccgtaggctcgaccagatttatccatccaggatatcactgcattattggtctccttaatcaacctctcattgagttgctacccagatcaactcgaatacgtggaccaaatcattgtatttgccaccgccaaagtccaagagtatgccgacaggttggtactttgctcatttcttcttcaacccgtttggtcgcttcatttttatgaagggtcgcaattcgagaatcccatgcttatcgagctattcctcgttcttccttcagtcctgatatcaacacaccggcaacgactgcaaaccttctctccctgttactgtcacctatcaactcctatctaacagtcctaactttactcgcactcccttcatatgttcctctcttgtcgtcccagccgttctccacccgccgatctatagcacatgctattgtttcttccgttttgaagaatgagactgtgatcgagaccccagaggacgtgagtggtgttctagggatgtgcagtgttttagtagtcgatcagaaagagctaggcgtgagcgcaagcaggacaggctcgatgataggcgcgaacggaggcagatatagaagtggaagtatcaccggtggatcgagcggaaggaggtccggtcaccagagggaggcgtacgatgcggaggatatggcagaagagcaaggatgggtcgctcggatggtgcatctgttccagtcggacgatctggatgtccagttccaggtcagtttccgtttcgttgtgttctgttctatcttgtttacttctgacaaaggtcccctcatgcatgaactatgttttctgtttttcagttgttccaaacggcgcgaaagcacttcatcgacggcggcgatcgaatacgctataccttccctcctttgatcacctcgagcattaagctggcgagtcgatatcgatcattacctatagatgagcaggtgatcttcaagaatgtttttgataccaacccacagaacgtttttagactgacgcatcgcatctgcttgttgaacaggatgacgaatgggaagtcaagcttgcgtccatcttcaagtttgtgcaccagatcatctcaatcctctatcatcgagtagagtcatcggagacttgtcttcgactgttcttacttgctgctcaggtggctgatgaggctgggatggaagagctcgcttacgagttctttgttcaagcttttgtcatctacgaagagtccatctcagaatctagagcacagctccaggcgattacaatcatcattcgaactcttcaggggaccaaggtgtttggcccggagaactacgatacgttgatcaccaaagcggcgctccacgggaatcgactgttgaagaaacctcaacaggcgactgctgttctctacgccagtcatctttggtggcagaacgagcttccagaccgagacggaagaaaggacaacgtgagcggattacagtactttgctgttcagcatgcgaggtcttttgatctacggcttactcctctgtcctctaccgtctccggggatattcatgctattgataggagctcttccgggatccaaaacgggtgctcgagtgtttgcagaaatctatcaagattgctggatcgtgtatagaagaaattatgagtgtccacttatattgcctggccctggaccaggtaagtcttactttatctttgctattgatagctctggttatacagtcttattcatcgagtctttcccgtcatcaaaagttcttgtattactttgagcaaggcgtcgagacagtcagtggtattcttcttttcatatgcatatacttcagatttgagtttgaccgtctctgcgactctgtgttgtttctcttacgaaattgtccggctgttcttttgttaggtgaccgtacgatttgtcaactctcttgtgggggtcattacctctgagattgactcgatccacgggaccgacgttcatccgtcatccaacgcttcgcccggtctggtcgatggcgttcactcgccagacatgatttctcgacatttccgaaacacgttgatctatattcaatgtgagttgtggtggttttattactctcaggatttcttcttaatcttgttgttgacagtatctgcatctccctctctgggggcttggtttcattcttatattcgcagctaaaaaagcagctagcgcttcatatgaactttccggtccaggcacacagccttcatcaaagccgaacgttgcctgggacacagtcgatatcgttggcgctctcctcaagatgggcctcactgctgcttagagtcttttcgatctaattctttccggatcttgagctgcatattaagtctcgttcgtacattctaattccgcagggccttctttatctctcaccccgtcggatgtatccctcccctgcttttgctcaaccctcagaagtttcactgttatgtgttattttttattttttattttttttattataagggaaatcagccgccatgccgcttattgttctatatcttccgtgcctttacaccgatgcatgtatcaatcatgtcgccaaatatggactaatctgcttacgtctcttggaggaagaagaaaaatctaggttaaaatggtcagaaagtggatctggaagaattcttggtggcgggatcatttctctggcgttactgacaaagtttgacacgggtgctcatgtcgaaaggccgagaactcgggtctgcaggaatcatcagtcatgcaaatccaaagaagattgccagctgataggcaaacaagtatgtcacctcgcggcccgtcgcggcgatgagatgtcgagcgatcgagatctgctgccaggagctgcttaattttgagctgttggccttggtacctaattcgatcgtaaattagacgcgaaagctaccgagatgcgtcttgtgtgacgtagtccaagccttttcttccttagctctctcatcagctctgaatgctcatcttctcaaacatctacagatcccaacatttgttccttcctttttctcatgcctgaccgattcggtccgcatatttcaaagtatatgcatacgtgcgccagcacgcacgcatagccgatctttcgttcacaattatactcacaggtcaggccagagtagagaaccaggtctgacaataataacaacagcaatatatctcgagaaaggactatctgtctacgttgaatgatcctctatcctcgtggggcctggcacagatacgccctaacttgctaaccggctatagagtttttgcgcttcttctctgttgcctctcctatttcccgtcatgtcttggcgggtccacttataacgtggtggcaagggcttgccgtttgccgtttgcggttcgatcgttcgttctctctcttcgtaccgacccaaaacagaacaccgttcacatcggtgcagagtcaatcttcccttcttttcaaggtcagctgacctagttctttgaataacacaggtgctccttccgactgttgctgcatgaacgctcaagagggttctgagagctgccgcctcatattgtacatcttctagattcggcggcaatcacgttcgggaagaagacaacacaaactatgggtggaaaagcggaatctctatctcctctgatctgttggcctttccgtgtctgtactcggcgctctcttcctgaccctgggttctcgggtgccatctgatgtacccaactcattcggcaatttctacccttacccaaccgtcccgttctgtataaaggcgttcccttgagggggtagctttggggttctttctttctctttctccacacatccaactacactcaagaagggatttctaacataaatagtcccccaaacactctcaagacccttcatcgcgcctttctaagcactaaccctttcgtacaaaaacaacatggttcgtgtgcttgtcttcctcgcgcggtagcaataaccgctttcttaccgacctgtacaactttccttacgtctcttgtatctttctgtcttgtgaattttatccaggctggaggacctggtggcaccggtgccggtgtgaactctggtagcacggcggtggctatcttgatgtctgcttttgctggtaagtgttgtcttggaattcataactgcccacgtcacacccgctactattcggttcttccggtcacaagactaatttcattctgatcgatggatcccctcgatctatagctttcggtggtattcttttcggattcgatacgggaacgatctctggtattattgccatgcccaattggctcgagacctttggatctcacggttctaggacagcatactatggaggaggagtcggttactaccttgctatcaacaacaaatctttggtcgtctcgattttgtctgttggtaccttcttcggtgctctctcggcatacccgatgggagatattctcggtcgacgattgggtatcatggcttcctgcagtgtcttctgtcgtatgtatttcaaatcgtcgaccccctgtcccatgtctctcacgtgcaatggactgatcatctttctgtcctctttccttagtcggtgttggcttgcagctcgacaccagctggtccgtcttcatcgccggtcgagtggtggccggtttcggagtcggtttgatttcttgccttgttcctgtgagtgatatgtctttgcactgatgaccattttatgtacacgagctcattatttacgaaacaaacaacagatgtaccaatctgagtgtgctccgaagtctgttcgaggattcgtcgtcggttgctaccagtgggccatcaccatcggtcttctccttgccgccattgtcaaccagtgcactaagaaccggggcaaccactctgcctggcgaatccctattgcaattcagtttgcctgggctgcggtgttagtgactggaatgctgctccttcctgagtctcctcgatggctcctcctcaagggcaagaacgagcaggctcgacacgccatgtcccgattgacttcccgaccgcccgactctaccgaggttgaccaggagtgcctcgacatttcattgggtttggaggctgaggctgcgcttggaaagacctcgtacattgactgcttccgaggaggtgttgcccgaaacggtttccgagtctggactggtatccttctccagggtttccagcagctcactggtattaacttcatcttctactacggaaccaccttcttcaaggcttctggtatctccaaccctttcttgatcaccatcgccaccaacgttgtcaacgtcggaatgaccgtacccggtatcctattaatcgatcgaatgggacgacgaagtatgcttctatggggagccgcaatcatgcttgtctgcgagtaccttgtgtatgtgacgttcatctgcttttgtttcatctagattgatccgtttagatatctaatcccttactttgctctcgacatatgtagtgccatcattggtgtcaccgtcggtaagacttctgacgcccagaccatcaacttgaccgcccagcgagtcatgatcgcctttgtctgcatctacatcgccgcctttgcttccacctggggaccgatcgcttgggtcgtcatcggagagatcttcccgcttgctatccgaggaaaggccatgtcgatggctaccgcctcgaactggctctggaactttggtatcggatacgcgaccccctaccttgtcgaccagtctacgcccgagctgaagactgcctcgcttggagtcaaggtattcttcatctggggatcgacctgtgtcggctgcttcctgttcacctacttctttgtgcccgagaccaaggggctttctctcgagcaggtcgatctgctctaccgagagtcgaccatccggggctcgaacgcctaccgaaagaagttgatcgacaacgacgagaccttcatgcaccgagagatcaccatcaaggataagggagcctctgtcgctcaccacgagaccgtttaactagtttaatttctttttggtactctgggccttttctctctttgcttttctcttcgagtactcgattatctttgtgcattagttcctgtttgtataccctccatgtaattcttccctacgttcttaactccatgttgttcgctatctttccttttgtaatcaaaatctttgctctgcatgtcacttttttcattctttccatctatttgatgtcttaaacaaaaaatcggacacaaaagcgaacttaaactcctcacaaagaagcgtcctatcccaacgagtcctttggctgctcaggacactctaacataaaaccaaagtattttgaaagtaaacacccagaagcctttgctagagactcttttcagagtcttacagcgttcaacaagacctcttgctccttcactgttcgatccgtgtcaataaaaagataaacagccgagaatgatatatcgtgcggaaaccaaacagaacgagcgccggtccgcttaaataagagcaaggagaagggagactctatcgacgagcaaaacgtttatttcgtcgtgtcatccatatgagttagaaggaacggaccgcgcgaacgattctcagaatgtcagaggaggatatcaatcttttgtagaatcatcagttcgggtttccctcggttgaagttcgacctgtccttctggttttaaagtccgggtgttgttcaccatcaggccatgacaagttttcctttgctagtcaatacgtggcttatcttccgagctcaaatgtatgctcattcgcttctcgcgagccagagacaagatggtctgacaataaacatggtgattttatgaggtttacgatagtaaaaggagagagagaaggctttaatacacggaagagtacgggtaactagacagaaagatcacaaagagcacagagaccaatcgaaggaagaaaaggagccaaaagagtaggaagcctacgagacaatcatgcggtagcctcgactgatcctgcttcttcttgctgctcggctgcttcttgagcctccaacgctgcctctgcgtctgcaatcatcttttcctcctcagcggcttgtactctctctcttctctcccttcgctccctatccaactcggcatacttcatctgtagatcccgctctctcgccaacattttgtcaacctcgatctgaagaccttcgattcgtctaggtgcagcagcacgttcgaactcaaagagcgaactgaagctctcaagctctcgttgggttcgttgaagatcgtcgtacgcatcgacaatccgtttttgtatttttgcattgacgacctggtaaccgccgagcactttggaaagcttcttctctgtcttcgtcgccttggtcgcttcggcgatcatgagctctcgatcctgaagaatccgagcagcataaccctctatgcgttccgaggaagagaccgacccggcttcgacccaagaagatgccgaggcagaatagcagagagattctcgcgtcttgctccagctcaagtcatccaaagaatcgattccactctcagtagcgatggagaggatgccccgtttgagggtctcctcattcgctccagggaagcctagggagttggcgagctcagagtgtatgagcgaacgagcggttgctagatcgtcatcctcaggtagttcatatgtcgaagatgcacctccagcacgggaggttccaggcacaggatgaacgattgagtcatgctcgaccaactgaacaaactcttgatccaccaaacgaagcgctcggtccaaagcgtcgtctccggtggaggtaaactccaaagaaagagcgccgaggaggccatcgacgtcaacgttggctggtcgaggaaggtttttctgaacggcctgactcctcctcttaagagctttggcagcctccttctcagccaacctttggagcttcgcatctctctcagcagcatcctcctcactcagtggggcctcctccacttcttcctcgatctcctcctctggaagagcaatctcgaaatcgttctgagccttgggaagggaagcgaaccctcgtcgcaagagatccttggcccgtcgtctagcttgagcaggagtatcgcccatagcaggagtcatcccaccatcagccgagttgatgttcaggctgtctcgcataggcgttcgaagaggggtggaagaaacagatgaaccagcttcggatctgggggtagctccaaaatcgacacctccggttcctcggaaaggagtagcgagcgggttaggagtcgaagcgacctggtggagtggagtagcaccttcaaatccagtcccgccctgaacttggtgcaggggagtgttctcgtcaccaagcagaggagtttgcgtatgaatcatgtttcgcaaatttcgagcctcagccataatgttgtcctctgacaaattgatgaaaggcgtaacatgagtgattagtgtctacacaaggaagagaaccagaaggagaaaggaggaggaaactcacgttggggagctgtcctaggtgtcctagccatcttggccttgcccaagctctcataatcccccaaaagtctaccacttgcctcgtcacccccttctccttccactagttctctcgatctctctccagcctgtccgatcttcacaatctcctccaactcaacctcacccacctgaggagcgggcagatccagtctccgtcgagttccgatttgctcggcctctttcagcttctgaatctgggcttctctggcggccacaaacgtcgggtttgccttcgcgttgtcgctcttggccttctttcgcttttctgcagcttcatcctcctcgttgttgttctttcgcttgccttcgagcttagcgagcgcttgaccaataggggcggcgtatcgtcggttcttctcatccgtggtatcgtaaaatcccggcgcgggttgcttgttaaacgggatgtcctcgttgtactaaaagatagttataggttcaggaaggcaggcattctcgtcagcattggccaattgatgcatattcagatgggaaggccaaggatagagattcagttttcaactcacatccatagcgttctttttattcttaggcttactcctcgtcctgagatgagaacaagacagatcaaccatgttcaatatggaatgtctttattctaagaagacagcaaaacgaagtgtctactcacatgataccggcagccttcaattctctcttcttctgcagaacggcgagccttcgggcctcctcaagctgacgttctcgagccttacgcttcgccttctttccctgagtgttagcaagacgagctcgggcttccgaaagcatttccttttctatagacatagcaaatcgagacacaaacaaaagtgagaaaaggaaaaggataatcagcccactactattcgcgtagtggtaatagaagggggctaaggaagagggatgtcataccatcctcgtccatatcaataggatctggcctggccggcttggtctcgggatctggatccacctctcctggcctcaatcgcctgacatcgtctgcactgggaccagcctctggccctcctggcccagacaatccaagctcatcgttctcctttgcctcggcttcatcgagcagcttctgatatcgttcaagacactgggtggccgttcgaccgacaataggagcgatcgttcgccactgagtcggcatgagcttggccagatggaggagtttctcatcttcggtctagaagtgaaaaggcgtggacggatggacggacgaaagaagtaagcaaaaagttcaggaagactacctcacacaccagatcgaagtagaacatgcctttgaccattcgactttcttgatagaaggatctagccattcataccatctaaattatatatccacaggcgtaggaaaggaggacgatgaaaagagtagaaggaaatgaagagaacgtgcgtaagtatccttctcatatcaactgacgcgtccgcatcatactcaggtgacagtggaaaagtgacgtttggagcagaaaaactgtgctgaccttgctttgcattgcttgggggtctttcttacaaggagcgaagaaatacgagcccattgctgttggtgatttggaacgtaagcgatgaatgtaagcaaacggagaagatcagaacacggccctggaacgagcaattctactatgagtctattcacgttctttccatacttggagatggcagccttgaggatctcgtcctctgtatttcgccagatactacagagatagaccaaaaggaggaggatcagattcactgacgactatacttgaaggaacagtattagctgaagaaatcctgatcgtggacttggacataccctcccttgatgatgattctctaatgaaagtagccagagaatccaaatttaagcacgacgagcaggaagtcgacagtgaagataccaacaaaagccggaataagcagcattctccacagttcctctgagtctcgatcaagatgatgggaaaggccagacttacgaccatgtttctcaagcggatgttctcgtctgtctgtgggagatgtgggaagaggaacgagccaactcaagggcggggggtccgtgcacaaaagaaagggcttacagccatggttacgcacgaaccattcgaaccggatgtcaaccgctctcaatcagtgtaatcataaccggttcatggcattgcacagcttttacagttcccgtgccacaccatctcggtctctggctttcttgttctgcctgcctttcatctctcgacatcaagaggtccattttattctttggactccatcttagcaagccatgatctctgtaggtatttcttccttagtggtagatgaatggcgagatagttaacaagatgtgtgaggctccttcttccatcttcaccttcaggctttctttgtgttcaatcagaagggcgaggttcgtttctctatcgtctgcctctctctgtttatcttctatgtagaaagacagaaaaaggtctgttcagatgtttgagtgagaatcgattaacatttgatctcaatgttttattctcaggtcctcatttctcggctgttccgtgcggatctcaagtgcatatctctttctcctgctttccctaggtctatccttgcatttgcatactgacccgttcgatctgtccatcttacctcggctcttcaggcgatctatagcagacgtgtttcggattcaggtcgtatcgaacgctgatgttcgatctccaataatcacattgggatcgacgtcgttctttcatgttcgtgtaaacaatgtttacgttctagcagtcacaaagtacgctccgttcatttctatccatgttcgtttctatccaaatagcgagctaacttaactattgtggcttcaataggacgaacgcgtcggccgctctcgtgtttgaattcatctatcggtttatctccatttctaaatcatatcttgggaagctggacgaggagagtgtgaagaacaactttgtgttgatttatgagttgttagatggtaagcgtatccctcgatattacgacatcctctgtctcttctatcttggatgtgttgtaaactggtttcggttcatatctcgttatgggtggcatacagaaattcttgattttgggtaccctcaaaactctgagaccgacactttaaagatgtacattaccacagagggagtcaaatctgatctatctttggtaagcgattacctctctgggtccaaccttgccgacgttggttgactaatcaacttcttttccgataaagcgagacaattcttcaaaaatcaccattcaagccacaggaaacacgtcatggagagggactgatgtcaagtacaggaagaatgaggcatttgtcgacgtaatcgagaccatcaatctgttgatgagctctactggtcagtctttgaatgcgcaacatcttccattaaaagagtcaaggacagagcgcttaacactctttccggttgatatgcaatcattcgaacaactgttcttggacgtgacaggaaccgtgttgagggcggacgtagacggtcaagtgcttatgagagcatatctgtctggaaccccagagtgcaaattcggactgaacgacaagctggttttggaaaaaaggtaacctcagtccgtgtatgtgcacacaaagagatcacggcacttattatacctggctacgtgttttctttctcgagaacagtgaccgatcccgctcagcagacgccgtcgagctagacgattgccagttccatcaatgtgttcggctcggcaagtttgattctgatcgatcaatttcattcattcctccggatggtgaattcgagcttatgaggtcagtcgttatattcggacctgactggcaccaagctctctatctgtctttatacgcccggttattaacatggatttgcgcttttgtgtcgaacagataccgatcaacgacaaatattaacttgccgttccgactacatccaatcgtgaatgagattggaaagtctaaggtggaatacacgatcaatttgcgggccaactttgatggcaagttgaatgcaagtggaattgtgcttcggattccgacaccgttgaacacgactaaggttgactgcaaggtcatggttgggaaggctaagtatgttccggccgagaatgcgatcatttggaagtaagtcctctcttgctatcatctttttctcccccaaagtaacgttgcgagtcctcgcgttggtcaccagttcttactctccagctctttcttttttcttcggaatcttttagaatgcctcgtctccaaggtggacaagaggtgacgctgcacgcagaagccttcttaacagctaccacacaccgacacgcatggtctcgacctccgataaacattgatttctctggtgggttctctttcgactctgatatatcaaaattcattattgactgacgaatgatctctttgtatcgatcaaaaatgattaaaataattcgatataataatataaaaaaaccctatcagtcgtcatgttcaccgcatcagggctgttggttcgtttcttgaaggtgtttgagaagagcaactatcagtctgtcaaatgggttcggtacgcccttgtttctcttccctctgttctcttcgctgataagtagagaaaatcaagctgatagttggatgcgcttgttgtgatctagatatctgacgaaagcacaagggtcatatcaagttcgggtgagtggctgttcaagcacacgctgtcgtatcatcaggtaacctctccgttgaactaacatgcgctcttcttctcaccctgtccttcagttttaatgcatcctacggctgtcaattcgattactctgtgtgatgcttgcttgtctcttttgagatgcttcctgtttctgtattatatattgtagtttggactattcctcatgacacgtctataccgcgtcagatacgtttttaccattgcgcacttacgtaaagagtgtggagaacgcgtgatcaagagaggaatgcgcagcaagggcagatgatcttggcataaaattactgttcctgaacgttcctccgggtattccactagttcctgttcctgaaagttcctcgaggaaacggcctgggtccttcccgcctttcctccatctccgtcgatatccaatactgttactactaccatcatcatcaacaacaacaccaccaacatcaccgccagtacaattccctttaccaaatcatggctatatgccattcacatctagacctacaagatatccaggagggatcatctgtccgaagcttctctctatcacccacatttcgagaggcacgcctgcatgagccttctagagtcgaacacagcagtgcccgttcaaaaatcagtttacctgacgataagagctctcgactcagtgctcacaaccaaacaagcacaagcactctgaccaagagacattcccgtgccgtcgagtttgagcccgtcacacatatcattgtccttcctgatgccgagaaaggcaaacctagagttcaacttaggagaatgtatgccccatttatagatcactttttgttcaatagtgttggacaagaagtgaaaggctgacaagatgtcggacgtcactgtgcctcaacaaccaccttcaaggtcgatgtcactctcgttttccaaagctccttctgaagaatccttggatgatcgtaagtgttttcatatcaacaagttgttatctttgtttagattctactgacctcgaattgagttggggcgcccgataatcgatacagcgtccttcattcctacatctcctcgtcggatatgcgtacgtgtaccatcactgacacggtctcatacccggtcaaattcgattgatcgacaaagcaataaccagcacctacgaccatgcttggttcatagtagcgacagctcaggatccagttggacgagattggaccatcaaagtactggacacgtcaagtcattcatatcgctcaagacctcgcctatatcaccaagagaacgagtccctagcgcacctattgccatgtcttcttctgccccctcgcacgagagttccatgctatcaggatttatgtctcgaccgcggccgaatagatcatcttcaacgagtagtagtagtttagccggtcgatcctcgagtcatttagatgatccaacagaagctcttcgagcatgctgcctggcctgctatcgtggaacagatttaggtctccaaggcgaatgggaagacgcaccttggagttcaggcgctaaaaaaaagaaacgaaaagatgacgatgagagggagaagaagaaagcggaaaggaaaagaataggagagaaatatgggaagctatctccattgttaccgggtgggcttatggacgaagtagactgggaaaacagtggcatgttcaacaggttcggtacagacgtagtcgtcgatgaggtcacactgacccgaagagacccagcagatcgttcttctggcaaagacggtccagttggtctcaatcactcggtcgctctgcttcggctggatcactcgccctcttccagtcctcaagcggatgaatctcccctcctctctccaagccagatgcgaggcgacctttctatgccttccgtctctcctccctggatgccagacacgaaatcacctcgaattgataagccggccgcttacgacggcatgccttcctcagaagccaatagctcgttctttcccgactttcattcatcctccatctttggaggcgaaatcgtcaaggccccatctccaattgagactccagaactatgcccgtcttctaccacacccaatgcagggcttgattccggaaatatccctacaactcactctcattcctcttcttcctcgacagatagccatctgaatcagacctcaccgccaccatcgttacctaccttaccacttttgcaatcttcatcgatcggtccctcgtcttcagcgtctcctgtcagctgtccaataccgacgacgacagctccaccattggcgaaacgattcttatctggattctcgttcggagggattaataaagtcttcaaacatagcacaaaagaagcaggcgctggtcatgggttcttttagtccaggtcgagtcgtttcccgcctgcacactgttcctcccaaccttcctttcttccgtgggaggatcatctctacgaagccgtttgccttgtccatcttgcaccttgaagtttatatctccaaatgtagctatcttgttttatctcatgtcaacatgcgtctttctcttcactcgcgtcttctcttttactacatcttcaacaatttgagagttttcttctttcatatagtcaaccgttctgtctctgtctttgtctatggttattagattctacagctttctgaatgaggtgaaacttcaatctcccttcgtcctcttttgatttcgtcttaatttcaattgttccctgtaccaataaatgtattgttctactgatggctcgtcgttttcgtccatgaatgtggtggaaaggggaggggattttttcttctctttcccaaaaagaagacgagcagagagtaaaacacagagtagtaacacactagagtaaacaatgcacggtatagaaacagaatgataactagaggagaactaataaagaattagaaaaaaaaggaggaaaaaaagtacagtctaaattcccttgttacagttttcatcgaatcaaaatcgatacaacaaaagagtagagtagattaaggaagtaacgaagagaaaaaaatgatgcgaagaaatactgggattgtgattagaagaaagggcagaggagggaaggatccagttgaatatgattgttgatcatccggtcgcagaatcttgatctgacaactctgactctgagccagccgcatgaacacgagcggcaacttcaagctcgacctctgcatcagccagcatatcttccttctcttcttcatccatctcttcttcaatctctgccttgaccgtttcctttttggatcgtttcttggctggtactgctctgggagttgctttgggttttgctttggccgccactggcttcttgaccgtagtctttgccttttcaggtgattcgctctgtttggtttcgatctcggttttaatctcggggtcgacatcagccttagccttagcctttggcgaaggtttcgcctttgatttagcagtcgagactgctttctttgacttcacactcggtttcttctcgtcctcgtcctcgtcctcgtcctcgtcggcaagagcggcggcctcctcagcagcctccttgtccgccgctttctgctctcttcgctgtctggcttcaactttggctttcgcttttgccttcttcgcctttgccatcggcgtcaacttcggttttccagaagtggccgagacagaatgcccttcagcgtcgaggatgacggcaccgtcatcttcccctgaatcagtgctttcagcaaacgtcggtgtcggtttcggaggaagataagatcctcggtggaccgggcccagattatagagattgaataggtgaagaacggcttgttctttgtctgtcaacgtcatggtcgggcacaaaacgcagaacgaggatcaagttagccaagacaagaagtcaaattcaaaacaagaacgagtctcaagtttctcacctttagcctcgatcatcaaatcgacatcatccggcagacccatcctgagtccgaactctgatagaatatccggcttcaaagcctcatgccttggattcccctcttgcaatcccagtaactttgattcctcctccgagatggtctcgcctgcatcctcccttcgtttcttttcatcaatcgcccgtaaggtgatctccctactctcatccagggcgagcggcagccggtcacatcgatccgaatgcccacggcgttccatgatcgtaagtgcgccatgcctggcttcagatagatgctgtttaactcgaatccctttaggttcccaagtcttgaggatgaaaggcatcagcaatgggggaggtagatctgatgggttgatccagtcatgatgctgcatcacggtcaacgtgatcgagaaaagtaggccaatacagagacaattagcctagagcaacgcaaaatatcgccttaaaaagaagcgtgacatacataatcgaagaccaagggaatcttcagttcgtcacagactggaagcaagtccgaagcagaatagcatatctgtttagatcgaaaacatttgatgttcaaccatgcatagttagtatcattgatctgtaccaaaaccaagaagtacatgccagctaaaaagaggagaaagagttgggttcctacctcatcattttccaataccaagcgctgtttgaccttctcagagcacctaggatagttctccctgaacctctcgagcgtcgcctgtttgtcgccatacattcctccctgcggtacgcatgaaaagcacataatgaaaattcgaagaagaggacaccatcagcttgccagttgacgtatctgccagccaaagacggagatgaaacatgaatgaagaggagggaaatctcgaaccatgtgtatgatcatgacgccgtctttgccgatgcccatcgactcaagcatgtcgcattgataatcaagctctagaagcgcgttttcgaccacgctagcggtcggactcgccagttgggtcctgttaggagtaaatagagcagacacaggtatgtttaatgacagggattcatccgcggagagcgaaacgagtcagtcaagcaagacagccaaaagcaggaaagagagggttatatggagacgaaccattgacccgggtggacggtgatccgcatgtcgtgttccttggcgatccttcctgcttctgccatatttttcattgcttcgggcaaagtctctcggatattgtacccatgttccttgtgagacgcgaaaggaaacatctgattcggacaaggaaaagatagcgagagcgccgtcaggacggtccagccaacaaaaaaagaaggaggaagaaaatcacttcagagctcagcctgaacaaacggataccgttcttcgcattccactcaagaatggtgatcaagtcctttgtgttctgggtagtaagctcgacgagcctattcataccattatcgttgaggaatcctttcaggcggagcgtccgggagcagaatatgggaggtttcgcgtttcggaggagcgagttcaagcaggcctatagaaatgtgttcatttcgacctcattgagggaccagatcatcgtcagaagggacgatagattagagtacgggaataaacgaaagaaaatgacatacataacccagtcttcctttaaatgtcgtaggcagtttttccaccaccggcacatcatggatcactatctcctttcccttccctctaggttgcttcaccttcagcattgaattcccatcttcacccttgaggacctcgccgtcttctccaagttggtattgcggtgcagccttctttctagcccgtttcggctttggtgtttgttcctcctcctcttcgtcttcttccttcttaacagtcaggaggtcttccatatctttatcgtcgacgacgtatgcagcttcttcacccgcctcaagatctccggactttcgcttctttccgtgttttgccaatgtcttggatgcagcctttggcggtggggacggcgtagcagggtccgacaaggaagacgcggtagtcggcgagggcggtgggttcatctccacatcattcgttcctacgattggcgttagctttttgctctttcgtcgagccatcctctttttcgcaggcgcaggcgcaagatcagccgaagacgatggctctggcgaaggagagacggacgagacggacgagacggacgaagagcgataggatgtggcctcggctgcagaggcagcaatcgctctcgaagccgcacttgaggctcgacgggtaggcctaggaggcatctgttgcaatggtctgcttggatgagtaaaattcggatgagctctggatgtgaaaaggcaaacgtttcgaacggcttgcaatcggaactgggcgatcgggtgaagtctggacagggacgagcgtagaaggaagtgactcgcggcagattggttcagccgaggaagaagaacggaactcagtttgaaagagcaagattcgatgcttagtctgtaagtccagacccaaagtgagcgttatggttgagggaagaacaagacgaggacgagagaacgaaaagagaggacgggaaaagctgcaaagagaagggaattctcgatggagagtcgctcgacgaatgacttgatgacgtatgcactcgttttgtgtctcagcctgatgccagcctcacaccagagttcattttaaaatcagccttcagaatgggatccagcatgggccgtttgtagattcggatgggcactctgtttgcctggagtgttttgagcattcattcatctatgatgggaaagattgaaaaaatgaaaaatctatggagacgaatcccgtttttttctctttcctaatagaaaataaattgagaaaaaacagacagacagacagacaacacgtgtgaaagggaaaaggccggtctgatgtctagatgttcagccggtagtctgtctaactttattctccaccgcacaggttcaacaaccggctgtctaaagtctctgtcggaccgtgccctacgagatgcgagacatctgcccatgtcttgagaacacctagaccctgccggttgaggtggagcgtcgtgacagatgtattgggcaggagggcagggtgaatgtctggaggaagagagaggagtccttcggatacgagatggttcaaaagacaacggactgtttatggttcattttgcagtgtgttgaaataaagaaagataaagtccaatagatcaaacatattataggagaggctatatgagcaagactcaacagacgtgactcacggaaagctccgtgggaaaccaatgcaacggtgtctccgttggccttctcggcgaggcttaggatttcatctttccagaaagcgagccctctggcttgcatctgcggaaccgtctctgcatttgccggcataggtcgggaagaaagtgccgagatttcaagcccttggagggacgacatgtactaatgaaaatggggacaaaccagacatgcgggcatgagctttcaatagactgacagatctgggaaaaacacaagaggaaaagagaggaataagaagaagaagttgctcactctttcacgcagtcttggtgtagtcatcaacgtaggaggcgtcgctgatgccgacagcaggatctttgcggtctataaaatagaagaacgccattagagcagggtgaaccatgaagaatgaggccttttaagtctaaaaagagaagtaaacaaacctgggctgctctcataagatcgctagaccagacgtaagaccaaccgtcgatgacactcggagcaaatgcattactcgccaagagactagcctgatggatacctgcctgattgagcggagtgtctttctgtcccttttgtgtaaggttgcatgagtgagtcagtaggagaagggaagcggaaacgtggaaaattaccacttctggtgaaggaacgtacttgaatgattttgttggcgttgtcgtccgtttgtccatgtctgatgagatgaacgatgagatcagccatgttgataacacggcaggggtgtgcttatgtgcgttaatgtggacggttgggcgtgtggtcaggatcggatcagggtttgtggtgtttaagatacagagtacatattacatattacatattacatattacatattacatactcaaaatacacagtacacagtgcgaataagcaggaaaaaaaggatccgtgccgaacgaagcgtccaaaggaacagaacgtaattattcatctgtcattgatcgtctacttaattagaacgaccttaatcagaacgacccgaccaagtgaaacaacacggtttcatctgaagcctagttacggatttcccttagtgcgattacaaataagaagtattcagaattcttgagaaagttgagattttcctccgttttgagcctgttcttccctttgtacatcgttctctttgagtatgtgaaggttgttctccattttgctcggtggtaatgaacgatggtacagaatgcctctcggcggaaggctcactcggagaatttggttaaactctacgtcatatctgaaaatcaatttgaatttaggccggctttgcctgcgttctatgtattgccaattgatactttcagcattcggcctgcgacacgtggcgatttccgaaggctgcgaaggctatccggacgaggcgccgaacgggaagaagaaggaaaaaaaaaagagttaaactaattttccattaatgcacagccacgtaaagaaaaatcattaataaccctcgccccttttttcttgaacgctgtcgtcatctgaggacccgcttgtttaccatttccacgtgacatgatcaataacgccgtcggttagcaccagacagcggtgccgaaggcggtcgggcagctggtgctcggatcctccttcgagcgggcgatcttccgtctcttttgtgcctgtccctgggaggttatttttttttgtctgtgccttgtgcctgtttttgccctcgatatactctcttcattcattcatccatccattcgttcatttccttctttatttctcttttctcttcgtcctttctcgttctctctctcgacaaaaactcacccccaacccactcactcactcgctcatacaattggctgtttcgctccgtctctctctctccgttgacatcagattcacgggagagctcatggagtcgtctgtaggaaaacatccggatcacttgcctgattctcattcgtcctgtccttcagaacaccgggtcaggtacgttccatcgaatggtccacctttgacgacaggcaaaattggtgtatgctgacaacgttttcttgttctctttcgccttcttcttccctttccctctctttcttctcctcctcctcttacacttttgttcatctccattctgctctttatgatttcttaatgatggatttactgctctggatggcggatttttttcccttacttttttttttccccttcgctctccccttattctcgttccactaaccgcagagcgagagcgatgctgactcctgaacagtataccgcgttgagtgccctttgggctgaggttcgtatccttctctcttcgcttttttccttcacatttcttacttgtctcttcctttccttctttttgcctttctttctaaagactcaatttccgacgacccatcagcgagtcgaactggcagaacgaatctccatgcggccccggacagtgcaggtgcgttcccccgtgcccttcatctcgttcttttcctcgtcattcacaccatttgaagcatcaaggctgactcatagagtgttttctcccgtatcactcctggccgtttttattaaaatcgtgtccatcatccatcatttccaatctccgtcattaaacacccatctcgactgaaggtctggttccaggtaaacagtctccgtattcactgcccagggcgaataccaagacaagatgctcaacttcctggtcctctttcctttacagaaccaacgtcaaaagacaaaacgtcagtctgtccttcaagcaggaagcgcgtcaaactcggctcatcatatctcgacaaataacgagcaaacattctcgacccatatgacccattcctctcaatcccccatctatggcacatactcgtaccaccattcaattgttgctcctgcagcgcatcatcactcaacctccaccccatcaagtcatcctttctcgtccacatctgtctataatccctctggacataaattctcagctcctgccgagccagccctccctacgcctctgcccccggtgaaaacctctgtaacagcacctcccataactatcgacattatcgttcatcccacagacagaaaaccaccttatttccctcctaccagcattgtctctgagccaggccaccggacctgggatcttgaaaacaggccctcgcatcctttcgacaagcaagttcagtggggctctccaagtaggaagccgtcttggcctg

SEQ ID NO: 1766 - DNA, 14761 bp, Xanthophyllomyces dendrorhous
ggccactaccatacatacggtagcagcgttggtgattctcttcattcgatcaggcccttgtttagcgaacctctcaggagtcatcagtcacagtcgacccgtagacaggatccggcgttcagctcggccccggctcctttcccgtccattccaaagccttatccaaccatcccaacctctccagtccttacgtctacctctacgtctgggctgatcccggacgttccggctttcgagtcgtcggcaacgactttctcgtcaacaacgacaacgacgacaatggtattgaatgcaaattctatcaaccaaagcccaacgtcaaggaagcttccttcgtttagagaatttctgcagtctaccgtttcgtccgaagctgatcaaccggacccgatccagatgtcattggccgagagtgggaagcataatcctcactcttcctcatcatcgtctgcgtcgttcgcgccaccaatcccggtttcttctcaaatgtatccattctcttctcttgaacgatctttcggatccagatcagagtataatccaaggagctcggcatagatccgctttagctagctctattttcgtctttgacctggaggtagataccggctttccgtcctgtctttcctttgctacctatgtttcttttcgctctttttaggttgttgtttgtgctgtcgttgtgcgtttctctcttctataatacctttgccctctcgtgtcttgtttcccatcatctatcaggtatatgcgtgcgcctcttcctttctgtgccctgcgcgtcttcttctcaaagtatttgatctgtgtatcgctagtgtcttcaatcatcttctttctctcggtcttcgatctctctttatagacttcttctgtgaagcctttcgtgcttccttcctatctctttctttccagtgaacgtatctttcttcgtttatttgttacttctttcatgcaatcctcccacgcactctctctctttctctttgcccccttttgcctatgcgctataatgtgttgtttttgtcccgactcccaaatcacagctcatgatatatcaactggctggttcactgttggaacggaactcgttctcacccttcaatacaaatacaattgtaagccttaggcttggtgggagtgaccgcaaccgatggcagccgatacatggcccttttggatttgggtgtgctttgatcgcacaccactaaaaccccatgtctcatgagtttaatctacccccgccgatgaggcatcgtcagcctcagtgtcaactcgagcgtaagcctcaacctcagcggccagagcagcagcagcggtagtgtcaaataccagcattctcgccccccacgccttgttcctggtggaaggctagatggagaatgttgcgcgatgcattggaatctctgttccaccaagtctgagagcaagcagagagaacggtgagtacttgagacaatacattgagatgtcattttgagagaatatcctgatgtatacaatatacgcgattcactctacagacccctcggcactctttgactgcccacatcttgcctctccccgagagctcgccatggcctaaaaatttattttccgaaggattcttccttatgtatttatcaggatcaacgtagagcagaagataaagatacatcaggacgggcggtgagagtgatcgagagaatgcattgcggatgtttatacataatcgacatggagcgaagaagaagcgaatagacccaaaagaagatgaaaaagaagcaagaagaagagcacacatcgttcatcatggtcgtaatgatagacacgcatgaaatagaattcaaagagagtgttccttaattaacacggaatgaattgcaataagttaatatagaactaagtaacacacaaagtataacggaataaatttgacgtaaaatcggctgatcacccgaagcaaggttttcacagtttcagggctgggttatcagacagtgatagagtttgtcgtccgtccgttaagccttctccggaacagggacaaaaatagaaacagaagagttgctcactcgcgagctgaatggctggatggtaaagatggctagatggctggatagctggatagcaggtcgaacagacacgatagttcggctggattgcctcaaatagacttggccagagagcggccatcatgatctcttcgtacggtctatccttgtcttcgtatcctacatccttccgttttttcttctattgatctctccgctccggttagtccggtcctttttctgttcttgacaaagagacggaacgggaaacatcgagcaatcccagaacagaggcgagacaagaggacttaaccaacaagtggaagagaaacttgaactagggcctatcctcgcagatgtgtcattctcctttccggttcttagtctcgtagtttattcatttattttatagttcaacgtcttgtctcgttgtttctcttcttttttcaaatttccaccaacaactctcaacgacgtgacaagaacaaaagaacagaaggaagatctgaagcatgacacacgagagtgctcaaaaacctagggggtgatgaacgacgtgtaattcatcaaccaaagacaaccaggaaagcagacgttccagacgtctttctttctcgtttgttccatccgtggctatcgatacggtatcccagatgaacgacaaacgatgggcgaaagaaaagggatacagaataatgataatgaaatacccagatgacgacacagaatcccaatagacacccgaaaaaaaacaccacatataaataggatgtgtacgtatatagaagcaaaagaagatagaaaagaaatctcaggccttcttctcctgctttttcttgaactagcttgagaagaaaacaaacataagctagctgaggtattgtatcagtcgagaccggttcacggtttgaatataatatcgacctaaaaaggtaagagagacaaaagcgaacagaatcaattccatcttgttcctccgcttttgagggaaatatgctttgacgaaccaccttcatcagtccacgagacggagtgtcttgggaatctaaactcttggagctgcaagatcgcctgaggggacgagcacttttagtgtttccccaaattgagttgagagcacacaaagaagaggaaacgagtaaacagatcaattctcgtttctttgtcgagatccctttgaaagagaaagaaacaaaaggagagagaatgaaagactcacgttgcgctcggtcaacctgaagtcaggattcacaaatggttttagactgacaatctttgctccttctttcaaatcgagaaagagaagcgaaagtctgtcgttgagaatggatgaaaacgcgtagttgttgcaaacctgaatgcggatagaaagatgtttgagggaatttccaaagaccaagttagtcgaacagacttgccagaagattcgctcttgcctagaaaattgaacgaaccaacaaatcagccctcttcaacacttctcctacttcctttaactcgcagaaatctccatgccagagtttgactcgacccggcttgacaccccacatcccagcccgtcgtttaaattctgcaagctgatcttttgccaacccggccggtccgtccagttgctcgcacccgaatgactcgcatccaacctgaagagcagtctgaaacacacaattacctacccccgagccaagatctacaaacgtcgaccttggtgtaagaccggtctgacgaagcaaataggaaagaaacgtcgagttgagctctccatacgtgtttgacgagaacggcacgtaatcctgtaagaagggtgagtggtcaaggaaacgaacgaaatacgtaagagagggatctttaaacgacaatttagtctatctttttgggccacaacgtaccttgagcttttccatccgcggcccaacgactcgctggtagccctgttcacatatcattccccaaacatcaccgtttaaccctctcattccttcgatcgcttttccgatctctcccttctgtctgagatatcggatcaggttgttgtattgctcaactgcctggagaaacataggtaaggaaagcacgttgggcgcaattgaccgggtaatcgctcgaatgatttggctaggtgtcgggtgagccgccggaagaggagacgagcctgtggaatttgggttgaaaggagaagacaccgcaggcgttgtcgggttggatggaaccagagaacgcggaagtgggagaggtgtgttgagtgaaatgggttctgttgttgaaggtgatcctagcggagcaaggggaagggaggcagtgagcggtggcgacgatggtgtaggttccgatccgagaggagaagcaaaatcttgagttgaacaaaagaggcgttggaaaaaatgaaaggatcaaggatataagcgtcaatgaatcgttatgggaccagaaagaaccaacactcacgttccagcacgatctttatcacgcgacatatttccggaacaggatgatattctcctacggccgacttgggttgtaatagaagaaacctttcggatgctccagacgggtagtctatcttcaccgatacggcttctttacgtttctctgtcgagttgaagacttgtagtaaaaatggcctcgacacgaagagtagaagatggatggtagaagggaagaagaagaccactttgcaatcagcgcctgtttcaaagcgacatctcacagacggaagaatcgctcacaaggtacatagccaatcctctctaactccatcatgtcggctgaatgaatgaacccgtcccaactcttccagctcttcttctctggctttgctaccacagacctgtccacaatatactctccgatcggcccagacgcgtcgagcggtgtgcccgatctagctctatcatcgaaaagggtcgacggatcgattccatcctctgactctgacgataaagatgacgaagactctggatctgacgatgaggaagaagtagaagaagaacggcgccggctggacgagcttgggcgattcggttttggccgcttggctgaggatggagttaaagtggaggtcgaggcagaggaagaggcgctgtggctattagacgtgctcgtcgagacctgctttcgctttcgatgtggagatgtcacagacaacttgctattctgagatttggaagacgaagaggatgctattcttttcggaagaggtactggatttggtttgctcacagtgaccgtgctgagcgaaacggacgaaggcaagagtcgaggaaggtaaggaccaagagagctcggagagaaaggactcggaaagaaaatacgatttctacatactgggttacctttttgatagtcacacccgacggctgcctctgcctttgtacggtggattggcctggctttctattgaagaagtccatcgagtcgaaggtgacgacggtgttggttgtagatgatggtcgagagggacgggattgaggacgagagaagaatcgaacggacgaatacaaatagagaaaacgcgactacaactttcggacaaattccctaatatagtctcagccacactaccaccattaccaccatcgtcaatcccgacgacagagagtagcaaccgagcaggatgtgtggaatcgtgtgcagcatcgttcataaagaccatcagcccaagccaatacatggtctcattcaggccagcatgcgtcgaggtttgtcaccgtgtgcaaccatgtttctgccagtccttgtcctcgctcacgtttgcgcttttgatccttctttaggctccgatcatagttccctatacaaaacggatacttctgacaccaacctctccttcttctcttccgtccttcatctaagaggtccatccttggtcccacaaccagttgtgtccgctgaaggagacgtcttgtgttataatggtcagatttttgagggtctacccatagaccctcaactaaccagcgataccaaggttatctggaatttgttgacagagcaggtatctcagtatggagagcaaggcattagagatgcgttggcgagactagaaggcccgtaagtgggatttctgatcttctcttcgacttccttctcaccaactggatattgccttacatctgacctgttccagttgaatgctcgtctatgcacgtacctttgcttagaacagatacgccattgtctattatcaagtgcgctctctattcttcctcttgttttcacaccaatctccttaagtgaatattacctaagctctccgttgcttctgtcctcgacaggctgcgactcaaactctatactacgctcgagaccctttaggccgccggtcacttctcgtctcaactccttcaggagagagatcccagttcgtcttagccagtgtcggcgagacgctagggaacggagaatgggcctgggaggaagttggatgcgagagtctttggaaggtctcattgtcagacacagttagcgcgttctcttatgtttttctgcgtttggtccgaacaaggtatctgatggcgaatatcaacaatgcgcagaatgtagataacctttatacccctcaaaccgtagagagagttagtcgtctttattcttacactattaaatcggtctattaagcgattgactggtttttgcattgtgtatgaacagttcatcagcttggatccggtgaactctaccattcctccagcatccttcacagtcccccttctggattcaaaactatttcctgctgagaacgatgcgctcaacgaagccgctgatcggctcatcatcgaactagacgagagcgtcaagagaagggtcgaaaacattccagcacttgaagccagcaactggtccgtaactatgtttcttttcttcgtgtataaatgtgtctcaactttgcgagtgatgacttttttcgctgtcaaatgcatattctcaatacagcgagcatcctcctgcccgacttgccatcttgttctctggtggcttagactgtactgtcatagcgctgctagcagaccggtatatatctctttcactccatatatgcagtcgtccttcaatctctgattgttctatattttgaacacatgatcgctcaatagatatattcctacgaatgaacctatcgatctgctcaatgtggggtttgaaaatcctcgatcgctcgccaaccagctcaaagcctcgaccggtcccaagaaggtcaaaattaaaggaaaggggaaacaagacgaggccacactaagaaacggatcaccggaggagtgcatcggtcgggtcgaaccataccaggcaccgcgttcggtggacagcgacgaggagaggaggacaaaagtctatggagtgccggaccgaaagactggatgggacactttagccgaactgtgagctggttctcatgtaactttcctatccgccaacatatggatcgtgtacaatcggtaaaagctctcaaaattctgacagatcatgttgtcttgttcttttcttctttttctcgttcttttgggttacagtcgggaattgagaccgactcggacctggaactttgtagagattgatgttccgtacgaggtgtggcttcgtcaattaaatctctgttttcaaaaacgtatttcgcaaccggagttaatgcgtactccacgtattcttgactttttggacgatcgtttcataggaatgtacccgtctaacacctgtggtacgcggcttgatgtacccctcggaaacaatcatggacttggtcagtcaatcttgctctcagatatcctgccttcttgctttcatctgcacacatacagtgacgactgatggtccattcgaatcatgttctgaacgaaaaagagtctcgcgctagccctgtatttcgcctcaagaggtgaaggaacggtcgtcgactctacgacccggaagagatctccttatattagtcaggcaaaagtacttcttagcgggctgggagcggacgagttgagttttttttttccgccttttcattggacagacagaggattgtcatgttaatctgggagtgatggttgcgatcatcattgatagacaactcggaggatatggccgtcatcgaagagcgtacgaacttggcggatggtctggactgatcgatgaggtccgtctgcccagctcatcctcaccattcttccttgttcttctgccgaacctaacacctcatgccatgccttgtacgtttgcctcctttcactcaagatccaaatggacatcactcggcttcctactcggaatcttggccgggacgatcgagtgatctcgacccattcaaaagaagccagatttccctacctctctctttcctttatccgatacctctctaggatccctatccagacgaaatgtgacttccggtatgccgagcctcggaaggattcagatgaagccattggagacaagattttgttgcgtctcgcggctgacagattggggctcaagaggacgaggggaaagaagaagagagctatgcaatttggaagtagaagtgcaaagatggatgggcaggatgaagcccaaggaggaagtgggggagggatgagaagaagaggaatgggagcggaaaagttgggcgccgcggaggcgaaagaacgtatcagtctgcgagtggaggaagaagatttatgatttcgtccttacctctttgcttagcaaggttaataaattgtcgatctttctatcaaaatgcaaaaaagtgatgtgcttgaaagctttgcttgtgctaacagagagaacagaggtactcaaggctgaaggaacaacaagcaagagcggaagagagtgaacaaaagtataatatctcatgattaatccgaatcgtagttgaccctgagtccgttctcctccgcctcttcctctcgtctggcggcttccctttcttccctcgagtactgcgagaagtccaccgccacggcgtcctcgtctcctccgagcttctcgtccgagttgaaaagagttttgtccttctggaaaagctgcttgcctatgatcgtatgttaagatggaagccataagagaaacgacgaaagaagaagaaaagttagctaaactggttgaaggaggcgaggctcaaaaggaagaaagaaagaagggtgagaaagaaagaaactaaccagagagtttggcctttgccctcttgacctcttctctctctttcggtggcaatgccttcagccgttcatcctcctccctatctcttcgggctttttgttctgacaagaatgtcttcttccagttgaggaaagattctgaggtcactgccgttcctcttagccgagcagcttgagcctatatgatgttgtttcccgcaacacataacatgatcaataccgaaaaaagacaacattggaagaaaggctatcagcaggatgcgccgaagctagggagagaagagatataaacccggtcaactggagaaaaatatcaaacgaacctcctcgagctgccgatgtttctcgtcctcagcctgctgcttcaacaccactcgtctagccaccaaagaagacatggtctctctgagatgagaagctaacgtgaataccatggccattcctatactttcctctccctatgacaaagaatcggtaattgaaaaacgaagtcgcaaagagatccatcaggttggttgtgattagcgaggccatgccatgatgcgaagaggacggcaaggacaggtataggcaagacatcaaaagcgagatagaattgagaggataagcacaaggacatacaacaactttcaagtcttctaacagccactccctctctgaatcttcgagttcgccgtctagcacgtccaacgacatgtccggtaacacatctggataatcaggaggatacttgacagtaaacttgagggacactatgatcggtccgatgtgagcatgtttttcattgacgcgcaacacgagtttcgagaccgtttcggatcaggacgttaagatacaacacacgagagtcaagcttcgagttcaggcaaagagttgatgagagaagactgacgaggttcagtcgtcaccgggacttccgggtcaatctgaaggcacagatgtgttggtgagatttctagcaggatcaacacaagtttgttttcatacataaccacacaagagttcagaaaagtgagccgtccagtcaactatcgtctgaagtatttaaagacagctcgaagcctatataataaagacatctggactagaaactgaaggactcactctctagctcatcagggtatatcgactcaaggacctggatcaattcaagtcgtatagatcagaggcagatatcaaactagtcaacactccgcttcttggatgacggcataatcgatacacctaataaatgacgacgggtttgaggtaacggaaagaagattcgaaagaaggaagcgaacctcaagctcctctgccaaagtttcttcgtaacctatccaattcaaacagattttgaagaacagtatcagagctgagaacgactgtgttccaatcaaaagattagaacggcagaatactctgaagaatactcactggccatgtctaatgatgttgctgctgatggtgaaagacgctcaaacatacaagaagattccctccgtctgagttactacgacagagccgtcgatgatgatggttacgataaccttgttgtgactttgctacgataagattaggcgattgctgccttgctttcgctcttgctcttgcttattctccttctttctgtttctcttctctggtctggcctctgcctttgatttgccgtttccaacaagtagcaagaagtcatacaatcaagtttgaaagatctaacgatgtcctgttttgggtgccagttggcatcatgagaagtactggacttcaagcccgatccctcggacgggccgcagactggatctaaaatcggacgagacgcctacagagaacaacaggttggagacccgagacatatacaacagagaaacgtcctgtaatcgtttaatatggtcaaaatatcggtcgttcagtatcggttgtagatgggtatatagatagatagaaagaaagataaaaacataccccagtagtcgaggctctcatcttcaagactgccgattctttctctcgttctctctcgagcccaatcccgtcttccagtttgatgttcccagcctcaacgtcagcgtcctccgttcgtttctttagtttccattcgccaccgactgtccagtcactttcgtaactgtagatgttgaaatcaaaccgggaggacactgcaagatcccgaccgatcttggacgacattgaggtagacgaatgaccgatgagcggattgagaatcatcgtgagtgtcattggtggttgcaggaatggagtgggtgcggtgatggcatcaacagttaacccagaggattgagtaccgggaaggaacggaggaggaaggagtacatctgggatggtacaaaacctgcctgcgagagagactagagatgaaacataaaccggtgggggaacatatgagaaaatcaagaactaagcagcacgcgcaacaaggccgtctacttacttcctccgcttttctgtttcatcgataggtagacttcccctccgacggagaaccgacctcgcaatcctgggaagagcgcttcttcctcgtccactctgttcttccccacctcgctgtgaacgtcttctgtggtccatgaggagctagccggactactgggctggaagttgtatagacttcggagaccaaatagaccatcatgggcagagtaagaatactcggtcgatgtgtggccttgattgtgttgaatagaaaagagaaggctggatttgacggcgggcgtcggggaagaaggcgtgggcccaggtccgggggaggatgaagaagaaaatgagtttggtgcggaagatggggtgggaacgtgaacgaatgctacaagggattgctgttggatggacgcgtcagcggaaagggatcaagccgaaagatcagtcggtgtctatcgatgttggataagcgagtgatataagaaaagtcccaagcaagatacaagactaactgtggatctggagagcctgcttgtataaagaccgtccactcgccaagatggaaagttacatcgtccaaacatcagatagtctgtgaacgagcaagcggacaggatcagttagatctgacgtttgacgatgatcaccagagagagacaaccaagactgacctctgacatctactctccgtccgccttgccagatttcatctatctcgggtctcttgggcatgtcccatactttgaatccgtctgcgagtttgctcaggtcgactttctctgacgagccgagggcgagatctctggaggtcgcaaagtaggccagtgagcccacgagcgtgggcagagcgacggcttccaacgagttataaaatccggggacgggcgcatggctgtaggtaaagtgaaaagaggtggggattgagaaatcaaggatcgctttgcttgaccgagaaggaaagaataaagacggaaggatattaggtatgattcgttcgatgtctgatggaaccactacgtgccataagagaggacggtacctgtacttgaccgcgtgagatttgagaacagggcgtcctggtcccaacctgtgacatcaaagtatcttctgaggaggtatgtctggaacgggagcatcgctatgagctgtgatgagtgtgtgtgtgtgtgtgtgtgtgtgtgtgtgttgtatgctatgtgtatgctgtatgctatctgtgtgttccgtccgtgagagagcgagtagtttgtccgtccgggtagaaggagaagagcgagatcacggttacgggtggttactgttcaatgacgtaagcagaagtcatgtagccatcaaactcgccctgacttacgtaattacgaaggtgcctgaagccacctgtaaccaccacccgtgccatctgtctccctctcatcccatctcaagctcatcccgctcgtcccaccacacacgacagcatacatagcatacagcatacagcacccagcacacactcatggccttcctggcaggtatccaagcaggtgcaaacctcaaaaagacagtcacagtagataaatccgggcctgccctttccggtcggatcttggacggaccggccggttcatcctccacagccactccgcccgcacccagacgaccagcagctgggaacggcgacaacgacgatgacgacgcgtcaagcaaaccacctcagctcggaggtctgtttgctggaggtatgcccacgttgaagaagcgaggaggtggtggaggtggaggcccagctccaagtccagctccagctcttcctcctcccagagcacctcctgttcctcccgctcaggcaccgtcagccccgtaagtgtcttctcgatcccaatcctttctgattcctcctgtgaaaaagtacagttctagaaggcaacccaagcttcccatggtcagacgagactgacgatgttttttgaacgacccatttattcaatctcgacccgtctctctcacagctcccggccgtacgtgatgacttctctcggctcactctcttttctcgaccatatatctttttctttactgatgtcttcttaaacatccttgctccggcgaacagaccgcctccaccagcgcgaccaccccctcctccagctagaggcgctccgtgagtacagcaaaatgtgtgcttgttctctgcctatgctatgctaagatcagctcttggtgttcggtttcctcctagcgcgcctcctcctccaccgcctcctcctatggccacacgaccgtctgccccaagcctggttccagccgtttctacagctcctcagctaccggacggtagacccaacctcggaggtctttttgctggtggtgttcctaaactgaaaccttctggtggagatggatcagaatctcccccatctcctccggctcgcgttgccgcgcctccaattagaaaacctgtaccggctgtcgctgtaccctctgctccttctttgcctcctagtcgacccatgcctccaactcagccaacagaaacaagctcagctcttccagatggaaggcccaaccttggtggcttgtttgctgctggtgtacccaagctaaaatcaacgggaggaggttctgactcccccgttcaaccctctcccaaagcttacgtgctgccttcaagaactcctattcctacagctccgagcagacctcctcctcctccttctgcggctccaagtcggccccctccccctcccatggctcccagcagacctccgcctcctccctcggttcctactggagggtcgactcttccagacggtagacccaatcttggtgggctattcgcggccggcgtaccatcattgaagtccaccggaggaggtggtagagaaagtaacgaatcagacgagccttcccctagaggcgttggtggtggtgggtcaacccttccggagggccggccgaatttaggaggcctgtttgctgctggtgtcccgaagttgaaatcttcagccggagctgaaagtaaagtgacacgcgaggatgacgcgccagcttccaaactaggcggtctgttcgcaggaggaatgccaacattgaagaaatcggatacctcggccaacagagacgttcctccttttcctccagtcagacctgctccttcctcagcagtacctccacctccgcctcagatggctcctccccctagacctaccc

SEQ ID NO: 1767 - DNA, 654 bp, Xanthophyllomyces dendrorhous
ccctctgcacctcctggtcgaggaatgtatgtcattgatctctcttctaactcgtattatctaagcacagtgagactcaggctgttcttcttctgtcctcatctcttctaggcctcctctgcctcccgcaatgcccagtcgtcagggtccaccgcctcctgctcggcctggaagtggttcaccagcgatgccgccacctccgccacctcgaccttcctcagggtatgagaatttatccttttctccggttcttcaagctacatgttgagacaggataccgaactggtcgttctaactataaacttctgtttctttaaaactcgatacaaagagcaccacctgctttaccaagtagaggcgcatcaccggcgttgcccgtccgatcaggaggagcgcccagcttaccagccagaaatgcaagcgactcgggctcacttctgaggacggcaacggcccaatctggtgagcttctatgtcacgttccgcttccttgttggttgcttgttaatctgatgtcgtctcctttgatagttcctccgcctcctccggctcctccttcgctaccctcccgggctcctactgtttcacagaggaatcagataccacctgcgcccacatcccgaacttctcacgcacctccacctccccctcctc

SEQ ID NO: 1768 - DNA, 7831 bp, Xanthophyllomyces dendrorhous
ccccgggtccgagtccagccgcacgaatcacatcttcatttacacctcctccccctgctcctccttcggctccggctaggcagattcctacagcagccgcgcctatcactcctcttgcgcctcccattcagaactctaatcattcttcccataaacctacgtcctcagtagctagaccggcttcaccccctgctcaggccggtcacctcagattccctacctcgatggttttcccaccgcctaggccattcgagaaaggaagaacttatgagtacggaagtatgaacaaaaaagggccaggtcttggcttcaacctgcagggcatcctctgaggagatgatgactctgtgttctggtttcttattctcctcctctccctctttctctttctctttctcgctgcaaacccgccggtccactttggaccaaggtttctttttcttctccttcctgcccttcctctacattcgcttcctcatttgcttttatttatttattcacatcttgatctatcaatgtacgtgcgcgtgttcgtgcaatcaggcatcagttctcatcgtcagaaatgttggttcaagcttcatactctaagactcactcttcatcaaacaagcttccggtgcaaggtcactgaatggccgacaaagggcaagagaatcaagacaaagaaagagggacaaaagaaaaggggaaggaagaggaaaaggaaaacaagaacaacacgatacatgaatagcacacggaaagagacgatagagaaaataataatttaatgaaggatacaacgtttataatcaaccctctgtcatacacgatggcacggcaatacacaaagacgaagacaaatcatgtcgtcagacagacaaacatcagtaaacaaagaaagggaagggcgccaagaaagaagcgtcacgaagggctaatccgatatttaaatttgggtagttagaggtaccgtagcgcttagttgttccttgatcacttccaatctctatcatattcggaggcagaacaagagaaaaggaacggtctgagtttttttcccgttcgataacttgagaagaaagaacaatgaataaagggcgaaccgatctccagttatcaacgtccttgaggttctctctgatactctggatctcaacctctagactctgctgttcttcctcggttccgatcttgctcagttcccagggaggatgtccgtcgactgtgccggcagaacctgtcagtcggaggaggatctgatgatatttcattaatgagggtcgatgactggccggttcccagagcgcgaaatatcataaacgtttgttccccaggaacaaatttgttcgagtgaccagattgacgagccaatgaatggagaatgaaaagccgtgtgttaagagtcaccgagcggaaaaggaagacagaaagatcagagaatgcaacacgggtcttggagcgcagaaaagggaaacctcctcacgagatggttatcagtgtgattcccatatcttttgcatgttggctgtttaaaaaaaagggaatcggtcagtagacgctctatcctgagaagacagagacaagaacaaaaggacgttttttcatctactgttttatgagaattcggagacttactacatcaacccttccacatcagtcgacacggcggaggagcagtcatctagcacgacctgaaagaagagatagtaataatctttagagcatattcaatactacacccaaccgcaatgaattctactcacaaaagaaggtttgtgataacttcatcgtagcgaatcagatattgaaagctcatcgttagctcttcccaaggaagagagaatcaggtacatagattaccacaaagagcatatgaacttacaagactctagcaaaaccaacacgttgcttttctcctccagataatacatccttccattcctttctcgtctcccagcctccttctctggccggaatgtatgccagatggacagcctcgagaatactctgcagaccaacaacaatcaaaccgtaaaactaatttttaatgttgtatcaaaatgtgcatgatagaagctaactcaccattagctccgcgtcagttcctatgaattcattgtcggatgaacgcaacccaatttgttcatcaatcttaatcaaaaaaacatttgaagagacagaactcacgaccggccgctttcatatctgcgtatgaatctggatagatgatctatcgttttcatatgagaatcggacctattagcggatgtatggcagtagaaagattcatctatcagagcgcacctgatctcgaagtgagccaaggcttagatatggtctattttacaaagtttagatcagaaaaagacaccgcacaaacgaaggggagggaaaatgaagagcttacttttgcggaacaaagaaaatatcctcctttgaaggtcgaacgagattgccagaccaaactggccaaatctttccgataaccctagcgatggatgacttgcctactccattagctatcatttaccaaattggagaggttcaagggtgatgagcagacagttctatatgatatatgaagcgcgatatctgaacaatagacacaagaaaacacttacgaccaactatcaataagtggtttcctcgctgcaagtacaaaggtagagtcttatcattagacacactagaaaccgtacttgaacatatatgagagaaagaaaaatgacaagttggtcttggacaaacctctactctcaaattcaaacttttcaccaattcttcacctcctcttttagctccctcagctcctccagcaggtgctactattggcacgtccatcagctccaccctattcacaccttcttgtaccgtccccgatacgctagctagatcgtaaaatggttcgccatctgccaaaactgaaggcctaggattcacagggtaatcttcattattgagcgcatgcaaagcttgaagcgccaatcaagacaacacccgaatacatcaattcggaggccagccatgatgattaataggatagaactgaatgattacacgaacaggaaatcagagtatacactcgattggtgtaccctgagagttgagcaatatccttataactcaacattaatctattttcaagtgaaagagcacgtcgatcaggttcaagcatggtcaagctaggctattcagaacgcaagctggaacaccaaccttccacccgcatctgctagtgcaattaatagccttcggttcgagatatatccttagtgttggaatacaagtatttaagtcagccatgttttatatgagtcgatagcgcggagcatgttaatttgcgtgaagcgccgaatgaacaacaaagacttaccctctgttctactagccacttgctcattttcctcgtttccctcggttgcgtccttcgccgatcccagagatttcgtacccaaaaagattggaattgacatcaagctgtatccggctacattgtgattatgtcgatgaagcaattgtcaatatacgagaccccatcttagaacgagcgaagtatcatatcttaccagcactgcaaataagagattgtatgccgatcgtcagtctcccatttatcaatcaacaagtatgaaaaatacgacagcaatcaactgacctccacagatacttgatcacactagagataccacccatcgaatacgattagatgataaatataggtttatcggtcagtggattacactcgcttccttactctaaaatcgaacagaatcaacatacaaatcctcggtcatcccatacgcaattcgaatcttgaatatattgttgcagtgtttcatcaacttcagataggccttccacaaaattgcatgctccgtacgaccaccttggtagaaactgccttgcatgattgttagaaatatttctgttggttagttggatctcccgatttcaggaaagaaaatagacgtacgcaatttcttcggcttctctgccgattctgcctactccctgtcgatattcaccttcgagtcttgcctgaatcgcagctagcttcccaaacgctggactcacgcttcggaggatccaagcagtaaatccgtaatttctgtcgatattaaatgataccaatgacatagaattcagaaacaaagagtcagtacaacgattgataactcatcgaccttacaaaaggagggtatttgatgaaggaacatacgcaaacaaaccgatcgttccgtatagacccagagacgatgacagttgagccgtaaagataatcagatcgagcatctatgcatcgatcgagtatatcagcttacatattggtcattgtatccagctctccaagagacatcaggaaaggaaggaagggggagaggaacgaaccggcttgcaaacgtttccatataaagctgctagtgtgtcacaaaacatagccacgtctgttgtgataaattgatctgctccacctccgctctcggcgcctccctcttcaagaggctttcttttccggcctaagagtgttctcccttcattgatattggtgttgatagaggaatccataccgggtggtacacctaaacccatacaaaatttataatagttttgtttgtcgttcagatagagatcgtggacgtatcgggtgagccttgttcgaaatgccaaggccaatttgctttgtaggtagtgaatctgaagaacaacaaccaaaatgaagattttctccattagaaaaggttatgaacttctggacaaaaggaaaggactgaccatggcgtttgtatctaaacatggtattcagcaatcacctcgaattccttagcaatacatccgtttattagccggggatgcaagaagagagaacaaggacaaacaagtactaggcagagccaacgcaaaccacaacatgatacctttcaaaaaaccttctttgtcggcgctgattaaatctctaacaatccttccatccagtctggccccaacaacactcaacaatgttctttgaattaagaaccaagagtgaagaatcaacatgaaagtttctctgcatcgaaatctaaaagaaagaagagtgttaagacgtcttattcgttagtcaagcgggaacattgattagatcttgagggaagaatgaacgcaccgagggagcaggatcatcatcaccgctcgtagttgtttaaggaatgatgcattgacgccaagtttagtattgggtggtagcggcttgaaatatttgacgtgagctgaaaacgttttctcagaaattggcctgatcacaactttggagacgcgacctttgaaagggagcagaagcgttcgggaccgtccgtcggtcgatcgaatgaactaaacatacaggaaggatgataagtcaatgtactttggtcagtcgacatatcaacagagacaggttggactcacaaggtctgcactctccttctcaaatctttggtacgcaagcaaacgttcattatcaaatttgattagaaagcaagcgagcaaaggtaagcagatgatcgaagtgtattcaatcgagcaatgaagcgagactcaggattgagaggacgtatacgtactgaggtgttgttagcggtgtcagggcttccagacgctttctttccttacgcttctcgtctgattctgtccatggactcttgaaagcggctgaccgggccaagatcaaggatatcaagagagaaaggtagactctccttcggacgggagacgattggagaacaagagcatgttgaagtatgaacgaagggatatgtttgccagccagtttggacagtaccgcaccagacatgggtgtaaatgatgttttgtggtcctacactcgatagcagctgcggttgtgaagatgatggatgctgatgaaggcgatgctgatgaacagaaacaatctggaggagagagtgaagtggaattacctgctctctcacgttcttgccggctatgaccggacgtaattaggccggatgtatttgaatgtgtataaggtcgcctatacagctaagggtgtatgcttacctaatcattcattccccccgttgtttgtctacctgtctcgtttgtgttcctctccttcagcttcgaccactccttccatcccagccatcccttctccatctctctctcttaaaaacatttcttgaccctcctcaactcattcgtaaacatggcagacacagccgtccaccagcccactttaggatcttacgtcgggtttgacagtcagtcgctcgccatcattcgagatcctgtaccttgcttcgttgcttcgaacaggatagtgcgctgatggcctccgccctttattcctctcattacttcattcctctctttgctctcatcgttcaaccaaacaggcatcacccaacagatcgaacacaagcttctcaagcgaggctttcagtttaatgtcatggttgtcggtacgtcgcatttcatctttcgaagatcacgctgcagaagtcaaactatttcagatgaacaaggaaccgctgagctcactgatcgtggtctatgcgcatatacccgtccttaatctcaggacaaactggactgggaaagtctactctggtcaacaccctctttgcttcacacctcgttgactccaagggtcggattgagtcggacgctccgatcagacagacaacagagatccttgctgacagtcatcgtgagttaatcgcttgtttcagccagagtggatagttggaaccgatcagggccgagaggcacactatcctgcttgtgagattctcacaacttacttgagatttcttcttgacagtcatctcggagaatggcgttcgtctcagacttaacattgttgacacccctgggtttggagatcaaatcaacaatgatgcttggtaagtctattgttctgcgtttctgtttcggccatatgctgacttggttttgttgctcgtgctgctccaaaagctgggaccctatagtcaaatacgtatgtctgtcttctcttgcgcttcttcacggaaatcacatgtcttcaacccctcactatgtaactttcttcgcgtccggaatagatcaaagatcagcactcggcctaccttcgcaaggaacttactgctatgcgagaaaagttcattccggacactagaattcactgctgcttgtactttatcaacccgacaggtcacggcctcaagcctgtacgtccaaatgcatcgttcccctgtatcagacgatttctttgtacagacaattaatcgagtgcatgtatgcaacctaatcttgttttctttatctagatcgacaccattgtgatgaagaagctttcagaggttgtgaatgtggttccggtcattgcaaaatcggacactttgactctggaggagagggatgatttcaagtcgagagtacgtagccgacagatgcgcgatgctcttaatcatgaacacgaatgaggaaaaaaactgacaggaaactctcatcacttcatcaaacctcactttagattcgggcagaacttcaatacaacaacattcggctatatccttttgatacggacgagcacgatgacgaggagcaggtcttgaacgctcgaatccgagtgagtattttctcgattgattttatacatatcttctcttgataggatttctgggttcctgacaccgccataaacactgcaggatatgatcccttttgctgtagttggttcccagaaaaacgtgaacattgatggtaaacttgttcgagggcgacaaaaccggtatggggttatcaatgtggaggacgagaggcattgcgagtttgtgtacctgcgcaacttcttgacaaggtacgtagcttaaaaaagaaaaaaaaa

SEQ ID NO: 1769 - DNA, 12326 bp, Xanthophyllomyces dendrorhous
gcttaaaaaagaaaaaaaaagaaaaaactaatcgactgagactctgtcttgcttgatgctcactagacgatatttggtctctttcttctaggacccacttgcaagacctgattgaatcaaccgcacacactcattacgaggcgttccgttcaaagcaggtcagtcctctgttcctgttgtctatatttgaatctctacatgtttgttccttagcgttaaccacgatctgtcttgattgtcatattggcattctgtcttgtcgacttaacagctccttgctttaaaagagggatctaaggctcaccaacctgcttctcaataaactctatgtcatgactggcttcttgtttccctcgggttgattcgaattgctttctgtttcacttgttcttccagatctcctgcttctatcagttttccaaaatatagctctcatttttctaccctcttgatctttccccgtatttttctctccaacgacctctgtccaatttctccttattttctttgtcttcctcctttacggactctagtctaccatgtcctcactcatataccttccggatctttttgcagaccaattttaatctgccactagtttccattcatactctgaacgatgtagaaagattgaatacgttcggatttgaaagtggtcactcaagactgccggtaactcacccgactaaccaaactcaaaaaagggatgtcaacacttcacttcgacttcgtacgcttaatccttattcacggttaatctatcctctttaatcctcatgccgaagattgtcaagaaaaggaaagcccccatcacggcggccattacggcttccagtactgctttgcccgcaagaaacactccggctgggtcttcagcacatgctactcgaacgctcagttcgtttactttcctctcgcgacctacggtcgtatctcgtgattctcgaaacaaacttgacatcctccaagaaggaagacctctagtttacgagtcctttgtttatcttcctctctctgttttcatcctgatgttcattagttcgaaagttccatgtccttctcaaacgacaagctcagctcaacctcaaggttgcctcctcccaaactgcttccagttcgacgggcgtattgaaaggaaaaggtcgagaatctgatggtataggtgctttaagaagtgagctgaaggaaattgagcaagagatggaggacttaggaggactagaatggtaccaacgaggtatattcttgatcgttgaatagtcgtgaccttcgcctttctcgtcgtactaacatgctggactttctacctaccctgatgggacgaatcatcgtgagcgaaattaagcatctgccttgggtcaaagtaaagagcgcggaggagattcatcgcatgtgcttgttgggtggttgaaggagttgaaagcaaatgaaggatattcaaaatcgaaaccctttcggttcgtctgtctatctttatctctctctctatttcttctgtcatcacctttcgcatcgttgcctgagcccccttctttgtttcttctcgattccgtaaatgttgatatactgaatttgtcgacaaccttgtttaaaccaattctttgtagtgtactcgagattggcgctttagagcctgataattttggacctcatccatggatacacaatacgcctttagatcttcactctcgacatccggcgatcgaacaacaagacttcatggaccgaccggcgcctacgaacccggacggcttgttcgatgttgtctcgtgctcgcttgtgttaaactttgtgcctgaaccaaaaggtcgaggtgagtataatctttgtcgtgttctttccctctctctctctctcgcacatctttctgttctcgtcgtttgtacacattcgagagagcggactcgatggactaaacacgacctaaaatttggggaactttccggggtttatctatacaggaaacatgctcctacacactcgatccttcctccacccaccatcaccgtcttcacctgcgtcctacctattccttgttctgcctgccccctgcgtcttcaacagtcggtacatgacgtcttcccatttgattggcctgatgaaatctataggatacgaccttgtgagagaacgggcgaagaacgagaagggtgtggggtattggctttggaagactggggcggctgatggaggggtcggtggttgggagaaaaagacgttgcttgcaggagacaagggcgggagaaacaactttagtgtgttgctatagtaagagaaaagaaggaaggttcaaactagggcaactgagcgtcagagatccgtcacgtcaaacttagatgggaatgcctgatagatgtcgcttcctttgaaaactcgagctaccatgtttcgtttaggcatctctatctctttacaatttaagagccaacaagatataaaaacaaaagctgtctgtacacatcgcgtcgcatcctctgttcatttcccgaatcgttgctcgaccccatcccatgctctgagcgcctgcgcccagtcttccggtccgagcggccgaatcgatcgtgttccaaagaacgaaagctttgaggaagctaaggagctaaatattgagctgtatgatgtttgacttttcaatttgttttcgtgattcatcgtgccgatggatagcaagacagagggcgcacagagttgtcagaatgggttagaagaagaagaagaagaagaagaagaggaagaaggataacatgaagcgcagatgagagagaagaggagaaagagtggacatactagatctcggtcactcgaagcccccagggtgggtagtcccagagccgcaacccgtcaatctcaccccacgaaggagatatcgaaagcgccaatcgagcccataaggaaggagtcgacagtcggtggatcaacaaaaggtcgggcgaaggtgacgtttgaaatggaagtttctctgtgaaaggaagagaaaaccggagaaagacaggccaatgcttccgtcagcttttccttcggtcggtgttggaggactcttatgattggaaaaacacaattggaaggaacaagcaaagaaaaagaagatcagaactgaccatgaatcaaccggtcgagttgtttgacgtcgagcggttgccttcttttgggatttcttgccaaatctcgagagatttgcaccaagacatcatacgacgtctcggccgtcatcaagaccagactgatagtctttttcgacgattgtctgctaactgatactgaatacaagggaacttgcatcttgagcatgccgttcgaccagagcacatccttggtcgagggaggggatagtagcgaagacaccgaggacgacagagacggcggagacgacgacgacgatggcggtggagaaagaaacgatgagtgcgagaaggaagaggataacgaagatgacgatgacgaaggcgagagcgccgaagtggtagaaaaaggctcttgggtgtgaactgagttgggtgagagtggtggtgactgagttgcttgcggcgatgttggtgctagacacgacaatgtacgactgagaaaagccgccatagaggggaggcaaggatttgctaagaattgtgataccagcagaccaaggatgagttcgagtccaacacgacccgaaaaaatcagaggagaaggacaaatgagtgaaagaagacggagaaagaaacagagaagaccgactgacgacctggttcaaacacactacattcctcgacaccttcttctgccgcccaggttaacagccttcgtatactctccagcataacttcctcgagttttaaatcggcttgatgtgttccgctcctcggcgggacgagtatgagcgagacatgtctcggcggaggcttcctctgagcagaagaggaggagagaccggtaacacttgcccggggtcgggaaaaaagcttgctggccgaggagaggacgaacgaaacgaaggtaaacaggacatgcaagacgtgcaggacgattaagatggatacttggaccagatgaagggcggccatgttatcttctgttgtctgttctttccttgttctctgtgttgagcgagggattgatgcaagaggtgtgatcgtttgagttctgaactggatgaactttctacccgggcggtgacgacaacaaacagcagggagaaaaagactaggaaagtcttctaatgggcaactacaaaaccgagagatttcaatagggaagttttcgtgttagggttgcgtagactaagggtgaatggtgacgtgtcagtctcttgtgggagttttgatgctggcaagtaagaagaaatcggtctgagactttgaggatgctgatcgatcagagacagatagacaaggagcgacatcgagagtccctcagagggtgggtctagtggaacacgagccagagaatgccgttggaaagtgtgcatagggtaggatactgattgatatatatgagaagagaagcaagataggattgtagacacagatattgttgtgtccctaggccagcagcccaagacgaaggaaaggagagaaacgaacaggaagagagagactgaacgaacgaatgaaagagactaagcaacggagggtagggcaaactaaagacgagagaagaaagatgaaacggaaaaaggctcgaaaagaatgaaacgttatacataaaactctttctaccatgaaacccctctcgtcttgaaaatattaagcttcctctttgacctctctccttgtcctacggaatctcatccacctgccaacctataacctcgataaactcttatgcgagacgcttcggaaactcagtctgcaaatcagagtcacaaaatatggttgacgtcagtaaacaatctcaattgttgcagataaagaaagaaagagagaagggaggaagattgactggatggaacgaacgaaccttagtgtacttgactttggccgtggcagcatcgtctgtgaaccagaagatctgaccgggggcagccggacgcactcgactgctcggcaagccggcctcgggctcgtccaacacctttgccaagatatcttgcttgccctctccggcggcgacaaacgcgactcggtacgcgtggttgatgactgggtatgtgaatgtgattcgcttcgccggcggcttgggagagtcttcaatgaaggccacccatcggtcctcctcagtcagaagctcgtgtccggggaatagagagcaagtgtggccgtcggggcccattccgagcaggatcagatcaaacacagggtatcgagcggcatctcgctgggcaaacgtggcgatcaactgtcgttcgtactcgtcagcgagctcttcagggtcgttcaacagcgaagtgttaatggtgtgaacctgattgggcgagatggtggtgtgatcgaggaagagcttcttgacagaggcatagttggaatcttcgtgatcgagctcaacaagacgttcgtcacagaagaagacctccctagagtagaacaagagatttttgttttttgtttaaaagaaagaagagggagaaagatagagaagaaaaacaggtgtgagataataggtcgatatgattcaatatcccgagagcgtcgcagatgatcgtcggaaagacttcagaacatgccaaactcgtacataacatccacacatccagtacatcctttcaaccgctgtcccatccctcgactggaaacgaccagctctgcctcgacaatccgtgaagatacagataatctcctcggttggacacccttctagccatccgagaaagaaacggtctcaaccgagcagagtgtaccgaaccggatcagaagaatatcagaagaaagaaaacgtaccacttttcccaaaggacgccttcctttccaatgagacctttcaagttggccggcagacttccaccagagatggccaaggtgaaggctcctcgcttcctgatagcatcgttctgagctttaagcacaaaatcggccacggccgagacgagctcggtgttctcggggaacgagtagagcacgggaggagcaggactgggatgggacattgcttgtatatatcgggttgtgtgtgtgagactgattcgatagaacagatagagagaagagtcaagacgatcaagaacacagacgttggcttgaaagatgtgtgatgggcaaaagcagattctcgttttttccctcctctcctctcaccacgattgggattaagggtcagtctgggatgtctatgcgacattcttgacctaaggcttctcgatgacgtcactccttgatatcttcccgagccttctctctactctgttttgttttgtgttcttcctgttcttcttcctgtttttctttcagtcgtgtcgtgctcgccgttgtcgtcagcagtgctcacttatgtacacatacacgcgcgcggaaacagagggggaattatgtcatctaatcgaacttgatcttcttggccgcgggtgcatccgagatatctttgaagaacgctccatacgagccgtgctctgtacggaatcaggaggtaagagaaaacgtttgaggatcagggtcaagagaacacagaagagcaaagaatcagacatcatgcacgtaaagagtgggacatacctttcttcttgatcgtggaggggaaccggtccatttctttgggaacgacggcgccggcatctcggatgactcgcatgaactctccagcaagtgcggtctcgtggttctctccggtctgaatgcatgtccaagaagcaaaaaaaaagttagttcaaagcacgcgaagaaaatcatggtgaagccaaagatactgacgaagaatgtcacactctttccgagctttcctcctcgtccggttcgaccgattcggtggatatagtcctctatgggaccagagcaccaaacatcgatagtcgaaaaggataggatgagcacccaacacttccaaatcagcaaaggaaaaaaagaaagccgggctgaccgacggtcaacgggaatgtcacgttgataacaagcgagacatctggaatatcaagacctcgggcggcaacatctatacttgccattgaaccaaaagagaataaagattagaaccacagccacagaagatcagcgctaccaataagaaagatgaagcaaacgaaatggattttaattcacgtaccagtcgcgaccaagaccccaacttctccgctcttgaagccctccaacgcactcattctctccttctgtcccatatctccgtgaagaccagcgaccttgaatccagcccttcggatagtctgctccaatctggtagcctccttcttgtacaaggcgaacacaagaattcggagaggtaccttgctgtttccgccggcataagcagccgaatgcgatcggaggagagaaagaagtcggggatccttatctcgcgaagtatcgaatacttcgatgtctgtcgatccagagagcattagaaagagagcgtcaggtaaaagcttaagactttctgacgcatagcttggaaacacgtgaagatgaacacatactctgctcgactcgggtgttggcagaaagctcatcagaaccgacggtgattctgacaggcgtcttcataaaggtagcagcgagctgtcgaacagactctggccaggtagcagagactgagaaggaaaccagcataggctcgttagtccaacccatcgagaccactagtaaaaattgcatgacattcccactcgtcccgcattgcaagagaatgaacactcacacataagggtttgtcgaccagctgtaggagtttggccaataatttgtcggatgtcattctcgaatcccttgtcgagcattcgatcagcctcgtccaaaaccatgtagtcaaccctggtaagaggaaacgaaaagcaaacgacgtatgcgcgcgttaatttgaatggcctgtctatgcgtacgacaaatctactggaacatacttgtcaaacttgaccgctccgtcgttcaccaaatcaagaattcgaccaggagtaccgaccacaaccttcaaaccgggctgtcggagctcttgaatctgctgtgtcttgggcattcctccaaacaggcagacacacttatagccgagcagctcgcatagagagctaagagtctcggccgtctgaagcgcaagctctcgggtgggggaaacgatgaggacctggggtgacgcggccacaggcttgccagaagacgcggcggtggcgataacgtgttgcatagcgggaatctgtaagcgaccaagtgaaagacacaagttgagtaagcgcagtcaagtcatcagaacgaatgccagctactagggtgaagcgcacacatatcataggggaacattattgaaactagaaaggtaaaaaaactcactccaaacccgagggtctttccggaacctgtctcggcaataccaacgacatcctttccggtaaacaaagcaggccaagagcaagcctggatgggcgtcggcttggagaatgccttcaaagccggagcgagctttgcagagatcgggatagaggacatttcgagcagcgggttgaaaggctgggagagagtgatgttgtgctccttaaggtaagcctgcgaggcggcggtcaatgaggaatccatcaagttggacgacgaagccacaggttgagcagattcgggttcggactccttcttcttcttatccttcttggactttttagcaggaggctgctcgagagcagcttcagttacgacggcgtccgccttgggggttgagtctacaacatcgacgctctctaccgatccggcagccttggcagccttcttctccttcttgagtctcttcttctccttcttggcagcctcgtcatcaacgtcctcggtcgtagagggcgccgactcctcagcaacagtctcttcggcctttcgcttcttgtccttctttgtaggctcgggagtggcagaggcggatccgtcggaagtgggctgaactcggggatccacaccgttcttgccgaacgctcccttggactttttgagcttcttgggtttaatttcagcagaggacatatctaacaatgaattctattggacggagaagtaggaagacgaaaggagaaggaaaggtgagtccgagagttcgatttggttgtaaataagaaaaaatgtttttatctaataaataaaatcagacaaatcgagccacgtgactctgttatgcacagctttctatctgcccgtgttatctctgcatcttttaactagccaagtcactttatcccattctgtttcgtccatccatcagatttacatcgttcttttgatccaggaagctcgaagaatggcctcgaagtgagtgggcagagatcttaatgcggtggcctgaacggtgtctttctcgattccttgcgaaagaaacatctgaaattgatccatgttgtttcctgacgtagcgacgacaaacgccctagacctcaacaaggtccttcgacatcgactagtgcagctgtatctgcctctcggataaagagaaaaagagctccagccacaggagatgatgatgagactagctctaggtcgaataaagtagctaaagataacgcagggggtaagatatcgactttagcggggacggccgctgccccagctgctggagcatctaccaacgaagatgtcaagagagaaagcaaggtctgtgattcctcggagttcatcaaactcggatcggtctatctggtcctttaattgcttttatagatctgatgatgtccttcatactgacaccatctcatctcgttctttgatcgatacataaaaactcccagctcgacttccgtctgtttcctccgaatacgttaaagaaatacgtccttcacaacaaccttaatccagtcatcgaaccatctcctcattccgacttaccggccccgcttcgtaggtcctctctgtaacatcttgctatctccgagccaactcacagtggtctgacgacaacaacataacggctttatcgtatttcagctcaaaccctctattcctctacctcgggtcctggctcatctggggccgagcctatcgagaagcccaaagtctcgcgtcgtagaaagaatccattgagaaggacagctattttagctgacatccaggcggctcatgagatctttgcgaaccaggccaaggagcattgggagaagacagcaaatacaggcattcgggagggagaagtcgtgaccgggttcttatattcttgtaaagttggaggtacgtttgtatcttggcgaggtttcgcttcaagggttgtgagcaaggggcgaaacaatgatgctgactaaatatgtggatatcattctcttgtgatctcctctctcattagatcgagtactcaagattgttcctcgtgagccaatttctttcatctgatctctaatgtatatcatacatgttctgacagggctcttctcttcttggatctttcgactctagattcggtatagcgtcaatcctttttcgtcttccgttcttcgcatcacatgctttatctctggatggaactatgccatctaccatcgttttctcttcatctttcatctttcatattcggattcatccgttctatcccttgtacaagtcttcatatgtgtttcatgtccgttgttgtgtgtggaaaaagacgatgtttgtgcttgtgtgaagaattatactgcattgcaggatgcactgacatcagcctgacgtcaggccttccgtcttgattcctctcttctaatcctacttgaaacccatcatcttctccgcctcctcgccgttcttcatcttcatcatccatcaactcccaccatgtggccgttctcatccaaaccttcagaaactagctctgcctctgtagtctctcttcctcctccttcttcccttccaccaactcctgtctctccaccaactcttgagcctatccgagctggcccacccggtggtcttgcagctccttccaaaccagtcgtaccggtgacgaaggcagatgaaggattagggtctgctaacgttttgcaaattcctgattccggtggaacctttgtccggggactagttcgtttcgtttccttcctctcattcggaccatccgtgtttccccaaggagcctgctctaaaagattgctggtgtaatcctcttttacatatgctccatgccccgatggtcttcaaacccttaggatacaggatctttgctcaccgtacttgccggtgtcttcatcagtaaatcatctgtcatgtgtttaaagtctctctattgataagggtttttttaagtaacagccgctccgtactcatactttgtctgtaggtacaactggtcctagattcttcggaatcactaacccgtctcgccgaacttttttcgtactcggcacatggtctctcacctcctgggcgctagtaattcacctcacccagcggttccgtgatcaagaccttcagaataaatgggcagcggccaactctgggcctggaactgggcccgactttgagggtggagtcggtgggcaggagagtttgaaggacaagtacgcgacgaccagaggagatcattgatcactttttctgctcattgtattctgtatgcttcttagtacgtctttctctctgatgcctgttcatcagcgggcggaaaccagaggcaaagtatgttgaggatagagcgtctgtcgatcagacgccagagccgaggatgaattaagaaaacatatggttatccctacatcaagtaaacgatagagagagtgtataattcatccaatggttgatatggttacacagcagatagtgagaaacacacacggacatacacacaacacttgggatagatacgactgccagagaggagaagaaagagaaaacgtccacaatgtgggcacaaaccgacaagccatacagagaaggaaagatgagagacaggacggaatggttttggtggccgctagctaaatcgagtggattcgttcgaatggaagtgcgagaatcaaagcatatacaagacaagatgaaggaagcctgtccgagtatgatccgacccatctaccgatccaccaagctcgcccaaccgacatctgtccctctttcagcctttgacttgagatgaggagcgatgaaccctttttcatcgttatcgctctccggatcactatcaccgcccgcctgctctaacattggtcccgggtctaacgaactggctgccgagagataacttgctgttcgtttcgacagataggacggtcggtcttgggtgccagcattcaccctagtgatcagagcggatccatcatcagaaggagcaagggtcggaggagggggcggagg

SEQ ID NO: 1770 - DNA, 46483 bp, Xanthophyllomyces dendrorhous
attgagggctttcaggaataggcgagggaacctgagtggggtgtgaatacaccctacgaggtccgaacggagtgggatggtcggtcagatcgggcgaggttgaggcccgacgggcggcggttgaaggagactttgaagcgactcgcatagcttttcggagtggaggaacaaacatctctcggtcggctagcgatgtctttcgctccagttcctttccttgaggagcgcctggttgagaagcgacgttagatggaagggcgatggctataggcagagattgtccgtagtggactttggggcctgtaaagagatgggaacggagcgtcaagaacaacatagcaacaaagtcagaactttaacaagagagcggagagatcgacagagaatggatacaagaaggaagaccagacctgaactgtcgacttcatctgcgagactgtggggagggggagccagccgaccgtataggtgccatttcttatctttatctctggaggcagctcggtgacttggtaagtaggccgcggtactggtaaaaacagagaaggaaagagagagggaattccaatcaagtcgatcagtccatcggtcatggttggcttcgttccgtttatacgaagtcactcacagtttccccatcgaggccgccacccggtcaacatccgattgctgtttctgctcccgctctacttctcttggatcgattctctgtttctcttggggtgcatctcccctaccaccaaaagtgctcgtcaccgccctcaaactttgtgatccgtcaagcgcatacattggttcgtcctcttcgactttctcgtcggtcaagcctgtcccagagggtgcaagagagctcaatggttcgagcgagagcgaagaggggttccccgattcataatcaagtagagatggttccgatacgaaagatgcatggggcagaggaggctcgaagtcgaatactagagttaaaagaaagtgtgatcagctcagaaggtgcttgtgagtgcacggtaaattccgaaagatctgaacggaccatcttcatggtcgctttcatcctttccatttccctcgtcctcttcctcctcttctgtatctcgtttacggtccttgggttccttatctgctatcttggatttaaatttttcctcttcgttatctgcctccttgaatgccacccgcttctttactctcttctcagatctctctctcttttcctcttccatcgctctctccaaccctctggttgcttcgtcttctggccgagcactcacaacctctgcggtatcaaccttacgggtttcgactcctggtcccactccagtgactccctgggcaagatgggctcccgtctgatttacagtcgaccctctaaagatcaagtttggaggggaagtccagttggagacgagcagcgaggtagccatatccttgtctgccggacaagcagcgatctgagaatggtgggtaggagatgcaatcggacgggaagagacggatgaagacgcgttgcttgatttaacatgggcaatgccgtttaagacagatagggaatgggaagtggatgttgaagggatagatcggttgggcatataagagtttcggagcgacgctccgaggagagaaggaccgtgatgttgatgagaagacgatatcaggttttctgcagaggaagaagaagaaacaggccttgatccgataccgttggaagcaggcgaaagggttcggtccgaagcgtgggtcgtcatcttagatctctttggttcagccgatgggtgacggctcgggctggtttcggcgctgctgctcactttggacgggacgaagccttctgtccgttggccgttccgaggtgaattcggagtggacccgacggaagcggtcgtgtgagtattgtcggttgttgtcgaactatcgggctgggacttgtatttggtctctccaagttccttctcaaacaattcccagatctcactgacctcacgcttgacttgatcctgaacagtatcccatctttctcggtgtacctggatggcccgttcgatctgagacaaaaatatagttctttgcccgtctagatagcgttctgcctttgaggagagcgcgtggaaggctgggtgggcaggtgaatacggagatggaaggaagagcggttcggggagagacgggagaaaggaggaaagtgatggcggagacgagggaagagcagggacgggtggagagggaaacatattcttcggattgttgtatcgaggctgggtctacatcgtccagacaagcaaagacacagaccgagaggaggatgatcagatatatacgaagaacgagccacacagagaaaggcggaaaacaagtggatgtaagtctgtggcctaccgaagggacgagagtgaaccctggaggatcgtcctttagctgaatttgcactagcagatgtatatccgactcaggactccctgatgtgatatcaggcgaggtcatacgtgtgatcgcttggtctagaatcgatgtagatgagagtgtatgatggaaagggatggagagaggttgggctaaagaatgcaaagaggcaaacgaatcatcaccccgtttgctgactaagcacgagctttcttggtcgacccgtccgtcctacacaccacctcgtccagctcgttcatccaggcaacagatgattatcgatcagatgtctaggtgagtgctcatgtctacagggtgtgcagtacgcatgctgatggttatgctgatgctccttcgaccgtttgagctcatagaaggagagaagaggcagaaattcggttggctctcagactatcatccaccttggcacacccgatgaccgttcatcctaccaccgattcttccaccacacatccaactatcgcatacacaccgtccatcgtgcctgatacgttctcctcatcctcatcggccgattcgtcattgatcgtctcaaacacatctccggtgtcggccgtgatggccccgatacattcatctttgcattcacccgcggtgtcggtgggtgagagccatgttcggccctccccgttctctctagattctcctatcggcaccggcggaaacctccttagcactcttcctccagattcaactcttgcaagggagctcgaaagcggattcgacgtatgggatggacctcctggccacccatttaagctcgatggcccagtcagcagtctcggtggcagatcagagaaggccattcagagtagtggagagagaagctatcaggaagaggatcgggcgcacactccgtcgcttcaaagattggataaaccaggcggagtcacttggagctccagctcaagagagagttagtggaacttatccgtctttgattattcgacctgtctatgttgaccatcatgccactcttgtcctcagcttcatccaatcccaaacagtttagctccctctccacatttactccgaatccgacagccggtccctcctaccacccttttcaagatcctactcttcttctcagcgctccagctgcctcttccgactttcccgcctcgtccgtttcctctgctgctccttctcctcctaatgtatctaccccataccccgttggagtcggtgttagtcaggtcgaacccccttttgaggcgcgagctcgcccaaaaccgaaacctaggatgtctgtccgagagaaacctaccgattccggaggtataattctgactccagccacagaaaactcgacgaagagtgttggaggtagcaaggattggtcgatgggtcctcctttggtccttccttcctcgagagcaccttcagggctgacgcccgaggggatctatcacacacctactctatcgccgctttccatacggtcggtcacttcagccgaatccgataaggaaataactggacaaatagagaagccatccaggaaaatggacaaactacctgtcaagcgaaagaccagggacctgtctgatgaggaggaaggcgatcgagaagaggagtgtgaaaagagacggttgtcagagccccgaggaagaaagcattctgcttcaacgaaaggaaatgggtcgacaaaggaagagcgaacaaaggatcgacggcgcgccccagaaaatactggcgatgatgagagtgatcccattggactgtcatcatcttcaaagaagagtttatccggaaagatggcggaggtgatcgatctggtggctagctctgagcctggagatatccctcagacaacattaaaatcaaagacgaagacgaaggacgtctccaaggcagacttaaaggctaaatcgaagatcaacggcaaaggaaaggaagtcgatcgacgatccggaattaaatccgccacagcaacacctccacggtcctcctcttcctcgtccggtaaagctgtacgagccaaacgaccaatgatggtcccttcttctcctacttcggccgcgtctgagccagaagcagagctaacgccggcgccagtctcgaaacccccgacacctcagcctcaaaaagccaaaacactcgcggagggaggtatgtctgtacctcatctggtagattctcaatctccttctctatcgcctcctcctccgcttcttaacgagatttcggcagagataaaccctgaattcaaaggtgcatccgcctccaccactatagttatcaagaaatcaaagaagaaaggtccaccaaaagagtacgcctacgaaactgatgaggaggagcctacatctagacctgtgctagcaccggcttcagtatggatggacgagcattcaacgagaagacgtgggaaaccccaagtcagctaccaagagatcccaccggacgaaattgacgaacgcctgatggagatcagatctagtagcaccggtcttggaagagatatgaagagaaatggcgagggagtacttacagatgacgagaatcctgcaaagagggacaagaagggatatgacgacgaagctagactggttgaccaggcgaatatcgagtccaataaagaagttttggccacgtctatagaggaaattcagggggctggagaggctcaggatccagcgggggaagcgtctgcaaagaatagtaagggactgacggctaagaaggcgccgacgaagaaaggaaaggtcaagggcaaaggcaaaggaaaggcaagcgcgaaggagattgaaaccgaggatcaggttgtagtcgaagaggaggacatgatcgaagtagagaaggaagaagaggttgagcaaatcgagccggatgaggaagctcagaaggaagacgtggacgaagatgaggatgaagatgagaaaaaggtatgtttcttgcgtgttctcctctctcttcaactttcatttctaactcacttaacgttgattttgctcaggactcgtcggcgtctacgcctacgcaagtacctcccccagtccctccaccagcaacaacaaccgcgactgcgacgaaatcgagtttgaaacggtcgcaaggtcctgctttgtcttcttcaaattctagtctagcggcggagagtccaagagtaagtatcccgagacatcggccaccttttaagcgggagggctcggctatcagcggactttctagtcctggacctggaaaagtccaatcaggaaatgaagcacttcgaggtctgtctttccttcgcttttcgtctcagagattgaaacttaccaacccctatgtttcctttcatattttccctcctcgcgcgtttcaaggcacttcattagcatccattatacaaaagcattcgactccacttcgatctccttcaatccagacatcggaactcgtacgtccgtctggtctatcaagacgtcatcggatcgtgccgcttcatcacaacattctgcctcagcccaagaagttgccgcctccaccggtgaagaaggtagcaaagaagaaaggagatctgtgcgaggatgacttttcggaaggagagtgggaggaaatggagaaggagcgacttaagagggagagggattggtgcgagtgagttggcgaatggcgtgggttcgacatatccatcgttaacttttgtctattgtttgagttgtctatgtttttctcttttgtatatcttctcataaaataccctggctgtcgcctctcgttctttcgctccttctttgactttgttatctcccaccttcgtatgttgcaacccgtatcctctaactctgccttcatccttgcgtaccctcttgtagttgactatgaacgctgtgtgttataaaacgaaaacaaaaaggttgtccatgatttcgcgcaggttcaggcacaggcgaatatcatccgcgcagcgatcacatcgcgcagtcgtcaggcacatctgcccctcccctgttcccacccgtttgtgcctggtccccgctcggatcgcttctggacccatctcgtccttttactcattcttttcccttcttctttctcaacgatcatatcattctctcttttctcttctctcttctttcttctctcttcttcttcttcttctttcatttcaaagcagaaacatatggccttctcgagatcagatagggacatgcgctcagtcacgctctccccttcggaatcattctcggcggtggaccgaacaccgacatccggtcttagcagctcaaccgttgtctcccaacctactgtctctcaccgtgtacaaagccacgcaccacccaacatgaccaccgtcgggccagatggtagaccaccctcgaggatagagagaggagaggacgggtcgatgtatcttgtctgggagccaggagtcacagagaccacgttcgtttcacccttcccattttccctttgtttaggcgtgccttccacttgctgacttaacatatctcctcgcatatatccatccctgtcgaccgcctttcgtttttctttagaaccacccatgtcactcgcacaatcaccacatttcctcctctgcgccttcctgcgcctctccctgcgtccacttctaacccgttaggataccctcagatacctcttcctacccacctctcgcccagcctataccctctcgctctagagccaactccagatgaccttcgatctttctcgatgaaccttggcggtaaaaaagttgtcttcaccgatcgagggctgaatgaagaggatttccttggagaacgtaaagaacgtgtaggaccaggatggaggaagatgaagagttcagcgagtgggtctgagattacctggcaaggcctacgcagagttgatctaggtgaggtcttgggttcgatggaggcgaaagactcttctaggtggaagggcaagagccggcagacagagcctctggaggatcttagcttacgaagccctacatctagtaaccgtcacacttcctccctgggtagttccacgttcttcggaaacgaaggaacgactcgaagtccgcccagaaagcggcttcgagacgccagtataggaggaggaattccttcaccttctccgatgatggacgatgatgtcactcgctctccgatagcaacaacgatgacagcgacagccgcctcccgtacacatgatgtcccactcgacccacatcagccgagtataggttccggagccgagatcactactcttcactctcttcctgcgcttctcgcccagtttgatcaccttcctccaaagataaaagaacatttcctaatccaatgcctgcgccggacaacccgtccatctattcaacgcgtctctcaattcatatcgccagctctcaagtttgactttgtgtcactcttccccgccgagatctctatcgccatcttcacgtttctcgatcgaccaggtctggcagctgccattcgggtgagtcgcaaatggagcgagatgattgacagtcaacggtccatctgggcaggcaggctcaagtctgagggattctggtatggcttcggcgcagaggaagaggaggaagacctgatcaggcgtagatgggaggtcatggatgaacgggaagaacgcgcgaggaagtcgggcagtggtcggtcattgggtacgccgggcgaagtgccggccgatccgttcgatggatcgtctcccagaacgcgcactcgagacgaagaccgaccggatagcaatgaagcatgcgcaagtagcgatgtcaaaatgggagcagatgaaggggatgacgatcggcttggcacggctaccatttctcgaaaattcgaagaacctggaaaggagggtgaacgggaggccgatctaggcaagaaaaggcggaggagccatccactcaagcaggtatataggctcagacaacagcagaaagcaaattggagcaggcggaagcctagaggaggtcggttcatgtttcacggtgagtactgtttcttcttaaatctagatgggctgagaaaatttctatctagaattccagtcccattgtgactttcagcttcttgtgtgacaggcggctaattcctgctcgatgactctttttgccctatttcaggccatggatcttacgtcgttacttgtcttcaattcgataatgacaagattgtgtctgcaagtgatgatgtacgtattcctccacttgcctcgcacctaggttgaccgcatatatctatgcctcctttgtcagctaaacgtgcttttcttttgctgaattgaaatagcattcaattaatatttattccatcaaggacggctcacttcgctgtcggcttgatggccacgagggaggtgtctgggccttgcagtacaaagcggatgtcctagtcagtgggagcactgaccggacagtccgtatttggtctatcaagagacacgagcagacgcatatcttccacgggcatactagcacagttgtgagtaatgccccgtgtttgagtttttagcacgatgagactttactgacaatcttcttctcgccttttctgtcatgtcaaaaagcgatgtttgcaaatcgttgagccagtcaaacagcctaatggcgagttcctgccaccttacccgcttattgtcactggttcacgagacaacaccctccgagtgtggagactgcctcgggatggagagcccgaatataaatcgaataagaacgtgggtttctcttgatagtttctaacgagagccttacctacctgactgctgacacggctattcttgggattgtcaatttggtttgctatcacagccgtataggaagaagactgagggagtcaatccggaagagaacccattccacaaccatctgctcgaaggccacacgcatgctgtcagggctatagccgcacatggaagatactgtgtatcgggcagttacgactgcacggttcgggtgtgggacattgtgaaaggaacttgtttgtataccttgaggggacacgcgcagaaaggtttgtgcgctaatctagaattctagtccattcttgtttgacgtcccttgaccctggtgcttcaaactctgcattctatcctcctgttctcatctctccgctttcaatggtatagtctacagtgtggtgttagatacaggaagaaacagagtcgcctctggatcaatggagtacgtatagctatttcgttcaaaggaaacaagcatcacgagctctcttctcgcgactgacactctcagtttgcttctctactcagtggtactgtcaaagtatgggatctgattaccgggaaatgccttgctacgctagaagggcactcgtctttggtcggtcttcttggcatctctcctaaccaccttgtctccgccgcggcagattcgacgatcaaagtctgggacgcagccacacttgagtgtcaacatactctcaaaggccaccaaggggccatcacttgtttccagcatgatgaaaccaagattatcagcgggagcgagggaacgctcaaaatgtgggatattaaggatggcacattcgttcaagatctcgtgacgggtgtgcagggtgtctggagggtctctttctccaaccgatatgtcgtctcggcttcaaatcgaactgggttgactgtgtaagttagaacatactgtttaggttccctgtgattctcttctcgattcagctaacaaagaaattgactctacatgtctttggtcttgtcttcttcattcttcccgatcattctggactcgttataggttcgatgtgattgactttggagattctgggtatgacgatggagcaggcgacgagactctcgatgagtttatcattcctgagtgggagcgtgccaaccggctggaacctagaacgtaccagacgaatgagtccaccaccgagagcggtggactcgttactcattctctcagctcggtatatccatcgaaccctcttttcggtaacacgaaagacttgactagagttcatcttccgacgacacccactaagattcatctccgaaagatccgaacaactcaactgaacccatcgtcgacggcaccaacaacagcaacaacagtcggaaacccatctgcgtcggacaccttcgcgaatgcctctcaccaagtcgagacaccttcccagcctttgcagaaccaactgcccggagcatccccggtcacggtcgttcatcctacagatacagccttccctaatgcatattcagatacagccggcgcctcgtcgacgatgtcgaactggctactcggtactgctaacagtggtattggtaacggaccacatacccatacttcgtcgttccggagacatcctcactcgcattatccccatcatcaaccgagtcaagggtctgtttgggcgaccggagcagattcagcgggtgatccaccagaaacggtttgggaggatgacgatgacgtagcttcaacagagatggaagaggacaactgaacatatctcgtccacattcaaactctttcttttttccctgcctcttttcctcttcaatttaacttattgctgcacctgaggtgtttttgtgttcatcatatgagctttctcaatttataatcttaccaattccatatccacgcttcatgttttcttttcctcttcatttcccatccatactatcccgcttatatcccgtctggtcatccacgcatcattttctcatcttaattttgaactatatcagatctgaaccgaaaaggaaagtaatgagggtggaaacgacggtcggagagaaacaggttgctacgacggggagaataggagaaactgagcatgtaaagccagacgcaaagaatgaagaaaaagatgggaaagccaaaagaggaagaaggaatgaaagaaaaaaacaagcaagcaggcaagcaaatgtataaccaaaggaaagaacgacggaagcggaaacgaaaacggagtttcggacgaagataactgatggaaagaaatgatatgaaacgatatgagatgggaagaccatgaacgtgcttcgtgacgagaaagaaagaattggtttgatttgattagatgttgggatctttttttctgtttttttttctttttgatatgagtgaccaaacttttgcaagagggaacgtgtgataggtcggccactcagtgtcgtggtggctcaatagctcgttcgtctgagaaaggagagaagaaccccctctattgaggattactagctttccttgtcttgagaatcccacagatgtgtctcctgtgatacaacccgcgatgtaaaatggatgaaacaagccagaagatcatcatgatcagggacttgtccgatgtgttttcctctcacgctgaacatagagaggaaacagaacaaaaagagagagaaagaacgaaggaaaaaaaacgatactgactttccatcccctgcgcccaactcgccgattcgacactgtctcgaacaaaatctgatgtggcactttggacatgctggaaggttgactccttccgttccgcacacatcgcaaaatgatgccatcgtcactttggagtccatctcgagttgtctaagttgagggtctagcgattgatctccaaacttcgttaatcgagtgacttcgtgtactcgccgggttgagctggcgggtgaagagacgacagaacgagaagaaagaggggaaggaggaaggagcggagataatggttggggggagctatcagagatattaggagaaaggggttcagtcgaaattgagagtgctggtttcggctttagtttagttgaaggtgtgactggtggtgtcaaccggttatcgtctgagctttgagtcggaacgatgacattccgcttggatggggcggggaagacggaacgaacatctactcgtccgttcgttccttctggattagatgctaatggacttgagagcctgcttcgtccggtattcgtcagacttgatcggtcgagaggccctgattgcatccttttcaacgagccttctgcctggctcttcggtcgaaaccagttccatccggatggtccccaagttttggatcgagaagcagaagaagaggaagcggaaaggtagttgaccgagggcactaagacctcaccttcgacaaataactgatcgaccagtcccggggccggacccgaccgggagtcctgaagctgcagactaaacaaactaggtgaaagtgaagctttggaacgggcagtgttgaacgaataggtcgatggccgtcgggacagatgagccatgaagcccgttgggttaaatactgaggacgaatctgaaggcgttcgatcatgggagggcctggctgatattttggacccattgatctctacgggtgaacccggccggctggaggggtgataggtatgcgattgggtcgtactcacatacgaagacgtctttggtggtgcaagctggcgtgggaacgggaacgtgggaagtccgagcccggtagagggagctggggagacgacaaacggtcgagaaggttttgttttcttcggtcgagctgaaattcgagtaggggagagtaggttaggattcatagaggctgaagcggctgcatgtcgtgctctggtggctaacttgcgctctagggtcgatgcccgaggccgagcagaattaactagcgcttgagcttcttcgagatcaaccgggccgagggagagaatgtcctgaaggtgtgatagagaagccgccaggtccttctcgtgaatggtcaacgccaactagagtgtaaccggatcttagatacatcagtcggttgtacttccatgatttctgactgggaagataacgcgatcgaaacaaagaagggggaggggaaaggaatgagattaactcaccaaataatgcgcgtgcattgccaaactcttgacgagctctcgatccgcctcgttgattccttctacatcatcaatcgacacgatccagcttacagtcagaagcttgccagccgcaaactctcccagcgcccacatgttcatttttgctccttcgctagcctgaaagataggagaatctcgaaggaatgacgatggatccgggacgggtaacgggacaataggatccgagggaagaagcaggccatgccgatacagggtaagcagattcgagaacaagtcgttctgatcgtatcaagagaatatacacaggtcgtacaatgaagagcacggtagcagagacatgatcagtacatgacctagaccgacgataatgaatggcatacacagaaggccagagccttctcgactaaaatggaaagggaaaaagatatactcaccgctaatttgagcgacacgattgcaggccacgccctttcctcgaaaccgctactgaattcacttttggtttcctggacaagcccgtcgccatacgactgttccttctcatgcgactcttccgacctccttctgatgtccgtcgagcaatcctccagggcggctaataggccgaccagaaacgcacccgccgccttgttcatcttctcccattctcttcttttggtctttgcatgaccatttccggtcctgggaatgctcgactctctattgacgctacccgatagcgagccggatgggagggacgaaccgagtgagggtcggctggaggaagattccggtcggaaacctgctgacgagattgctttcccgcttacagactccgaagcttctgaccgaggtgtccaccaagcttgatcggttgatccttctagatagaagcttagctcacctctggagatgagtttacctagagcgagcgaggcgaagggcgaagggccggagggaagatgtagtgctcggagatataggcctagcgcgtcatccgttcgatgtgacaccaaggctttctgtaataccaagattacgagcggacccgttgagaggagacgtcagatgcagctcagagaaagacacggcagggaacagagtgaaccaaaacctttacagatactgacctcggcatcccagatgagttcctcttcgtcttggtcgagttgaaggtctgtgttcttgaccaaggtagggcaagtatagtcggacaaaatcatccgatacggtgatgggatggtctttatcggataggatcaacctctctttctttctgaaaagttatagcttagctttacaagcaggcagcaagcagagattgcctgaacagatagtcgtatagacgttctggatgaaaggacgaagcaggcaagagaaggatgtgagtcgatagagaaaacgttggaccaagaaaaggcaggccaagcaacagaaaaacgtttttctacttgcgcgcacgtgaacttcctgccttctctcaggcttttctcttcgctctcgtccttcctatacatccgctttctttgtattcttccctcttgcacatcaagatgaagtcaagtctagacagtcatggagatgaaccgtaggggtgttcatgtggacaggaggagcagatccgagttatcaatctctacagcatcctaaacaagcataatctcacactcgaaaggcgggcccatagatagacgtagagcttcagatgcaagtctctttgaaaatagcaagaggggaaagagggaaagccaggagcggaagaagagaggattccttagaggggacatgacgcacagaaaactacggcaaggcaaaagagcagtttctgaataggtatctaccgctaattacaacaaaagctaggaaaaatgctccaggttgtttcaactcgtcaagcttcatcccactcaaccacaaccaaggcagataaatattttatgatccgacagccctgccagcctggtccactctgtcagctcagaatgaactgttggcgccgttgctccctcctgttccctgccagaggccgtaagatcgaccaggatgagtctgccacagtcgaatcgttccatcctcactcgagcttgcgtacatctctccatccggactgtatgataccgagtggataggtccgtggtgccctgtttgttcaagtccaaaaggagatttggtatgtatagacatcggaagcggcatcaaacgggatcagcttggcaaacaatcaaaattgtaggcaatcacgaaacaatagaaatgtacccttgtagcattctcgctcctctcctgattcaagatcgtagactcgaacccacggatcggctgaagatccagctacgaaccgatctctcaggaagggatgaagtgaagcagacgtaggagcgtgaggaataggaattgaaagaggagggtctcgcctgaattattcaggaatagccgattgcaacgattatcctcacgtcagtaactggttgtatacgcatccgctgagtgcttgaaacgccatccaacatgcaatcaggtgagaaacataccgagcaatatccagaaagatgaccgactttccactggtcacacacaacgtaccacctccatgggcaagttccatagatgtcactgcatcaggcaacttcagctctgctgtctgctctagagttcgaagatcccaccatctaaaatccaatttcaacccagacgaacagaacaagtggaagactcagtgcccacctcccgacaaacccgaacgaacgatctatatgccagctacttacctgacaaccccctcttccccagcactgactgcgacattgccgtcctgagaatcccaaacaacacttcggatattgccctcgtgcgcgagaccttcagccccatccagatctcctctttttgtcatatataacggatcagcatctggccttgccaagttgaatatcctgagcttcttttcttgaccaccggtaaggacataggcgccctcattcgagttggccgaggtcgagggggagagcgcgacggtacggacgatatgtttgtgttcaaatgtatgcagacaggagccggtataagtgtcccaaatcttgctgtgatgaggagggggggtaaggaataaacagggcgaacatatggggatgatcagaaagagatatctcagttgtgaatgcaacattccggttgagaagtattcaggtataagataaagacgaacgcagaaaagtcggcgctacctgtggcagctctggacgtgtccgcactgagcttactctgccatacggctcccttatggcctgttggtcgtgtcatcaccatggtgtattgtgagtataaagagtatgcctgtgcatcagttcgactgtatgagtgacccacgcacctaggaacgtcccgacccagtcacctgtccagtcacgaagcatgggttttccatccttgcaactggagatgagcatatagctctcgtcttgttcttgtagaggagagaactacatgccaaaacgaacgtagaaaagtgtaaatatgatgtggactctatctatcccatcccacttctctttgttagcataaaaaaagacaaactgacattgagatggacaacaggtcgttgatgccctgagcagacgagaggaacggatcgaggagtaggattcatggctaagttttgtctttccgtaggccgatcgtgatggtgacgatgaagaaaggaacagagttacaagagagattgctcaatagagaacacttggtttctagaatgagttaaggagtcgttgttgttatcgtcgttgttgttgttgttcgtgtgacggcaacgaaactcagggcaggattattaaaggtaagtggtcttagactttatttagagtgaagagtgaagagtgtccaaatagatgaatggtatgattttaggaaagagaaccaaggaaaagaggagacaaaagaaaagtcgtcaagagtcgtttgtatgtgttcgtcaaggaaactgaagagatggaaattggaaccggaagtcagaggttgagggttggacgatgaggggagcccaagcttttcgactgttgaacgagacggtgaaggtgagaatcaagaagcttgttagggttacatcagggcccggtacgtttttcagccctctgatagaaatagaaatctcaatggtctgtaggacgtgtatggatgtctgtatgcgctttgccgatgatctcaagctcgcttctgaagaaccgggagatagtttcctattctacatgccaccaatggtattttatcaacaagaagatgcacaatcacaactacacccacactgagatctgctcaaaacactctattccatcactttcctggaccgtagttggctcctccgctctgtagaagagagttggagagcattacagtttcgtggtcagcacctcattcagatgtacgatctgatttgagataaacagaagtgtaacacacctttcgtagcttggtaacgatgtcgtcctccttgagatccgcttccgaggacgcgttgacttgaacggaaaacacagaaaacacattcttcacatcggttgtgtacaccgaggtcttctcaggcggatccaatagaacagggcatgagtataagcacagagcgctcagaaaagagacaaaacaagagcgaaaggcgtacctttgcgcgacgcatcaccttgacaccctcaccgatccaaacgatcaacacaaacttttctctaaagctctccctttagatttgttagtttgcagacaaaaagaattaagtaagagtcgaccatcagaaaacgtcttatagatggtatcgaaagatcatcggaaggaggagagaaagcattaacttactcatcgttggcgtacttcactcgcacataggcgaacgaagctttgtccttttcgaacagtttgctgacctctggaatacctccagatccggaagaggttaccttgaggacattggacttatcgttctgtttgtagagacagtaaaaggaagtatgagttatcgaaaagttgagcttgaatcttggcgctcatcgtctcgactaagtgattggggtcggcgcacctcatagtcgagcaaaacccagttagtctcggatttgtcagacctgacgtcttcataagctgtaatgtaaccgaaattttgaggacgaacctatttagtataggtctgttgatctgacgacccgaatgaggaaaccaggaagaagaagggaaaaaataacaaaaaaagaaaaaagaaaaagagatggatctctgatgttagaaggacagaccttctcgaatagcgggatcgtccaagtttgccatgatgagtaatggattgaagaaacaggatttataaatgtctagttgtcaaagagacgaagcaagcttatgagtagagatgggctgatggacaaagacggacgtgttgaaggataaagcgaaaggaagaaggtaagcctagtaagcgggtagcgcttccaaatgacgcagtcgaatgctgatttgtagttatctgactgcgcgtttgttattgactcgctgcgcgatcacaatgcttttgtgtattatctacctccaagaatctcttttccgctttgcctagagttatctatgagtaacacgcttgagtagaagacgcacagagcatctgaacaatcgtttggagaattaaatgggaggagatagaaggaagaatgagctgaacggcagagaaggaagtggtgaaggaaactagaaaagcagaagcaggaacaggcagttggagcatcgagacttcagataatccaacacaacagtagccctggcgacatctcagttttatagatgcagtagcattcaagatgcttcctccgctatatcgtataatgttgatccataccggagcacggataagacagaggaaggctttggtagttctggcgtggattctcaaccgaacgactgatgcttatataggtcagtcggacttggccgaatgtgagacacacatggatcttacaagcatcgcccgcccagacaaagcaagatctatcatccgttctgttctcatcaactacttgcccaaacacaatcgatagctcctctacatatttgatcgatagcccatctccttctcgagtatttaagatggagaaaactacagaactccctacgcggatgactgttcaacctgtcccgtctcatggcactgctactgaacccaagaagttcgtcttcctcgatcgtcgtttcatccctctggctctgttcgctttatacatctatatgttcggtcatcccatcaatattccttactcctcatcattggcaactgcctcatttgacaacgtcaaatggcacgcctgttcggaacagccagacaaccccaggtttcagtgctcgacagtcaaggtcccgcttgattataccaaaggatggacgggaggtgaggccgagatcgcggttagcaagtggattgctgaaggtcccaaggatgggaagttgcgaaaaagtctattcatcaaccctggaggtccaggaggatctggatttggttcgttcgatttcttccttctcatcggagtatgttcgtgtgcgttacgacagatgattgatattatgggtgagatgtgatgatttcctgtttcgtcaggattcaccttccgaatcgctagctctttatcgcaactagtacttgatgcatatgatattattggtgaatctcgtcttgtttcttctgactggtcactcacctggtctaacctattctttcgttccaaattgaaatgccctacactgataagggttcgatcctcgaggaatcagtaacacctctcccagattgcaatgttttccgaccaaacaagccgaaacgatctttctgtcctccttaggtccaggtttggagccttgggccggaaaaaaagaactaagaaggatgattgctaaggcagatgccgagaacatggtggtttcagaaatgtgcgaagcatcaagtcaagacgctggcaggcacgtaagtgattgatctcaatttatactgttaacgattgcatcagaatgtgaatcatcagtggctgacgtagtctttacaatagatgagcactacaacggtcgttaaagacattgcgtttttggcagagttgctcaccggaaaggatacaccaatgtatgcaatacccaatatcaattgtttcatgtacgcaaacgaagaaactatattgatgaacaccctccatctactacagtaacttttatgggttcagctacggaacagtcgtcggagagtatttgtaagttgatcattatatagatgaatctagagaagatactgagcgctgagacattgatttatttgaccgaacaggattgggatgttccctgatagaatcggacacgtagtcgttgacggaggttgatagttttcatcaccctgcgcttcgcttgtcttcaaagcaagaggtactaacagcggcgtgtttgttactcctgggtgtagtttgtgatccagtcaactggagggagaatgcccatcatctgtggggtcgaagtgttcgtatttggcatgttcaacatgttttagcctactcgcctcgatcagataagatactttctgatcaacgtatgtttatgcgtgtggttttgttgctatggtccaaacaggattacgtcgattctgagaagacgtaccaagcattccttcagagctgcgctgaagtgtgtgatctccttttctacacggcgatcagaactacttataggaaggtcacgtacctaatcgtctgttttggtcttcatctttttcttcacaggttggaccagatcggtgtgctctggccgatcagaattccactatggagtctctcgaattggatgtagataaggtcttgcaagaaatggttgaacaccccatggtcatcaaagattatagaggtattggcaagggtgtccttcattctgctcaggtgattatatttcatccgtcatatgtgcagaatggctagctaaatcaagcgcaatatattgactatgagatttaggttcgagagtggatttttggattcctctaccgacctaacacctggcctcaactcgcccgagtttgtccttcacttcctctgtctcttccgaggctgttccgctgatatgtcttgcacttcttcatctaatccaccttccttggaaacagggattgaaagagctaacccagggaaacggcctgtcgattttcgatgcaactgagatcaagattgagttgaatgccaaggagccaggttcaacagcatacgccaacccaagtatgttctctttttctgatacgtcggctgtgatttcaggaaatagttcacttagacaaaatcaccatacgaaacaggtgtagagtgcacggacgcgcttccttaccccgaagacatgtcaactgaagagatcatcgatctgttagtcgaagagatatctttccagatcaagaatgtcagcagacattttgcagggctagacgtcgataaatgcccgagatggaagatgcgtgatccagacatggtgagttttatatatacaaaatcaatgctccatttctcgtgcgcatgtttagaaatcagtactgaaaggatgatatattgtacaactagttcactgggctgtacgttcttcgattttttctatcgctctctgcatccttcatatcggctctttatttccttcgaccatcctgacgcttctgcttttgatcatccttcttcaaatggcgatgcttgtattgaaccatactcagcatgaaccaaacgctctccaacgatattctcatcatcggtaacacagcggatcctatcacatctatcaaacacgctcgattgctgaatgagatccagtcaatgagtcgattgattcaccatgatggatttggcgtaagattttctcttcttttacgcacgcatttgcgagcgataccagtcaaaacggaacttgatctgattatcgggcttatttttgggaatgacagcattgttcttctgctatggcgtctgtatgtctgccttccttacatctgttccattcagttaacgcttggctcagacttctcttcttgttgctttgtttgatatttaaataaaggtttgtacagcgcaaacgatccggtcctacttcacagagtccaagcttccacccaacaacctattttgcaaaaccgaccagattctcttccccaacaacactgtttcaagtagccttgctaacggacgatgggtacacgccgaaggtggagagatgagttctgaagagaacatgttgctttctgcgtttatgggaatcggagaggcgctagatgggtcattcgtcaggagatgaaatatgttatctccttcatacagctgataattaaaggttgacatccaactgactacttggttcattttttttgaataccctttggtatgctttgcccttctatcttcatttgctttctctgtatgtccattccgattacgttctcaacgctatatatcatcattttgttacacctcaactattaggtcgtcggcttgcctatggacaaacatgtacggactagcggcactgcatacattcattcaggatggtgaataagtttgcgtgtatcaatttctatataatgatggcagatccgggtttcgttgagaaaaagagttgtcccaatcattcagtcctgcacatcaatggctcagggctaatatacacgaactggccaagacgtcctgtctaggttgcatcatcatcataattctctcaagtgctcatatctatggccatgaatatattgattagtattgacgtctggggatttaacggcaaagtcgatgactagaaaccttctgtgtagcgcgctgtttatgcgtcacagaggccacttgttccccactacgtcatagaagacgcgcgaaagtccatattaacacaacacgcgctcactgacatctatcttcatccacccagcatcctctacctatcctcgaagatttcataaatccagaacacacccattaagtacacgcaaacaaaatatcatgaccgacatcggacgacttgagaagactcttgcctctgaggtatgcacgcgtctctctatagttccggccgttctctcgttctcatctcgccacgttttcctttcgtcctctcaacctgcccggtgaacaaatcaggctaagcgagaggagaaggagataaaagcagcaaccaaggcgcttcagtccgcagagaaaagcgaaggcaaggccgttaaggtttgtttatctatgtaaaaccctccttttggaacgatgcatggctaatcgatcgccgatcggtattctaacctttctcatctatcttccgacatccacacacataatctttcaggttgagcagaaggcagtcgcggcgaaagagaaggcactgaagcatgagcacaacgcagctcacaagttgacggatgcccaagcgaaacatgacaacgcactggccgaccagcgaaaggccgagcagaacttggagaataaagctgaacgtatgtccctccttatattctgagctcgtaaatcttggaaaactcttcgatcgattggccgaagtcttgatgagagtagtgagtctgattacaaggttcggacgaaaaactggattggaacgaaacagaacatcgcaaacttgagcaagagattgcaaccaagaaggccgcacttcagcaggctgaggctcgacaccgacaaggcgaagtttgtccatccttttacttcttggccactctatcgattcctctgcttatgtacattatctttttgacaaacattcaagtctgtccgaacggagcgactggagggagcacgagagccaacccccgttgccacaaccgaggcctctcaggcccacgcgcaaacgaccaccggacagattgtgccgtccgaggcgggcgtgccggtggctggaaaccctgtagttggttctactgccgtcaactactgaacgtgccgttcgtttctcttctctccatctgtttgattaattcatttcaagctcttacgtctatgtaggaatcttgagagtggttcatcacgatctatatcttagtctcatgcttccctacgatctgttcttgtctctactttctctttttgtatgtgtgtatgcatgtctgggggtttcttgttcaacttgtgttcgatcctcgctcgctatatacatgtcatcaagggatttatcaactgggcgacatatgcccgaaggtgcgtcagaaaaatgacgatagaaagcacctctagacaaaccctcgagcctctcctgtatccttcggccacaactatcgatttctttttccttcttcgttttcatttccaacatgtcaatctcatacgccatttgaaggaagatgagatcaaggcgaaggcgatctgtagattgagacggatgattccgatctagatctagatctagaccgggaaagggatcgagagcgcgagacgtctctggctctgacaggactagaacttcgtcctctcatctttctggactcgggtggggtttcatcccttcttcttctttccggagtatcgtcatctctccgtcgcatctctggcgtgtcgtcccttcttcttctctccggagtacggctgctcctccttctcctgccatcgtacccgtcttctctccgcctggactcgtcatcttgcctcatcatccccgacgcggtcggtcgccttcttctgtctccgggaggcgaggaccgactctgggtcggactgaaggaccgtctccgtctcctggccgggggaggcgatctcgaatcaggtcggctgtatctgtcctgagtcctagtcggagggccaggaggcgatctcgagcgaggccgccttctggaatcagcataccttgaggatggttcaggagacctgtttcgtctatccgaggacgatgtgtgataaggaggcggggagcgcgatcgagatcgctgcctggaggtggtattggcattggtgttagtagttgtggtgaaacccgatgactgggcgggttgatcaaatcgagaaggtcggttggctcgagcaccatatccctggtctctagcttggggagcaaagttctctcgacctcctcccgtatagccttgtcttccacctccggctctacctgaatcaaacccagggcgagattgaggaggaggtgcattcgatgaaccatatccgcccgccgctccagaagtgacacccggtccgggctgtctccatcgtccgctgaccgcagccttctccttctcttccttcgccctcatctctgctttcttctcctcgatgaacgccgaagggattcctcctagggatgtctgggcagacactagcagatcccaaagtgcggtggtgaactcttgagtctttgattcaagaaacccggtaagagcgatctggatctttcgaggatcgggagactttgtagtatagaaaagaaagaggaagacgaagaggaattcagatcaggagtgtcactacataagaagagagagagggagaaaaagatacctaccactttctcagaatcctccaacagacccatctgacggaaagagtaacaacagaccggtacatttgagataccacgagcatatgataaagaacaagacctacagaagaaacagaatcaaaagactcactgcatactcaacgacgacctcatcctcaaagcccagaagcctggtgacctctttgaccatccaaggccgcatgacggcgaggttgaccttcctgagatctaccttggcagaataagactcgggaaactttgtgtttctgagtagcttggactctttgtccgcgaaccgacggtcctggtcgatctgaggtggtgtataaagaggtcacaacgtgagaatggaacgagaatgtgagtgatggaaacggtagcacgagatggacagaatggacgaaccgatgtgcctttgaatccagagtcaccctgggagtaaggagagagtcatgtcagatggatggttaggcgagagtgaagaggcaggctgaacggctctgtgtagtaaagagcagacgatgtgacgtaccatgtgtgttaaagatgtataggatgaggatagaacaaggatgaggatgcagagaaagtaggagaagaagaagttgcttggaattatccattacaactttttgtattcagatggacactattttttgtagtcggcaggttgactccaaaacgttgtagtcactgttctaatcctttggacatcggttcgtaatgcgttgagaattttttgatttttgtaatactcgggtcagtatttcctaatgcatcgattgcattttccctattggagtcgtctctaatacaatcataaaatttccctaatgtatcgacaggaaattccctattgtttcccccaatgcctgcttacatccatctggctcctttcctcctccctctctttcccttccactcatcacgctgccactatccccatcgacaccatcgtctatcacatcgttcagccccatctccttatcttctctatctctaactcgtcgacaactccttccacatgggtcaatcttgctgtggttgcggtcagtttgtcgtttctcttttgttcttgtccttcccttgcctcctgatctcatggtttcccttccatcgttccttggccctcctttgtttccttccctgtcgtatcatctttcactttcttccttgttctggttctcatcggaatatcatcaacccatttattgtcgtcctccaatacgttcctcatcttggttgttttccttcgttctttcctctcaggctcatcccgtcggtccaacgcctcggagccacttctgctggagaacgagagagaggcggtagccgatctactccaatatctcgagagtaagccgtttagagatagagaaatccacaaattcatatgcaaacacacacatacagcctctttctgttcgtttactgacccttctcttcactcttgtttccccggttgtcatctggccgaattacgactcgtcctgtgcactaccatggccactatcatcctttccgtggaatgttctatcttcaaaaataatagaccggaccaccaccaatttctttacaggttctccccttgccgctctcactacactctccttcagcgacaacgtcgatcttcaacgttctgctgctcttgcgtttgcagagatcaccgagaaagaggttagagaagttggcagggacacgctagatcccgttctgtttctgcttggtagccacgacaatgaagttcagcgggcagctagtgccgccctcggaaacttggccgtcaaccgttcgtcctttcagagatttcggattctcttccgagaagaaccgtatatgttcagaacgtagacgttccgagactcatcagtgaaaataaaaatctatccgatttcattctgaaaatcccatacagccgaaaacaaaacactcatcgtccggttgggtggactcgatccattgatccgacagatgctttccccaaacgttgaagttcaatgcaacgctgttggatgtatcaccaatctcgctacccatggttcgtttctcttctgcactgtggcttgcgtgtgtacttgtatctgcatcaagatccgaagaatacgtcgagcacgtgtctgacgaattttctgtcttgtcaccttcctctaaaaacattcattccgaccttgaatccggttgcctgttcagatgaaaacaagtcgaaaatcgccaaatctggtgccctcgtaccgttgactcgattggctcggtcgaaggacatgcgggtccaacgaaacgctactggtgctcttctcaacatgactcattctggtaagttgtcagacgtaaactagttcttcagtctaccacgcaaactgcttctcaaaagctaactgccctctgcaactcttgtcttttcgactcctagatgagaatcgacagcagttagtaggtgctggggcgatccctgtcctggtcggtttgctcaactcggaagataccgatgtccagtactactgtaccaccgcgcttagtaacattgctgtagatggttcgtccaaaactcttcactctcctcgttactatctatcatggtgctctcattctgtgtatgctgatcatccgagatgtggtatctgttctaccgatgacaggcgccaaccgaaaaaaacttgcccagtctgaaccaaagttggttcagagcctggtcacgctgatggattcacctagtttgaaagttcagtgtcaagccgctttggctctaagaaacttagctagtgatggttcgtccttcttctctcccccgtcttttcgtatattcttcgtttctcgaataatcaaatatgcttactctccgtcctaccatgtttcatagaaaaataccaaacagagattgttaaatccgaaggtcttccacctcttctccgattgcttcactccacctacctgcccttgatcctttctgctgccgcgtgtgtccgaaacgtgtcgattcatccgtcaaacgagtcaccgatcatcgactctggattcctccaaccgttgatagatctgctttcgtttgaggagaacgaagaggtccagtgccacgcgatctcaacgttgcgaaatttggcagcgagcagcgagaagaacaagggggctatcgtcgaggcaggcgcggtcgagaggatcaaggaactggtgttggctgttccgttgaatgtgcagagcgagatgacggcctgtgtcgccgtcttggctctaagtggtgagttctgtccgctcgctgggtgtagatgaaggatcataaggatttgtttttgctgaatccatcggatttctaacctatctgggcaactatcttcctccctttagacgaacttaaacctcaattgttagaactcggaatttgtgaggtcctgatccctttgacaaactcgccgtcagtcgaagtgcaaggaaacagtgctgctgccataggaaatctgtcgtccaaaggttagtgcagagcattttgttattcgttagactgtcatctcaagacattctacaacgatttaaccataccttctgtctttgccttgcttgtgatttggtagctgccgacgattacgacgcgttcaacaaggtctggaacaagccggagggtggccttcatacctacctcgtcagattccttggaagcacagaccagacgttccagcatatcgcagtgtggactttggtccaactgcttgagtctgaaggtgtgtccttctttatctttcttcgtttggtctggaacgcgtctggctgaccagttctctttttaattcgccatccagacgaggttctatacaaaaacatcaagacatctgctttcctcctcccatcgatccgtcagttggccgaggccagatcgtcaactccgcacgggtcgcctacggccggtgggaccgatggtggcaaacgagtcggctcggatgcgtcgatctctgatcaggagatggagaacggggcggatgagatcgcaggactgagtagacgaatccttgacttgacggacgatggagatgagctcggttccgacagaaaggacgctggcggtgctggagagagcccggtggagggcggcgaccaaaacgggcttggcctgaacggggtggatagcggcgcgcttagatatggtgtcgtcgagcgagatggagagccttgagtgaagaagggaagagttccatttttttttccaaatatgtttgctgtctgtttttctctcattctcgcgacccatgtctctttgtagggagcttgcctgtttcttttcttttctaccttgattcacgtcgttttctctctcttctgttcatgtgttatttctttcggtgatctttctttctctcccttgtcccttgataatttttcctggaatctcgtccgtacgaacaaggtctctttcttccttctaatcattcttactagtcaactccattctggtctggtctttttttcctcttcctctcgcaccgaccatcttacgtccccgatcgatttatcgtctttcctcctcttgcctggtcgattcccttcttcgatgtccgaaacttgtctttgttgtgactgaagcctctggtgaagactcggtctttgtacccagagagactccagtttgaaaagtacatatctggattcatgatgagaggcagatagctacagaaagaaaggaagagaaaaagagaagatgcgtgggcgagaaagagaaaacaaaggaaggggaggaagacctggtcaatgatccaaactctgagcgagccaagctcgaatatctctatccatcatcagcaagccatcgggtgatctccagaagtgatcgccgtcgactgtttcgatcagccgaacgacagactcgttccctgctgaacggacccaatcgcgcacggcacggatcgaggcaaacatgtcggacgtgccgtgaaagacgaggacagtcggtcgatcgagaagctgagaatgagaactcagaggaggagagagtggaacaggtagaagacggagagtcggagtaagaaaccatttgtaggatagaggctgtaaggatatttcgtggtgtgagacaacgcagtgatgatgaagaagaagaagaagaagaaaaggtatgactagtaaggtcagttgtatctcgatttaaagaggttctcgaattctggaccgacaggagagatgatcacgtagaacgtcctcaacggatcagaacacggcggctgggccagcgcgagcaaggcgccatgcgagtatccctatagagtgcatctcaaacataaacaccatcagcgtctagagaaggagagtcaaggtttttggactatgaaaactaacacatataaacacctctcccgttcgactgccctgattggtacccgaccagacttcgtccattccagccttcagaacctcggcatagtcatctgcctcgcctctgcctgtccaactcggacttttggtgctctcacccgcccctctagagttgaagatgaccgtaggaacggaaaccgagaggaatatctggagcacgtgccggacgacacgatcgtcccaagatccccccaatcgggcccaaggatgggcgatgacggccagttttctacgatccggattggatggaaacactattcttgcctctatctgagggatctgaagaagctttgcagtcatatcgtctggaaccaacgggctggcatgactgatgagaaagatgtgagagattagggaagagctgggcaagagataaagagataaaaagtatttgaatacatagacaaacattcagacattaagtattttctgtaaattctcggtggctcacatttatcgatccatccatccttgattctcttcaactcatccatcttcttttctctactctctttctttggataaacactatgtctgcagccctcttccgttcactcaggcaggcccttcccgtcgcttccaggcttcccgctcttgccgtcagagtccagcacgtatctgtctttcgaacgatcccgtccgttgtctcgatccgatcgtttggagagtacggtaacaagccgtcgttccgatctagaagggaaccccgggagcctcgggagcctaaccctccttcggcccacctgtttgttgccaacctgtcttatgatgtgaccgagtctggtgagtcttcttctctctcttttactatcgtcgggtgttgttgtatgcttcagacgcctgtttgagctcaaatcccatctgacgccggtatccatgctctccgtttcgttcattactcccgcttttctccgttttcatcaacttggacaacacaagatatcaacaccatcatcgagcccttcggccctaccagcatccgagttgctgctgatcccgacggtcaaccgaaaggattcggatttattgactttgccgacaccgagtctgccgtcgctgctagaggtgccctcgagggtattgatctctacggacgagaggtccgaatagattacgcaaccggtcccaaggacagggctgctcctcgagctcgagacccatccgacactcttttcttctcgggtatccaggacctgagcagggagcgattggccgagtggttggagagctacgcccagggttctcacgtgtctgtcaggacgaccgtctctagggatggtgccggccttgcttttgccgagtttgataacatcgagaccgcgtcgctggttaagcagcagatcgagggtctcgatctcgacggcgtcaggttcaccaaaattgacttcaacattcctcgaagggagcctaccggtggcaaccgaggagggtactcgggaggcaaccgaggagggtactctggaggcaatcgagggcagcgctcgggtgatttcggtgtgcagcgaggtatgtttctcttttcctttcttgactttagacttcatcaacatccgatcgtcgccagccgtctttgctctattcatggctgatcttacgcggctcaccgactatctttctttttgcgctttcttgaaattcagagggcggcttccgaggtaacaacagggaaggtggtttccggggaggaaacagggacggtggtttccgaggaggcaacagagaaggtggtttccgagggggtaacagggagggcggcttccgaggaggaaaccgaggtggaagcagggatggaagttaccggggcgatagggagtaaggaaaagggagcagagctttcttttcgaccaaacgaatgcacccctctttcttcctttcaaccagattccacaaaagagcgaaacgcaactttccggatgacttaacaagagtctgacacccatctatatgatacttgactttctttccctctgtatggtcgtaagactaacgctgctggtgtgaacattgctagcgcttcatcaagcagatgcaagtagaaagtcggactaaacttttagagcggttcggttcgaatgcgagctacaacgatccgtttctgatcctacacagctcctctcgactgttcgcatatctcgcaaacgtacaacaggccagaattcaaaaacgtacacgcttcacaggcccatacaggaggttcatcctttgtctgtcgagcgaggtctgttcttggccttgccggaggatctgtttgagcgacttcaagcggcttgaaatcctcattcgcgtcggttgacaagtcgataggctcagatttaatcttgatagattccaaataagcgtcaaatccattttggatcgtccagcttgatgcgcccttgaggttgcttttggtcttgcctttcttttcagacaaaaggctagtctttttgtgtttatcgtctgcttcttcttcttcttcttccaagagggaggtttgttgagcgatcctcttctcggcgtccgtctcgggtataagctcgtattcttcgggatctgatctgaacaagtcgtgatcctcgctctcgtctgcagaaggatggggagattcctcatcggatgttgtagggagacctgtatgcacatatatgtatgttttgatagatatgagtaaacatttccagagatgaaactagaaagaattggtggtagatctctttcttgccttggagtttcttcattcgcttctcagcggcatttgccctcgattcggccgcgctacggatgatcagtacatcgttagataggatgagcaagagtgtgtcgcctttgtgagcgcctatagaagaacagacaggacgtacgatctggatccggctctgtataaaatgaaatatgatttttcgtcattcagagaaaaataaatcagacaaggtcgagatggaaacacatggattggatcgaactgatccgactaccttttcctgtaggttgaccctgggtcgagaaggttcgttcctccctttttagactttgcgtttatagttgacaactctcgtttttccttttctgtcaggactaaatgttgaagccgatggaatagtatatcagtgaggatgaaagatcaatcggatagaagaaagattcaagcaagcgaggataagagaagaaagaaacgagaggaggtccttactcttgagaccgtccacccgattcccatcggccgcttctcgaaaggctaagacgtttcgggtaccagactttcgcttcttggctgtctgggcgcctgagtgtaatgaaggttgacctttactcagcccgagtgtattgtttctttgacggcgacgggaagacgttggtctttgtctaggtagaaagaattcagtccataaggtaagtggttgctggaaaagcgaaagagagagaaacaaggagagacagaccgtctttgagctccaccacagatgttttcagcaaagtctcctgctcctagcaagacgttttcatggtcggccaagctgtctttcagtcttgctcctgacgaccagaaacctgagggaggaacgaatgcaacggatgagcttccaacaggattgatcacatacatggtccaaatagaggcttaccatctccataatttctgcccgtgtcggtagttgtacagtgtacaattggtagagagcgaaggcgtgtcaatttctgatctgatctgatctaaacgaccggaaatgcttagtttgatgaaataccctttagactgcatgatggcgacttctcgtttgagttcctcgttaaatttctgaaatccaggcccatggttcatgtgctatggatggcacataaaaggagtatcagagaaaagagttcgattggttcaactggtgggggtgatgatcgaccgaccttgatatgggcaagctttaaagagagcggagagaaaagggcaagagaagtcagtccgagtcatctaacagagtgctcacatagcaattgtacctcatggcagactacgctgattagccagggagaaggaaagaattcatcgttctttcttcgaagaacaatctctgtgtaggtgtaggaggtttctttgttagtcggtcgagaatagtaagaagggtagttgagaccgagataacaatgaaatagctaccgatggcctcgcctgcgttccagttcctaccagcaaatacggtgttgtatgggtgctttttgagtgggtgtaagaaattccaagtagtttaaacctgtgtatgccatggaactcatcggtggatatttatttttaaaaaaacgagctcacctcctcaaagctgtataccttaaggccatgtgttttgcatataactggcgaaagggaataaacatatgcataaatagttgggtatcaatatcgatctatcatcgaattgaaaggcttcactgtaactgacctttgacttgggctgcgagcgccttcattattgatagtgctttctaacaaagtgtagagagaggagtgggctgagcgtttcgattgaggttcgatccggagcaagaaataccaatgtgctcacctcttcttggggctttcctgggagagctgtgatgaacccaaacgaagggtttgggtctgcttccctctggttcagcctggtaaacgccgctggttgtgacattgtatgtggtgagagggtgggtggatgtgtaccaatgtgagtgaacgcgatatgtttgtgggaatccaagtgctgataagaaaacttgttatctaatcagtagcaagctgatttgagcctgacagctacctcgatgaggctccccctagacttatacccgatggagagctcgaaagatcccggacggtcgtccgaaaagagccgggccgaaaacgtccgactgggccaaagactaggaaacctttgtagtcatcgattagagagcgttctattgacgatcgatcaggcacgggtacgtaaccaggcacgtagccacccaggcacgatcgagcggttcccagccaatcaggcgagacttgttaaatcgaccgtcaaacaactcttcctctctttcttcgattcatcctccagcatccatcatcctcagagaggcatagcgttctttcccttccactaagcatcactcatctctccagcatgcttcgaaacgtagcaaggagactcgccactcccaagccaacttcgctttctaagcgatctatcatcgttactcctaaccctctccgagcaaaggccagcgataccgttcgtcctatttttgcctcttctttttttttctttattatcttctctcttcgtctttcttctggctccacacatacatgcttactggtcgtcggttcgtttcgccatgccctcccttagcaaaaatgggccatcaacggaaaataccctattattgatcacgttagtccttgtatcttttctcgtctttcttcccctccttttttttttcttgcccgttcttgagcaaacccattgaatcaatcccatactgatagttgatctggctttattgcatcaatttgatctctacaggaatacgatgctgtcgttgtgtgagttgaccctttctctacacctactgatcagaacgtcgcacgtcacttttctaaactgctagatcgaatttctcgctccaaatttaatccagtggtgccggaggagctggtcttcgaggtaaacattctctcacctttcctcgtcgattgaatcgtccgccaatctaaacatacgcatgtttgttctttcatcagccgctttcggtttggctgaggctggccttaacaccgcttgcatcaccaagcttttccctacccgatcccacaccgtcgctgcccaggtgagaaagctcttttcttgctttgttcatacttttcataatcacagtcttcaggtgattgtttgactgaatttcgcatcacttcccacttatccctcccaataagggaggaatcaacgccgctctaggaaacatgacagaggacgattggaggtggcacatgtagtatgtatacgatccctccgaagcgcgttttattcgcttacattctgaacacacctgactaaacgttttgtcttgtcgatcgaattcttacagtgatactgtacgtttgactcaattgaaagctttgtctctcgtgtcttcccgattcttcccgattcagcttgtacccacttttctaatcttgtaatcggctcgctcctataggtcaagggttcagattggctcggagatcaggacgccatccactacatgtgtcgagaggcccccaagtccgttctcgaggtacgtttggcatctgtcgctatcgaacattctccattctgttctcatcatttgcttcctggcacaaaccattagctcgagcacttcggtcttcctttctcccgaaccccggagggtaaaatttaccagcgagctttcggaggacagtcgttgaagtacggaaagggaggacagggtaaggcttcctgattttatcgtccaccataagcctcttctttgagtgcgatagcgcgtcttcgtttcagcttcactgactcggcaggtttttctgtcttctctccttagcctaccgatgtgccgccgctgcggatcgaactggacacgccatgttgcacaccctttacggacagtctcttaagcacaacactaacttcttcatcgagtactttgccctcgatctattgatgtctcctgagggagaatgtgttggagtcattgctcttaacatggaggacggaactctccaccgattccgatcccacaagaccgtcttggccaccggagggttcgttcgcgtggttctctgagacttaggctgtgaacctcttgactgatatgtttgtttgttttctctttcccctttacgtgtattttcttgttgttgcacgtctctcagttacggtcgagcctacttctcttgcacttctgcccacacctgttccggagacggtaacgccatggttgtccgagccggtttgccccttcaggatttggagtttgttcagttccacccgaccggtatctacggagccggatgcctgatcactgagggtgcgtgatatcattcttaattgcgcacacattcgatagaccttagtttgaatctgacaaacctctttctactaccccaggttcccgaggagagggaggatatcttttgaactctgagggagagcgattcatggagcgatacgccccgactgccaaggatttggcctcccgagatgtcgtctctcgatcgatgacgctcgagatccgagagggacgaggagtcggacccgagaaggaccacatctacctccagctttcccacttgcccgcttctgtgctcaacgagcgactccccggtatctctgagaccgccgctatcttctccggtgtggatgttaccaaggagcccatcccggtgttgcctactgtgcactacaagtgagtattggtttcccgatctgggttggcttaattttcgctggcagtagggctgatggtgtatctgttacatctgtttctcctctctttctagcatgggaggtatccccaccaagtacactggagaggttttgaccgttgatgaggttagcttcccatttctaccttgtatagtcctaaatccggaatagatgctgaccgaacgacgtatccactcgccaggccggaaatgacaaggttgttcctggattgtatgccgccggagaggctgcttgtgtgtctgttcacggagcaaaccgattgggagcaaactcgcttcttgatatcgtagtgtttggtcgagcttgtgctcaccacatcgctgaaaacctcaagccgggtatgccccacaaggagctcgacccagacttgggcaaggagtcgatcgagaacctcgactgggtgagaaagtcggatggaaagttgacgacggcgaacgtccgattagagatgcagaagacgatgcagactgatgcggcggtgttccgaacgcagaagtcgttggatgagggagtcgagaagatgaacaagatctaccacaagtacgacgacattggaatcaaggaccgaagcatgatctggaactctgacttggtcgagacgctcgagctccgaaacatcatgcagaacgccgttcagaccgtgacttctgccgccgcccgaaaggaatcgagaggagcgcacgctagagaggattaccccgaccgagatgatgagaactggatgaagtaagtttgtttctctgcctgtcaatcctttgttgtacatttgtctgactgatgagtttctcaccttgtcaacctcattttctctcgtccgcttaggcacactctttcgttccaagaccccaagaccggagaagtcacactcaagtaccgaggtgtgatcgccaacacgctggacgaggctgagtgcaaggctgtgcccccgttcaagcgaacgtactagataattgtaatccgatttagtcttcgtgtacttctctctctcttgtttcttccctccttttctcttcattctttacttctttaatgaacccttttttcccatatgtagctccggaatgacggattattttggagaagaagcgcgggctctctatggtgttgtagagtgtgtgtgtttattttagttctggggaaagaaattgacagtagagtcttggaactgagaccgtccgggatcttgcaagagaatacaacagagaatagagaaaacgacaaaaataacttcgggccatgattctcttgttattcgaagaaagacaaggaaactttcactgcgaacgccggtcatcactctcatacgtgtttgtgtgtgtgtgtttacaacagagaaagaggagcgggagtgagaagtagaagtaagacgaagacaaagaaagagaagagaacgagaagtctactcgtccgttctgtgaaggaaccaaggacccctcctcaaacaagggatgacataagctctttctatgtctctttcttttctctccaccctcccccctcccccgttgttttccccgggacgcgaatgaaggagccagagggaagaggaaggagggaatacaccgtacgacgagggtccggttcgagacgtttccctttcattgatatatacacgagatctagactgtggacgcggtcgtgaaaacggacgtgaacaggacgaacgaacccgtctggaggaagtgaacagaacggtttcgtcataccccgtctcgtccgtttgtatttcatcaatcgatcgatcgaccggaccaaacgacaatgagaaaggtagccgactcgattcatctccgtcttgaactctgcttttcatttcggctgctccttgatccgtatgaaaagatgaaagaacagaaaaacagaacgagacgagttgaaaccgagtgaaaggaaggacgggatgtagtcaaagaattaagacaagtaatgatgaaaagacgagggaagggatcggagtctccagagaagacgatccagtattggaattggaagcgaaaacaaaagtaaaagtgaaggaaggtatcaaaatcagaatcccaatcaacatcgaaaaacaaaacataggtgtgacacagaaagagaaaagatcatgaaacgtctttcgtttggaccctcgggatcggatcgaactgaatcgaattagacagaacagaacagaaccaaatcaattcaattcaaagaccagagaggagagagagagaagaagaggtgagattgatatacgtcggagagaccgaaaaattgaatgtaaatgtaaacagatgaaacgagataaaattggaaaacaaagagggaaagaagaaatcgaccatatggattcaacggaagctacctagccgactgaatgggattgaaccgaatgaaccaagatcgaacatgggaggtagatgggtatatggcgaacaagtctattcttccgtccgttcatccattcatcgagattggaatgtgggttaaataagaaaaggaattggctcagtgcgggcaacatccaccgatagggcttagccgaaacttcgtattgtctgatcaactcttttctacaagtcttgtcgatctcgcttgtttattttatcttattctacccttcaatcaactttgggcccatcttcgtttgtgacccttctcgatcactatagagcgcgcgactcttagacggatttctctcttttcacatttcggatagaggcgaagaaaaagaaagaaggtaaatgaaaacagagcaactcaatcaggagagccgcccatcggatctatttatgataccttattctcattttttgagccaatcaaggtgggaaaaaaagggctcacttttactaatcttactctgttgattccgagtctggtcctcatcaaagaatgttccttctctcctttcctttttctcgctctcctatctgctttgaagttaaaactttaaagtgaaaaaccgaattgcactaagcattgataatagtgagaacgaagaaaaaagatcagccgcttctatctttcattcctgcggtctgttcggatcaaccgaacagaacacaaagaaacacagaagggaaagacaaatgcagttatgagggataagacagaggctcgacaagacaagatccgagagaccagaaagaaggaaaccaagggaaacaacccgtattctaaacgatctacgctacaggaacaccaaagcaaaaaggagaacttgctaaggcttttagatatatactgatgatagtgacaagaaagtagtaaaaacaataaccagacagatgacgagaagaacaaatgaagacatgatgaaggagaaaagataatggaaatccgaggagaaaaacaagaccgtgagagccaagaaatcgaagaaaagaagagtatcgtaaaagagcgttccaagaaaatatgagaaaagagatgagatgagaagagaagagaagaggaagataagaaatcagaacacggagtgttataccgaaaaagctatttacagatgagatgcaagaagggaaaagagaatctttcagtagatcaaggcgttctccgactgatctgagttgacaatgtcaacctttcgactagccaatcctttggactttcgatcggctttggaagccttggtgttgagaagcctggagaggaaattgccagaggcagcctgggcgactggtgaagtttttgagtttccgttgtagccggtagcgttgcctagaaccggtcgttctgccgcacttgccacagcgtccaggtcgatgtttcgctgactcgaacggacaggaggaccgttgtgtgtcgaccgggtggtcggcatcgccttcgacggtttcgacctggaagactgaggtcgacggggcgaagtagcgagaggcgagaccaaggccaccttgatgggagggggagatgaaaccatttgcggggtcgccggtccgtccgaatcggtcgaagcgatggaagatagcgaggtcgatcgatccatgggaggggcgataaagaccttgtcgtcgatggtggctgtgcggcgatgggagtagaagacgaggtctggtgacgaaggaggagagtaggccggttgctggtgtgcaaagaacggagagaagtgttcgatcacttccgactctgtgatggcaagatcgtagtcgagcaggaacaaaagttgcttttccatcaggttgacttcggcctggctgaacagatgggcgtatcggcactagaagagaaagattggataaaaatggatgtcagagacagaagctatcgacctgagaagcaggtagatctgaagaccaacccagtgtttgtttttcggagaagagtcgttcagatactttgcggcacagatcagggtagccaaaaagactctgaaagggagaagggaagacgaacaaaaggtgtttcagtttcctgcaaagatcgagtcaatgagaaagagaaaaacgtaccggtgtcgggtgcatggaagaccttgggtgtcggtcttgggaagtctgtctcggagcctgtcgaggtagacgagtgtgctgagcagagtggagacctgaacgttggactcttgaacgacgaccgagataaaggcctcgattgagggcagcgagttctgtggtgggcaccgactggctgaggatgatgatggccgagtagactctaccacggctgttgttcgttctcctaggtgatctgagagggagaaggacagaggtcggaatagaaagaaagttagcattcagcctcatgcatgaaaatgtagacaatgacggaaaggaggaaaaaaattaaagaaagaggcagacaaaaaaaaatgaaaaggaggtgaggcaggaaaaagagaacttacagatcatgtcgacagtgacttcagaacggatgagttcaagaaggtctagcgaatgaacaccacagggcataaggctagaaggatgaatggcatccttgaatgggacaggaggaagaggagattctgggcaggtcatgctgctagtagaggcggatgatgcgatcagacgagacatggcttatgcagacaaggtgaaagtgtgatgggtgatatgcagagatgtatgaggagaccggccgagaaaaaaagtaaagggggatctgccgagctggattggactagccaaagcgagcttgtgtgtgtgtgtgtgtgtgtgtgtatgtgtgatgggacaagggagagtgagatatgagaggaatagagagaggagaaagaagaaaaggaaaggagagaaaaaaatgaaagaagagagagtgtttgctttttacaagacgatattctgcttcttttctatctttctatgggaggagggggagcgaatgctgttaatgatgggatttgctatccaagccaatccggggccggtcggtgaatgaagcgagaggagcaacaagcgacggagagaacgtcgaaagaggagagaagaagaaaaacaaggcagaaggtgatgcaaggagaatgggtcggaagaagcgggaacaagaacgctcagggctccaaacaaaacaaagtccagggcaccacgcgaggcgtcgaggcgttttcaggcacaacaaagcccttcgaggcacaaaaaggcaccgtgatagccgggtgtgatgaaccgatcggtgtgaaaatgaaagagagtacgaaggaaataagagtaaggtgaaggggcgtgaaatgctaggatctaaccggccttgggcctgggctgcctgcccagtacgcagggggaccagtcacagaaacaaggcgcccgagcagcgccgccggcaagatggagatctttttccactcgtctcttctcttcttctctttattccgcctgtttctctccagctcgatccctttgtctatctttttcttcggcgcgcccggtcgagaacgttgtgaaggcgagcgagagaagaggctcgacccggaaataagaagggcacgacgccgactgaaagggtgacttgacccggccgacagccgccaaggcgcgtgctgggcacagattttagaatacatctgcgttagctatcccaacaaagcccagtggggatagactataaaaaagactacgaaatagactacagaatagaatgtatagaacacacagatgtgaagggtgctgtgagagagagagaaaaatcaacacacaatcacacgctcctcatacacatcgaaggtacatcacatcacatcacatcacatcacattgcaccacaatgcaatgcaatacaatacagtatgataccgcacaacaaaacaacaacacaacaagtacgatgtcaagtgcaaaaatacagccgcttgactttcggtactttggttggagatatcgactatgtgttcaaccgtcgctcatgtgcggtgtctatatagggcgctctcgcccgggtatcgaaatcatatcggttaatcaatctacactataagcatcaccaccaggttcttcttctcgtactgttttagaatccattctagctgtgcttcggtgtggaagctttcagtccatacggctgcgcgttttgcgtcggctccgcctgttgtcaccaattccattcctctctttcacatctcaaactcacacccacacttgtctcgccctcttttctcttttttctctacttgcttgtcacgtctgatctgtttatatcgccctcgttgcctatcttgcctccgtgtttggcgtacacgctctcttccttcttacattctctcattcgcccgttcgttcttgtttacttgtcttctctttcttccttcttctctgcgattctcaatttctggtctctatttggataaatgagtatatgcttttgagcacacccacgcgcgttagctctcgtcactttatttgtttttcttgtcctcttacattccacaaatgtttccgctccataaccctctctctttcttcctcccactctcctctgcccagtcatctgggatcacacttgttgttctccacctcttttcccacatgtcttttgattgatttttgacttttggtttttgccttttacttttaatatatcgtcactatcgtcttcttccttcctttcgacactcattactagttccgattataacaatacagactcaacccggttcttcggtctctctcaaatgttaaacccgatcttaatccttctttttgtatatatactttctttctaaccctcggtgagtgatcgacagagcaacacagattggtcgatcaattcaaccggaaaatgattgcaaacagctgtggaccgtctgatgttgtgctcgctcctcgttgagcggccggccagtcagagtcttctctaattaactttacatcgatgtcctcgatcggagggtggcattgtgcgttgtctccttctctgaagcaaggtggcaaagatggaggcgcaagaaggtcttgtcatagtagccttcggtttcacatagctacttccgagcgcgtctaagtggattttctctgtcttttggctgccttggtctttctcttaatcctcctctttatcattgagccgatcaacttgaacaaaaaagatggttccctgttcagcaaggctaagccaaagagagaacggataagggcgtgatttccctccgtcgaggcgtttcttctctacggataggcgatccactcaaacttatctctgtcttattcattgcggcgcagcattcgttcttctttagtccgtccaccggctatgtgcatacacttctttactatattctatcattcatcacgcctttcttttcacattccgtatctacccaccacctccaagcctcaacttctaagtcgttagccgatggatttccttcgtcagctctcctagccgcctctccagaggaaaccgagccgcaaccgtcgacaccgcctctttaatcatcgatccttttcctagcgatacactgccagccacgtgtggcgccagaagctatcatatacccatgtatgtatttcgatttggttcggttcgattcggttcggttttattttcgacgtagtttcgatatggagtagtagtagtagtagtag
